United States Patent Application Publication US 2026/0224743 A1, published August 6, 2026 (application 19/145,316).

The application's sequence listing, which the Patent Office published only in electronic form, follows.

SEQUENCE LISTING (37687 sequences)

SEQ ID NO: 1-33 - skipped (33 entries)

SEQ ID NO: 34 - protein, 2085 aa, synthetic construct
MPAAKRVKLDGGDKKYSIGLDIGTNSVGWAVITDEYKVPSKKFKVLGNTDRHSIKKNLIGALLFDSGETAEATRLKRTARRRYTRRKNRICYLQEIFSNEMAKVDDSFFHRLEESFLVEEDKKHERHPIFGNIVDEVAYHEKYPTIYHLRKKLVDSTDKADLRLIYLALAHMIKFRGHFLIEGDLNPDNSDVDKLFIQLVQTYNQLFEENPINASGVDAKAILSARLSKSRRLENLIAQLPGEKKNGLFGNLIALSLGLTPNFKSNFDLAEDAKLQLSKDTYDDDLDNLLAQIGDQYADLFLAAKNLSDAILLSDILRVNTEITKAPLSASMIKRYDEHHQDLTLLKALVRQQLPEKYKEIFFDQSKNGYAGYIDGGASQEEFYKFIKPILEKMDGTEELLVKLNREDLLRKQRTFDNGSIPHQIHLGELHAILRRQEDFYPFLKDNREKIEKILTFRIPYYVGPLARGNSRFAWMTRKSEETITPWNFEEVVDKGASAQSFIERMTNFDKNLPNEKVLPKHSLLYEYFTVYNELTKVKYVTEGMRKPAFLSGEQKKAIVDLLFKTNRKVTVKQLKEDYFKKIECFDSVEISGVEDRFNASLGTYHDLLKIIKDKDFLDNEENEDILEDIVLTLTLFEDREMIEERLKTYAHLFDDKVMKQLKRRRYTGWGRLSRKLINGIRDKQSGKTILDFLKSDGFANRNFMQLIHDDSLTFKEDIQKAQVSGQGDSLHEHIANLAGSPAIKKGILQTVKVVDELVKVMGRHKPENIVIEMARENQTTQKGQKNSRERMKRIEEGIKELGSQILKEHPVENTQLQNEKLYLYYLQNGRDMYVDQELDINRLSDYDVDHIVPQSFLKDDSIDNKVLTRSDKARGKSDNVPSEEVVKKMKNYWRQLLNAKLITQRKFDNLTKAERGGLSELDKAGFIKRQLVETRQITKHVAQILDSRMNTKYDENDKLIREVKVITLKSKLVSDFRKDFQFYKVREINNYHHAHDAYLNAVVGTALIKKYPKLESEFVYGDYKVYDVRKMIAKSEQEIGKATAKYFFYSNIMNFFKTEITLANGEIRKRPLIETNGETGEIVWDKGRDFATVRKVLSMPQVNIVKKTEVQTGGFSKESILPKRNSDKLIARKKDWDPKKYGGFDSPTVAYSVLVVAKVEKGKSKKLKSVKELLGITIMERSSFEKNPIDFLEAKGYKEVKKDLIIKLPKYSLFELENGRKRMLASAGELQKGNELALPSKYVNFLYLASHYEKLKGSPEDNEQKQLFVEQHKHYLDEIIEQISEFSKRVILADANLDKVLSAYNKHRDKPIREQAENIIHLFTLTNLGAPAAFKYFDTTIDRKRYTSTKEVLDATLIHQSITGLYETRIDLSQLGGDGGEAAAKGSSGGLDDEYRLYSPLVKPDQNIQFWLEQFPQAWAETAGMGLAKQVPPQVIQLKASATPVSVRQYPLSKEAQEGIRPHVQRLIQQGILVPVQSPWNTPLLPVRKPGTNDYRPVQDLREVNKRVQDIHPTVPNPYNLLCALPPQRSWYTVLDLKDAFFCLRLHPTSQPLFAFEWRDPGTGRTGQLTWTRLPQGFKNSPTIFNEALHRDLANFRIQHPQVTLLQYVDDLLLAGATKQDCLEGTKALLLELSDLGYRASAKKAQICRREVTYLGYSLRDGQRWLTEARKKTVVQIPAPTTAKQVREFLGKAGFCRLFIPGFATLAAPLYPLTKPKGEFSWAPEHQKAFDAIKKALLSAPALALPDVTKPFTLYVDERKGVARGVLTQTLGPWRRPVAYLSKKLDPVASGWPVCLKAIAAVAILVKDADKLTLGQNITVIAPHALENIVRQPPDRWMTNARMTHYQSLLLTERVTFAPPAALNPATLLPEETDEPVTHDCHQLLIEETGVRKDLTDIPLTGEVLTWFTDGSSYVVEGKRMAGAAVVDGTRTIWASSLPEGTSAQKAELMALTQALRLAEGKSINIYTDSRYAFATAHVHGAIYKQRGWLTSAGREIKNKEEILSLLEALHLPKRLAIIHCPGHQKAKDPISRGNQMADRVAKQAAQGVNLLPAGKRTADGSEFEKRTADGSEFESPKKKAKVE

SEQ ID NO: 35 - protein, 2088 aa, synthetic construct
MPAAKRVKLDGGDKKYSIGLDIGTNSVGWAVITDEYKVPSKKFKVLGNTDRHSIKKNLIGALLFDSGETAEATRLKRTARRRYTRRKNRICYLQEIFSNEMAKVDDSFFHRLEESFLVEEDKKHERHPIFGNIVDEVAYHEKYPTIYHLRKKLVDSTDKADLRLIYLALAHMIKFRGHFLIEGDLNPDNSDVDKLFIQLVQTYNQLFEENPINASGVDAKAILSARLSKSRRLENLIAQLPGEKKNGLFGNLIALSLGLTPNFKSNFDLAEDAKLQLSKDTYDDDLDNLLAQIGDQYADLFLAAKNLSDAILLSDILRVNTEITKAPLSASMIKRYDEHHQDLTLLKALVRQQLPEKYKEIFFDQSKNGYAGYIDGGASQEEFYKFIKPILEKMDGTEELLVKLNREDLLRKQRTFDNGSIPHQIHLGELHAILRRQEDFYPFLKDNREKIEKILTFRIPYYVGPLARGNSRFAWMTRKSEETITPWNFEEVVDKGASAQSFIERMTNFDKNLPNEKVLPKHSLLYEYFTVYNELTKVKYVTEGMRKPAFLSGEQKKAIVDLLFKTNRKVTVKQLKEDYFKKIECFDSVEISGVEDRFNASLGTYHDLLKIIKDKDFLDNEENEDILEDIVLTLTLFEDREMIEERLKTYAHLFDDKVMKQLKRRRYTGWGRLSRKLINGIRDKQSGKTILDFLKSDGFANRNFMQLIHDDSLTFKEDIQKAQVSGQGDSLHEHIANLAGSPAIKKGILQTVKVVDELVKVMGRHKPENIVIEMARENQTTQKGQKNSRERMKRIEEGIKELGSQILKEHPVENTQLQNEKLYLYYLQNGRDMYVDQELDINRLSDYDVDHIVPQSFLKDDSIDNKVLTRSDKARGKSDNVPSEEVVKKMKNYWRQLLNAKLITQRKFDNLTKAERGGLSELDKAGFIKRQLVETRQITKHVAQILDSRMNTKYDENDKLIREVKVITLKSKLVSDFRKDFQFYKVREINNYHHAHDAYLNAVVGTALIKKYPKLESEFVYGDYKVYDVRKMIAKSEQEIGKATAKYFFYSNIMNFFKTEITLANGEIRKRPLIETNGETGEIVWDKGRDFATVRKVLSMPQVNIVKKTEVQTGGFSKESILPKRNSDKLIARKKDWDPKKYGGFDSPTVAYSVLVVAKVEKGKSKKLKSVKELLGITIMERSSFEKNPIDFLEAKGYKEVKKDLIIKLPKYSLFELENGRKRMLASAGELQKGNELALPSKYVNFLYLASHYEKLKGSPEDNEQKQLFVEQHKHYLDEIIEQISEFSKRVILADANLDKVLSAYNKHRDKPIREQAENIIHLFTLTNLGAPAAFKYFDTTIDRKRYTSTKEVLDATLIHQSITGLYETRIDLSQLGGDGGEAAAKGGSPAPGGLDDEYRLYSPLVKPDQNIQFWLEQFPQAWAETAGMGLAKQVPPQVIQLKASATPVSVRQYPLSKEAQEGIRPHVQRLIQQGILVPVQSPWNTPLLPVRKPGTNDYRPVQDLREVNKRVQDIHPTVPNPYNLLCALPPQRSWYTVLDLKDAFFCLRLHPTSQPLFAFEWRDPGTGRTGQLTWTRLPQGFKNSPTIFNEALHRDLANFRIQHPQVTLLQYVDDLLLAGATKQDCLEGTKALLLELSDLGYRASAKKAQICRREVTYLGYSLRDGQRWLTEARKKTVVQIPAPTTAKQVREFLGKAGFCRLFIPGFATLAAPLYPLTKPKGEFSWAPEHQKAFDAIKKALLSAPALALPDVTKPFTLYVDERKGVARGVLTQTLGPWRRPVAYLSKKLDPVASGWPVCLKAIAAVAILVKDADKLTLGQNITVIAPHALENIVRQPPDRWMTNARMTHYQSLLLTERVTFAPPAALNPATLLPEETDEPVTHDCHQLLIEETGVRKDLTDIPLTGEVLTWFTDGSSYVVEGKRMAGAAVVDGTRTIWASSLPEGTSAQKAELMALTQALRLAEGKSINIYTDSRYAFATAHVHGAIYKQRGWLTSAGREIKNKEEILSLLEALHLPKRLAIIHCPGHQKAKDPISRGNQMADRVAKQAAQGVNLLPAGKRTADGSEFEKRTADGSEFESPKKKAKVE

SEQ ID NO: 36 - protein, 2123 aa, synthetic construct
MPAAKRVKLDGGDKKYSIGLDIGTNSVGWAVITDEYKVPSKKFKVLGNTDRHSIKKNLIGALLFDSGETAEATRLKRTARRRYTRRKNRICYLQEIFSNEMAKVDDSFFHRLEESFLVEEDKKHERHPIFGNIVDEVAYHEKYPTIYHLRKKLVDSTDKADLRLIYLALAHMIKFRGHFLIEGDLNPDNSDVDKLFIQLVQTYNQLFEENPINASGVDAKAILSARLSKSRRLENLIAQLPGEKKNGLFGNLIALSLGLTPNFKSNFDLAEDAKLQLSKDTYDDDLDNLLAQIGDQYADLFLAAKNLSDAILLSDILRVNTEITKAPLSASMIKRYDEHHQDLTLLKALVRQQLPEKYKEIFFDQSKNGYAGYIDGGASQEEFYKFIKPILEKMDGTEELLVKLNREDLLRKQRTFDNGSIPHQIHLGELHAILRRQEDFYPFLKDNREKIEKILTFRIPYYVGPLARGNSRFAWMTRKSEETITPWNFEEVVDKGASAQSFIERMTNFDKNLPNEKVLPKHSLLYEYFTVYNELTKVKYVTEGMRKPAFLSGEQKKAIVDLLFKTNRKVTVKQLKEDYFKKIECFDSVEISGVEDRFNASLGTYHDLLKIIKDKDFLDNEENEDILEDIVLTLTLFEDREMIEERLKTYAHLFDDKVMKQLKRRRYTGWGRLSRKLINGIRDKQSGKTILDFLKSDGFANRNFMQLIHDDSLTFKEDIQKAQVSGQGDSLHEHIANLAGSPAIKKGILQTVKVVDELVKVMGRHKPENIVIEMARENQTTQKGQKNSRERMKRIEEGIKELGSQILKEHPVENTQLQNEKLYLYYLQNGRDMYVDQELDINRLSDYDVDHIVPQSFLKDDSIDNKVLTRSDKARGKSDNVPSEEVVKKMKNYWRQLLNAKLITQRKFDNLTKAERGGLSELDKAGFIKRQLVETRQITKHVAQILDSRMNTKYDENDKLIREVKVITLKSKLVSDFRKDFQFYKVREINNYHHAHDAYLNAVVGTALIKKYPKLESEFVYGDYKVYDVRKMIAKSEQEIGKATAKYFFYSNIMNFFKTEITLANGEIRKRPLIETNGETGEIVWDKGRDFATVRKVLSMPQVNIVKKTEVQTGGFSKESILPKRNSDKLIARKKDWDPKKYGGFDSPTVAYSVLVVAKVEKGKSKKLKSVKELLGITIMERSSFEKNPIDFLEAKGYKEVKKDLIIKLPKYSLFELENGRKRMLASAGELQKGNELALPSKYVNFLYLASHYEKLKGSPEDNEQKQLFVEQHKHYLDEIIEQISEFSKRVILADANLDKVLSAYNKHRDKPIREQAENIIHLFTLTNLGAPAAFKYFDTTIDRKRYTSTKEVLDATLIHQSITGLYETRIDLSQLGGDGGAEAAAKEAAAKEAAAKEAAAKALEAEAAAKEAAAKEAAAKEAAAKAGGLDDEYRLYSPLVKPDQNIQFWLEQFPQAWAETAGMGLAKQVPPQVIQLKASATPVSVRQYPLSKEAQEGIRPHVQRLIQQGILVPVQSPWNTPLLPVRKPGTNDYRPVQDLREVNKRVQDIHPTVPNPYNLLCALPPQRSWYTVLDLKDAFFCLRLHPTSQPLFAFEWRDPGTGRTGQLTWTRLPQGFKNSPTIFNEALHRDLANFRIQHPQVTLLQYVDDLLLAGATKQDCLEGTKALLLELSDLGYRASAKKAQICRREVTYLGYSLRDGQRWLTEARKKTVVQIPAPTTAKQVREFLGKAGFCRLFIPGFATLAAPLYPLTKPKGEFSWAPEHQKAFDAIKKALLSAPALALPDVTKPFTLYVDERKGVARGVLTQTLGPWRRPVAYLSKKLDPVASGWPVCLKAIAAVAILVKDADKLTLGQNITVIAPHALENIVRQPPDRWMTNARMTHYQSLLLTERVTFAPPAALNPATLLPEETDEPVTHDCHQLLIEETGVRKDLTDIPLTGEVLTWFTDGSSYVVEGKRMAGAAVVDGTRTIWASSLPEGTSAQKAELMALTQALRLAEGKSINIYTDSRYAFATAHVHGAIYKQRGWLTSAGREIKNKEEILSLLEALHLPKRLAIIHCPGHQKAKDPISRGNQMADRVAKQAAQGVNLLPAGKRTADGSEFEKRTADGSEFESPKKKAKVE

SEQ ID NO: 37 - protein, 2092 aa, synthetic construct
MPAAKRVKLDGGDKKYSIGLDIGTNSVGWAVITDEYKVPSKKFKVLGNTDRHSIKKNLIGALLFDSGETAEATRLKRTARRRYTRRKNRICYLQEIFSNEMAKVDDSFFHRLEESFLVEEDKKHERHPIFGNIVDEVAYHEKYPTIYHLRKKLVDSTDKADLRLIYLALAHMIKFRGHFLIEGDLNPDNSDVDKLFIQLVQTYNQLFEENPINASGVDAKAILSARLSKSRRLENLIAQLPGEKKNGLFGNLIALSLGLTPNFKSNFDLAEDAKLQLSKDTYDDDLDNLLAQIGDQYADLFLAAKNLSDAILLSDILRVNTEITKAPLSASMIKRYDEHHQDLTLLKALVRQQLPEKYKEIFFDQSKNGYAGYIDGGASQEEFYKFIKPILEKMDGTEELLVKLNREDLLRKQRTFDNGSIPHQIHLGELHAILRRQEDFYPFLKDNREKIEKILTFRIPYYVGPLARGNSRFAWMTRKSEETITPWNFEEVVDKGASAQSFIERMTNFDKNLPNEKVLPKHSLLYEYFTVYNELTKVKYVTEGMRKPAFLSGEQKKAIVDLLFKTNRKVTVKQLKEDYFKKIECFDSVEISGVEDRFNASLGTYHDLLKIIKDKDFLDNEENEDILEDIVLTLTLFEDREMIEERLKTYAHLFDDKVMKQLKRRRYTGWGRLSRKLINGIRDKQSGKTILDFLKSDGFANRNFMQLIHDDSLTFKEDIQKAQVSGQGDSLHEHIANLAGSPAIKKGILQTVKVVDELVKVMGRHKPENIVIEMARENQTTQKGQKNSRERMKRIEEGIKELGSQILKEHPVENTQLQNEKLYLYYLQNGRDMYVDQELDINRLSDYDVDHIVPQSFLKDDSIDNKVLTRSDKARGKSDNVPSEEVVKKMKNYWRQLLNAKLITQRKFDNLTKAERGGLSELDKAGFIKRQLVETRQITKHVAQILDSRMNTKYDENDKLIREVKVITLKSKLVSDFRKDFQFYKVREINNYHHAHDAYLNAVVGTALIKKYPKLESEFVYGDYKVYDVRKMIAKSEQEIGKATAKYFFYSNIMNFFKTEITLANGEIRKRPLIETNGETGEIVWDKGRDFATVRKVLSMPQVNIVKKTEVQTGGFSKESILPKRNSDKLIARKKDWDPKKYGGFDSPTVAYSVLVVAKVEKGKSKKLKSVKELLGITIMERSSFEKNPIDFLEAKGYKEVKKDLIIKLPKYSLFELENGRKRMLASAGELQKGNELALPSKYVNFLYLASHYEKLKGSPEDNEQKQLFVEQHKHYLDEIIEQISEFSKRVILADANLDKVLSAYNKHRDKPIREQAENIIHLFTLTNLGAPAAFKYFDTTIDRKRYTSTKEVLDATLIHQSITGLYETRIDLSQLGGDGGEAAAKEAAAKEAAAKGGLDDEYRLYSPLVKPDQNIQFWLEQFPQAWAETAGMGLAKQVPPQVIQLKASATPVSVRQYPLSKEAQEGIRPHVQRLIQQGILVPVQSPWNTPLLPVRKPGTNDYRPVQDLREVNKRVQDIHPTVPNPYNLLCALPPQRSWYTVLDLKDAFFCLRLHPTSQPLFAFEWRDPGTGRTGQLTWTRLPQGFKNSPTIFNEALHRDLANFRIQHPQVTLLQYVDDLLLAGATKQDCLEGTKALLLELSDLGYRASAKKAQICRREVTYLGYSLRDGQRWLTEARKKTVVQIPAPTTAKQVREFLGKAGFCRLFIPGFATLAAPLYPLTKPKGEFSWAPEHQKAFDAIKKALLSAPALALPDVTKPFTLYVDERKGVARGVLTQTLGPWRRPVAYLSKKLDPVASGWPVCLKAIAAVAILVKDADKLTLGQNITVIAPHALENIVRQPPDRWMTNARMTHYQSLLLTERVTFAPPAALNPATLLPEETDEPVTHDCHQLLIEETGVRKDLTDIPLTGEVLTWFTDGSSYVVEGKRMAGAAVVDGTRTIWASSLPEGTSAQKAELMALTQALRLAEGKSINIYTDSRYAFATAHVHGAIYKQRGWLTSAGREIKNKEEILSLLEALHLPKRLAIIHCPGHQKAKDPISRGNQMADRVAKQAAQGVNLLPAGKRTADGSEFEKRTADGSEFESPKKKAKVE

SEQ ID NO: 38 - protein, 2086 aa, synthetic construct
MPAAKRVKLDGGDKKYSIGLDIGTNSVGWAVITDEYKVPSKKFKVLGNTDRHSIKKNLIGALLFDSGETAEATRLKRTARRRYTRRKNRICYLQEIFSNEMAKVDDSFFHRLEESFLVEEDKKHERHPIFGNIVDEVAYHEKYPTIYHLRKKLVDSTDKADLRLIYLALAHMIKFRGHFLIEGDLNPDNSDVDKLFIQLVQTYNQLFEENPINASGVDAKAILSARLSKSRRLENLIAQLPGEKKNGLFGNLIALSLGLTPNFKSNFDLAEDAKLQLSKDTYDDDLDNLLAQIGDQYADLFLAAKNLSDAILLSDILRVNTEITKAPLSASMIKRYDEHHQDLTLLKALVRQQLPEKYKEIFFDQSKNGYAGYIDGGASQEEFYKFIKPILEKMDGTEELLVKLNREDLLRKQRTFDNGSIPHQIHLGELHAILRRQEDFYPFLKDNREKIEKILTFRIPYYVGPLARGNSRFAWMTRKSEETITPWNFEEVVDKGASAQSFIERMTNFDKNLPNEKVLPKHSLLYEYFTVYNELTKVKYVTEGMRKPAFLSGEQKKAIVDLLFKTNRKVTVKQLKEDYFKKIECFDSVEISGVEDRFNASLGTYHDLLKIIKDKDFLDNEENEDILEDIVLTLTLFEDREMIEERLKTYAHLFDDKVMKQLKRRRYTGWGRLSRKLINGIRDKQSGKTILDFLKSDGFANRNFMQLIHDDSLTFKEDIQKAQVSGQGDSLHEHIANLAGSPAIKKGILQTVKVVDELVKVMGRHKPENIVIEMARENQTTQKGQKNSRERMKRIEEGIKELGSQILKEHPVENTQLQNEKLYLYYLQNGRDMYVDQELDINRLSDYDVDHIVPQSFLKDDSIDNKVLTRSDKARGKSDNVPSEEVVKKMKNYWRQLLNAKLITQRKFDNLTKAERGGLSELDKAGFIKRQLVETRQITKHVAQILDSRMNTKYDENDKLIREVKVITLKSKLVSDFRKDFQFYKVREINNYHHAHDAYLNAVVGTALIKKYPKLESEFVYGDYKVYDVRKMIAKSEQEIGKATAKYFFYSNIMNFFKTEITLANGEIRKRPLIETNGETGEIVWDKGRDFATVRKVLSMPQVNIVKKTEVQTGGFSKESILPKRNSDKLIARKKDWDPKKYGGFDSPTVAYSVLVVAKVEKGKSKKLKSVKELLGITIMERSSFEKNPIDFLEAKGYKEVKKDLIIKLPKYSLFELENGRKRMLASAGELQKGNELALPSKYVNFLYLASHYEKLKGSPEDNEQKQLFVEQHKHYLDEIIEQISEFSKRVILADANLDKVLSAYNKHRDKPIREQAENIIHLFTLTNLGAPAAFKYFDTTIDRKRYTSTKEVLDATLIHQSITGLYETRIDLSQLGGDGGGGSGSSPAPGGLDDEYRLYSPLVKPDQNIQFWLEQFPQAWAETAGMGLAKQVPPQVIQLKASATPVSVRQYPLSKEAQEGIRPHVQRLIQQGILVPVQSPWNTPLLPVRKPGTNDYRPVQDLREVNKRVQDIHPTVPNPYNLLCALPPQRSWYTVLDLKDAFFCLRLHPTSQPLFAFEWRDPGTGRTGQLTWTRLPQGFKNSPTIFNEALHRDLANFRIQHPQVTLLQYVDDLLLAGATKQDCLEGTKALLLELSDLGYRASAKKAQICRREVTYLGYSLRDGQRWLTEARKKTVVQIPAPTTAKQVREFLGKAGFCRLFIPGFATLAAPLYPLTKPKGEFSWAPEHQKAFDAIKKALLSAPALALPDVTKPFTLYVDERKGVARGVLTQTLGPWRRPVAYLSKKLDPVASGWPVCLKAIAAVAILVKDADKLTLGQNITVIAPHALENIVRQPPDRWMTNARMTHYQSLLLTERVTFAPPAALNPATLLPEETDEPVTHDCHQLLIEETGVRKDLTDIPLTGEVLTWFTDGSSYVVEGKRMAGAAVVDGTRTIWASSLPEGTSAQKAELMALTQALRLAEGKSINIYTDSRYAFATAHVHGAIYKQRGWLTSAGREIKNKEEILSLLEALHLPKRLAIIHCPGHQKAKDPISRGNQMADRVAKQAAQGVNLLPAGKRTADGSEFEKRTADGSEFESPKKKAKVE

SEQ ID NO: 39 - protein, 2102 aa, synthetic construct
MPAAKRVKLDGGDKKYSIGLDIGTNSVGWAVITDEYKVPSKKFKVLGNTDRHSIKKNLIGALLFDSGETAEATRLKRTARRRYTRRKNRICYLQEIFSNEMAKVDDSFFHRLEESFLVEEDKKHERHPIFGNIVDEVAYHEKYPTIYHLRKKLVDSTDKADLRLIYLALAHMIKFRGHFLIEGDLNPDNSDVDKLFIQLVQTYNQLFEENPINASGVDAKAILSARLSKSRRLENLIAQLPGEKKNGLFGNLIALSLGLTPNFKSNFDLAEDAKLQLSKDTYDDDLDNLLAQIGDQYADLFLAAKNLSDAILLSDILRVNTEITKAPLSASMIKRYDEHHQDLTLLKALVRQQLPEKYKEIFFDQSKNGYAGYIDGGASQEEFYKFIKPILEKMDGTEELLVKLNREDLLRKQRTFDNGSIPHQIHLGELHAILRRQEDFYPFLKDNREKIEKILTFRIPYYVGPLARGNSRFAWMTRKSEETITPWNFEEVVDKGASAQSFIERMTNFDKNLPNEKVLPKHSLLYEYFTVYNELTKVKYVTEGMRKPAFLSGEQKKAIVDLLFKTNRKVTVKQLKEDYFKKIECFDSVEISGVEDRFNASLGTYHDLLKIIKDKDFLDNEENEDILEDIVLTLTLFEDREMIEERLKTYAHLFDDKVMKQLKRRRYTGWGRLSRKLINGIRDKQSGKTILDFLKSDGFANRNFMQLIHDDSLTFKEDIQKAQVSGQGDSLHEHIANLAGSPAIKKGILQTVKVVDELVKVMGRHKPENIVIEMARENQTTQKGQKNSRERMKRIEEGIKELGSQILKEHPVENTQLQNEKLYLYYLQNGRDMYVDQELDINRLSDYDVDHIVPQSFLKDDSIDNKVLTRSDKARGKSDNVPSEEVVKKMKNYWRQLLNAKLITQRKFDNLTKAERGGLSELDKAGFIKRQLVETRQITKHVAQILDSRMNTKYDENDKLIREVKVITLKSKLVSDFRKDFQFYKVREINNYHHAHDAYLNAVVGTALIKKYPKLESEFVYGDYKVYDVRKMIAKSEQEIGKATAKYFFYSNIMNFFKTEITLANGEIRKRPLIETNGETGEIVWDKGRDFATVRKVLSMPQVNIVKKTEVQTGGFSKESILPKRNSDKLIARKKDWDPKKYGGFDSPTVAYSVLVVAKVEKGKSKKLKSVKELLGITIMERSSFEKNPIDFLEAKGYKEVKKDLIIKLPKYSLFELENGRKRMLASAGELQKGNELALPSKYVNFLYLASHYEKLKGSPEDNEQKQLFVEQHKHYLDEIIEQISEFSKRVILADANLDKVLSAYNKHRDKPIREQAENIIHLFTLTNLGAPAAFKYFDTTIDRKRYTSTKEVLDATLIHQSITGLYETRIDLSQLGGDGGEAAAKEAAAKEAAAKEAAAKEAAAKGGLDDEYRLYSPLVKPDQNIQFWLEQFPQAWAETAGMGLAKQVPPQVIQLKASATPVSVRQYPLSKEAQEGIRPHVQRLIQQGILVPVQSPWNTPLLPVRKPGTNDYRPVQDLREVNKRVQDIHPTVPNPYNLLCALPPQRSWYTVLDLKDAFFCLRLHPTSQPLFAFEWRDPGTGRTGQLTWTRLPQGFKNSPTIFNEALHRDLANFRIQHPQVTLLQYVDDLLLAGATKQDCLEGTKALLLELSDLGYRASAKKAQICRREVTYLGYSLRDGQRWLTEARKKTVVQIPAPTTAKQVREFLGKAGFCRLFIPGFATLAAPLYPLTKPKGEFSWAPEHQKAFDAIKKALLSAPALALPDVTKPFTLYVDERKGVARGVLTQTLGPWRRPVAYLSKKLDPVASGWPVCLKAIAAVAILVKDADKLTLGQNITVIAPHALENIVRQPPDRWMTNARMTHYQSLLLTERVTFAPPAALNPATLLPEETDEPVTHDCHQLLIEETGVRKDLTDIPLTGEVLTWFTDGSSYVVEGKRMAGAAVVDGTRTIWASSLPEGTSAQKAELMALTQALRLAEGKSINIYTDSRYAFATAHVHGAIYKQRGWLTSAGREIKNKEEILSLLEALHLPKRLAIIHCPGHQKAKDPISRGNQMADRVAKQAAQGVNLLPAGKRTADGSEFEKRTADGSEFESPKKKAKVE

SEQ ID NO: 40 - protein, 2088 aa, synthetic construct
MPAAKRVKLDGGDKKYSIGLDIGTNSVGWAVITDEYKVPSKKFKVLGNTDRHSIKKNLIGALLFDSGETAEATRLKRTARRRYTRRKNRICYLQEIFSNEMAKVDDSFFHRLEESFLVEEDKKHERHPIFGNIVDEVAYHEKYPTIYHLRKKLVDSTDKADLRLIYLALAHMIKFRGHFLIEGDLNPDNSDVDKLFIQLVQTYNQLFEENPINASGVDAKAILSARLSKSRRLENLIAQLPGEKKNGLFGNLIALSLGLTPNFKSNFDLAEDAKLQLSKDTYDDDLDNLLAQIGDQYADLFLAAKNLSDAILLSDILRVNTEITKAPLSASMIKRYDEHHQDLTLLKALVRQQLPEKYKEIFFDQSKNGYAGYIDGGASQEEFYKFIKPILEKMDGTEELLVKLNREDLLRKQRTFDNGSIPHQIHLGELHAILRRQEDFYPFLKDNREKIEKILTFRIPYYVGPLARGNSRFAWMTRKSEETITPWNFEEVVDKGASAQSFIERMTNFDKNLPNEKVLPKHSLLYEYFTVYNELTKVKYVTEGMRKPAFLSGEQKKAIVDLLFKTNRKVTVKQLKEDYFKKIECFDSVEISGVEDRFNASLGTYHDLLKIIKDKDFLDNEENEDILEDIVLTLTLFEDREMIEERLKTYAHLFDDKVMKQLKRRRYTGWGRLSRKLINGIRDKQSGKTILDFLKSDGFANRNFMQLIHDDSLTFKEDIQKAQVSGQGDSLHEHIANLAGSPAIKKGILQTVKVVDELVKVMGRHKPENIVIEMARENQTTQKGQKNSRERMKRIEEGIKELGSQILKEHPVENTQLQNEKLYLYYLQNGRDMYVDQELDINRLSDYDVDHIVPQSFLKDDSIDNKVLTRSDKARGKSDNVPSEEVVKKMKNYWRQLLNAKLITQRKFDNLTKAERGGLSELDKAGFIKRQLVETRQITKHVAQILDSRMNTKYDENDKLIREVKVITLKSKLVSDFRKDFQFYKVREINNYHHAHDAYLNAVVGTALIKKYPKLESEFVYGDYKVYDVRKMIAKSEQEIGKATAKYFFYSNIMNFFKTEITLANGEIRKRPLIETNGETGEIVWDKGRDFATVRKVLSMPQVNIVKKTEVQTGGFSKESILPKRNSDKLIARKKDWDPKKYGGFDSPTVAYSVLVVAKVEKGKSKKLKSVKELLGITIMERSSFEKNPIDFLEAKGYKEVKKDLIIKLPKYSLFELENGRKRMLASAGELQKGNELALPSKYVNFLYLASHYEKLKGSPEDNEQKQLFVEQHKHYLDEIIEQISEFSKRVILADANLDKVLSAYNKHRDKPIREQAENIIHLFTLTNLGAPAAFKYFDTTIDRKRYTSTKEVLDATLIHQSITGLYETRIDLSQLGGDGGGSSGGGEAAAKGGLDDEYRLYSPLVKPDQNIQFWLEQFPQAWAETAGMGLAKQVPPQVIQLKASATPVSVRQYPLSKEAQEGIRPHVQRLIQQGILVPVQSPWNTPLLPVRKPGTNDYRPVQDLREVNKRVQDIHPTVPNPYNLLCALPPQRSWYTVLDLKDAFFCLRLHPTSQPLFAFEWRDPGTGRTGQLTWTRLPQGFKNSPTIFNEALHRDLANFRIQHPQVTLLQYVDDLLLAGATKQDCLEGTKALLLELSDLGYRASAKKAQICRREVTYLGYSLRDGQRWLTEARKKTVVQIPAPTTAKQVREFLGKAGFCRLFIPGFATLAAPLYPLTKPKGEFSWAPEHQKAFDAIKKALLSAPALALPDVTKPFTLYVDERKGVARGVLTQTLGPWRRPVAYLSKKLDPVASGWPVCLKAIAAVAILVKDADKLTLGQNITVIAPHALENIVRQPPDRWMTNARMTHYQSLLLTERVTFAPPAALNPATLLPEETDEPVTHDCHQLLIEETGVRKDLTDIPLTGEVLTWFTDGSSYVVEGKRMAGAAVVDGTRTIWASSLPEGTSAQKAELMALTQALRLAEGKSINIYTDSRYAFATAHVHGAIYKQRGWLTSAGREIKNKEEILSLLEALHLPKRLAIIHCPGHQKAKDPISRGNQMADRVAKQAAQGVNLLPAGKRTADGSEFEKRTADGSEFESPKKKAKVE

SEQ ID NO: 41 - protein, 2089 aa, synthetic construct
MPAAKRVKLDGGDKKYSIGLDIGTNSVGWAVITDEYKVPSKKFKVLGNTDRHSIKKNLIGALLFDSGETAEATRLKRTARRRYTRRKNRICYLQEIFSNEMAKVDDSFFHRLEESFLVEEDKKHERHPIFGNIVDEVAYHEKYPTIYHLRKKLVDSTDKADLRLIYLALAHMIKFRGHFLIEGDLNPDNSDVDKLFIQLVQTYNQLFEENPINASGVDAKAILSARLSKSRRLENLIAQLPGEKKNGLFGNLIALSLGLTPNFKSNFDLAEDAKLQLSKDTYDDDLDNLLAQIGDQYADLFLAAKNLSDAILLSDILRVNTEITKAPLSASMIKRYDEHHQDLTLLKALVRQQLPEKYKEIFFDQSKNGYAGYIDGGASQEEFYKFIKPILEKMDGTEELLVKLNREDLLRKQRTFDNGSIPHQIHLGELHAILRRQEDFYPFLKDNREKIEKILTFRIPYYVGPLARGNSRFAWMTRKSEETITPWNFEEVVDKGASAQSFIERMTNFDKNLPNEKVLPKHSLLYEYFTVYNELTKVKYVTEGMRKPAFLSGEQKKAIVDLLFKTNRKVTVKQLKEDYFKKIECFDSVEISGVEDRFNASLGTYHDLLKIIKDKDFLDNEENEDILEDIVLTLTLFEDREMIEERLKTYAHLFDDKVMKQLKRRRYTGWGRLSRKLINGIRDKQSGKTILDFLKSDGFANRNFMQLIHDDSLTFKEDIQKAQVSGQGDSLHEHIANLAGSPAIKKGILQTVKVVDELVKVMGRHKPENIVIEMARENQTTQKGQKNSRERMKRIEEGIKELGSQILKEHPVENTQLQNEKLYLYYLQNGRDMYVDQELDINRLSDYDVDHIVPQSFLKDDSIDNKVLTRSDKARGKSDNVPSEEVVKKMKNYWRQLLNAKLITQRKFDNLTKAERGGLSELDKAGFIKRQLVETRQITKHVAQILDSRMNTKYDENDKLIREVKVITLKSKLVSDFRKDFQFYKVREINNYHHAHDAYLNAVVGTALIKKYPKLESEFVYGDYKVYDVRKMIAKSEQEIGKATAKYFFYSNIMNFFKTEITLANGEIRKRPLIETNGETGEIVWDKGRDFATVRKVLSMPQVNIVKKTEVQTGGFSKESILPKRNSDKLIARKKDWDPKKYGGFDSPTVAYSVLVVAKVEKGKSKKLKSVKELLGITIMERSSFEKNPIDFLEAKGYKEVKKDLIIKLPKYSLFELENGRKRMLASAGELQKGNELALPSKYVNFLYLASHYEKLKGSPEDNEQKQLFVEQHKHYLDEIIEQISEFSKRVILADANLDKVLSAYNKHRDKPIREQAENIIHLFTLTNLGAPAAFKYFDTTIDRKRYTSTKEVLDATLIHQSITGLYETRIDLSQLGGDGGGSSGSSGSSGSSGGLDDEYRLYSPLVKPDQNIQFWLEQFPQAWAETAGMGLAKQVPPQVIQLKASATPVSVRQYPLSKEAQEGIRPHVQRLIQQGILVPVQSPWNTPLLPVRKPGTNDYRPVQDLREVNKRVQDIHPTVPNPYNLLCALPPQRSWYTVLDLKDAFFCLRLHPTSQPLFAFEWRDPGTGRTGQLTWTRLPQGFKNSPTIFNEALHRDLANFRIQHPQVTLLQYVDDLLLAGATKQDCLEGTKALLLELSDLGYRASAKKAQICRREVTYLGYSLRDGQRWLTEARKKTVVQIPAPTTAKQVREFLGKAGFCRLFIPGFATLAAPLYPLTKPKGEFSWAPEHQKAFDAIKKALLSAPALALPDVTKPFTLYVDERKGVARGVLTQTLGPWRRPVAYLSKKLDPVASGWPVCLKAIAAVAILVKDADKLTLGQNITVIAPHALENIVRQPPDRWMTNARMTHYQSLLLTERVTFAPPAALNPATLLPEETDEPVTHDCHQLLIEETGVRKDLTDIPLTGEVLTWFTDGSSYVVEGKRMAGAAVVDGTRTIWASSLPEGTSAQKAELMALTQALRLAEGKSINIYTDSRYAFATAHVHGAIYKQRGWLTSAGREIKNKEEILSLLEALHLPKRLAIIHCPGHQKAKDPISRGNQMADRVAKQAAQGVNLLPAGKRTADGSEFEKRTADGSEFESPKKKAKVE

SEQ ID NO: 42 - skipped

SEQ ID NO: 43 - protein, 2086 aa, synthetic construct
MPAAKRVKLDGGDKKYSIGLDIGTNSVGWAVITDEYKVPSKKFKVLGNTDRHSIKKNLIGALLFDSGETAEATRLKRTARRRYTRRKNRICYLQEIFSNEMAKVDDSFFHRLEESFLVEEDKKHERHPIFGNIVDEVAYHEKYPTIYHLRKKLVDSTDKADLRLIYLALAHMIKFRGHFLIEGDLNPDNSDVDKLFIQLVQTYNQLFEENPINASGVDAKAILSARLSKSRRLENLIAQLPGEKKNGLFGNLIALSLGLTPNFKSNFDLAEDAKLQLSKDTYDDDLDNLLAQIGDQYADLFLAAKNLSDAILLSDILRVNTEITKAPLSASMIKRYDEHHQDLTLLKALVRQQLPEKYKEIFFDQSKNGYAGYIDGGASQEEFYKFIKPILEKMDGTEELLVKLNREDLLRKQRTFDNGSIPHQIHLGELHAILRRQEDFYPFLKDNREKIEKILTFRIPYYVGPLARGNSRFAWMTRKSEETITPWNFEEVVDKGASAQSFIERMTNFDKNLPNEKVLPKHSLLYEYFTVYNELTKVKYVTEGMRKPAFLSGEQKKAIVDLLFKTNRKVTVKQLKEDYFKKIECFDSVEISGVEDRFNASLGTYHDLLKIIKDKDFLDNEENEDILEDIVLTLTLFEDREMIEERLKTYAHLFDDKVMKQLKRRRYTGWGRLSRKLINGIRDKQSGKTILDFLKSDGFANRNFMQLIHDDSLTFKEDIQKAQVSGQGDSLHEHIANLAGSPAIKKGILQTVKVVDELVKVMGRHKPENIVIEMARENQTTQKGQKNSRERMKRIEEGIKELGSQILKEHPVENTQLQNEKLYLYYLQNGRDMYVDQELDINRLSDYDVDHIVPQSFLKDDSIDNKVLTRSDKARGKSDNVPSEEVVKKMKNYWRQLLNAKLITQRKFDNLTKAERGGLSELDKAGFIKRQLVETRQITKHVAQILDSRMNTKYDENDKLIREVKVITLKSKLVSDFRKDFQFYKVREINNYHHAHDAYLNAVVGTALIKKYPKLESEFVYGDYKVYDVRKMIAKSEQEIGKATAKYFFYSNIMNFFKTEITLANGEIRKRPLIETNGETGEIVWDKGRDFATVRKVLSMPQVNIVKKTEVQTGGFSKESILPKRNSDKLIARKKDWDPKKYGGFDSPTVAYSVLVVAKVEKGKSKKLKSVKELLGITIMERSSFEKNPIDFLEAKGYKEVKKDLIIKLPKYSLFELENGRKRMLASAGELQKGNELALPSKYVNFLYLASHYEKLKGSPEDNEQKQLFVEQHKHYLDEIIEQISEFSKRVILADANLDKVLSAYNKHRDKPIREQAENIIHLFTLTNLGAPAAFKYFDTTIDRKRYTSTKEVLDATLIHQSITGLYETRIDLSQLGGDGGGGGGSSPAPGGLDDEYRLYSPLVKPDQNIQFWLEQFPQAWAETAGMGLAKQVPPQVIQLKASATPVSVRQYPLSKEAQEGIRPHVQRLIQQGILVPVQSPWNTPLLPVRKPGTNDYRPVQDLREVNKRVQDIHPTVPNPYNLLCALPPQRSWYTVLDLKDAFFCLRLHPTSQPLFAFEWRDPGTGRTGQLTWTRLPQGFKNSPTIFNEALHRDLANFRIQHPQVTLLQYVDDLLLAGATKQDCLEGTKALLLELSDLGYRASAKKAQICRREVTYLGYSLRDGQRWLTEARKKTVVQIPAPTTAKQVREFLGKAGFCRLFIPGFATLAAPLYPLTKPKGEFSWAPEHQKAFDAIKKALLSAPALALPDVTKPFTLYVDERKGVARGVLTQTLGPWRRPVAYLSKKLDPVASGWPVCLKAIAAVAILVKDADKLTLGQNITVIAPHALENIVRQPPDRWMTNARMTHYQSLLLTERVTFAPPAALNPATLLPEETDEPVTHDCHQLLIEETGVRKDLTDIPLTGEVLTWFTDGSSYVVEGKRMAGAAVVDGTRTIWASSLPEGTSAQKAELMALTQALRLAEGKSINIYTDSRYAFATAHVHGAIYKQRGWLTSAGREIKNKEEILSLLEALHLPKRLAIIHCPGHQKAKDPISRGNQMADRVAKQAAQGVNLLPAGKRTADGSEFEKRTADGSEFESPKKKAKVE

SEQ ID NO: 44-46 - skipped (3 entries)

SEQ ID NO: 47 - protein, 2083 aa, synthetic construct
MPAAKRVKLDGGDKKYSIGLDIGTNSVGWAVITDEYKVPSKKFKVLGNTDRHSIKKNLIGALLFDSGETAEATRLKRTARRRYTRRKNRICYLQEIFSNEMAKVDDSFFHRLEESFLVEEDKKHERHPIFGNIVDEVAYHEKYPTIYHLRKKLVDSTDKADLRLIYLALAHMIKFRGHFLIEGDLNPDNSDVDKLFIQLVQTYNQLFEENPINASGVDAKAILSARLSKSRRLENLIAQLPGEKKNGLFGNLIALSLGLTPNFKSNFDLAEDAKLQLSKDTYDDDLDNLLAQIGDQYADLFLAAKNLSDAILLSDILRVNTEITKAPLSASMIKRYDEHHQDLTLLKALVRQQLPEKYKEIFFDQSKNGYAGYIDGGASQEEFYKFIKPILEKMDGTEELLVKLNREDLLRKQRTFDNGSIPHQIHLGELHAILRRQEDFYPFLKDNREKIEKILTFRIPYYVGPLARGNSRFAWMTRKSEETITPWNFEEVVDKGASAQSFIERMTNFDKNLPNEKVLPKHSLLYEYFTVYNELTKVKYVTEGMRKPAFLSGEQKKAIVDLLFKTNRKVTVKQLKEDYFKKIECFDSVEISGVEDRFNASLGTYHDLLKIIKDKDFLDNEENEDILEDIVLTLTLFEDREMIEERLKTYAHLFDDKVMKQLKRRRYTGWGRLSRKLINGIRDKQSGKTILDFLKSDGFANRNFMQLIHDDSLTFKEDIQKAQVSGQGDSLHEHIANLAGSPAIKKGILQTVKVVDELVKVMGRHKPENIVIEMARENQTTQKGQKNSRERMKRIEEGIKELGSQILKEHPVENTQLQNEKLYLYYLQNGRDMYVDQELDINRLSDYDVDHIVPQSFLKDDSIDNKVLTRSDKARGKSDNVPSEEVVKKMKNYWRQLLNAKLITQRKFDNLTKAERGGLSELDKAGFIKRQLVETRQITKHVAQILDSRMNTKYDENDKLIREVKVITLKSKLVSDFRKDFQFYKVREINNYHHAHDAYLNAVVGTALIKKYPKLESEFVYGDYKVYDVRKMIAKSEQEIGKATAKYFFYSNIMNFFKTEITLANGEIRKRPLIETNGETGEIVWDKGRDFATVRKVLSMPQVNIVKKTEVQTGGFSKESILPKRNSDKLIARKKDWDPKKYGGFDSPTVAYSVLVVAKVEKGKSKKLKSVKELLGITIMERSSFEKNPIDFLEAKGYKEVKKDLIIKLPKYSLFELENGRKRMLASAGELQKGNELALPSKYVNFLYLASHYEKLKGSPEDNEQKQLFVEQHKHYLDEIIEQISEFSKRVILADANLDKVLSAYNKHRDKPIREQAENIIHLFTLTNLGAPAAFKYFDTTIDRKRYTSTKEVLDATLIHQSITGLYETRIDLSQLGGDGGGSSPAPGGLDDEYRLYSPLVKPDQNIQFWLEQFPQAWAETAGMGLAKQVPPQVIQLKASATPVSVRQYPLSKEAQEGIRPHVQRLIQQGILVPVQSPWNTPLLPVRKPGTNDYRPVQDLREVNKRVQDIHPTVPNPYNLLCALPPQRSWYTVLDLKDAFFCLRLHPTSQPLFAFEWRDPGTGRTGQLTWTRLPQGFKNSPTIFNEALHRDLANFRIQHPQVTLLQYVDDLLLAGATKQDCLEGTKALLLELSDLGYRASAKKAQICRREVTYLGYSLRDGQRWLTEARKKTVVQIPAPTTAKQVREFLGKAGFCRLFIPGFATLAAPLYPLTKPKGEFSWAPEHQKAFDAIKKALLSAPALALPDVTKPFTLYVDERKGVARGVLTQTLGPWRRPVAYLSKKLDPVASGWPVCLKAIAAVAILVKDADKLTLGQNITVIAPHALENIVRQPPDRWMTNARMTHYQSLLLTERVTFAPPAALNPATLLPEETDEPVTHDCHQLLIEETGVRKDLTDIPLTGEVLTWFTDGSSYVVEGKRMAGAAVVDGTRTIWASSLPEGTSAQKAELMALTQALRLAEGKSINIYTDSRYAFATAHVHGAIYKQRGWLTSAGREIKNKEEILSLLEALHLPKRLAIIHCPGHQKAKDPISRGNQMADRVAKQAAQGVNLLPAGKRTADGSEFEKRTADGSEFESPKKKAKVE

SEQ ID NO: 48 - protein, 2085 aa, synthetic construct
MPAAKRVKLDGGDKKYSIGLDIGTNSVGWAVITDEYKVPSKKFKVLGNTDRHSIKKNLIGALLFDSGETAEATRLKRTARRRYTRRKNRICYLQEIFSNEMAKVDDSFFHRLEESFLVEEDKKHERHPIFGNIVDEVAYHEKYPTIYHLRKKLVDSTDKADLRLIYLALAHMIKFRGHFLIEGDLNPDNSDVDKLFIQLVQTYNQLFEENPINASGVDAKAILSARLSKSRRLENLIAQLPGEKKNGLFGNLIALSLGLTPNFKSNFDLAEDAKLQLSKDTYDDDLDNLLAQIGDQYADLFLAAKNLSDAILLSDILRVNTEITKAPLSASMIKRYDEHHQDLTLLKALVRQQLPEKYKEIFFDQSKNGYAGYIDGGASQEEFYKFIKPILEKMDGTEELLVKLNREDLLRKQRTFDNGSIPHQIHLGELHAILRRQEDFYPFLKDNREKIEKILTFRIPYYVGPLARGNSRFAWMTRKSEETITPWNFEEVVDKGASAQSFIERMTNFDKNLPNEKVLPKHSLLYEYFTVYNELTKVKYVTEGMRKPAFLSGEQKKAIVDLLFKTNRKVTVKQLKEDYFKKIECFDSVEISGVEDRFNASLGTYHDLLKIIKDKDFLDNEENEDILEDIVLTLTLFEDREMIEERLKTYAHLFDDKVMKQLKRRRYTGWGRLSRKLINGIRDKQSGKTILDFLKSDGFANRNFMQLIHDDSLTFKEDIQKAQVSGQGDSLHEHIANLAGSPAIKKGILQTVKVVDELVKVMGRHKPENIVIEMARENQTTQKGQKNSRERMKRIEEGIKELGSQILKEHPVENTQLQNEKLYLYYLQNGRDMYVDQELDINRLSDYDVDHIVPQSFLKDDSIDNKVLTRSDKARGKSDNVPSEEVVKKMKNYWRQLLNAKLITQRKFDNLTKAERGGLSELDKAGFIKRQLVETRQITKHVAQILDSRMNTKYDENDKLIREVKVITLKSKLVSDFRKDFQFYKVREINNYHHAHDAYLNAVVGTALIKKYPKLESEFVYGDYKVYDVRKMIAKSEQEIGKATAKYFFYSNIMNFFKTEITLANGEIRKRPLIETNGETGEIVWDKGRDFATVRKVLSMPQVNIVKKTEVQTGGFSKESILPKRNSDKLIARKKDWDPKKYGGFDSPTVAYSVLVVAKVEKGKSKKLKSVKELLGITIMERSSFEKNPIDFLEAKGYKEVKKDLIIKLPKYSLFELENGRKRMLASAGELQKGNELALPSKYVNFLYLASHYEKLKGSPEDNEQKQLFVEQHKHYLDEIIEQISEFSKRVILADANLDKVLSAYNKHRDKPIREQAENIIHLFTLTNLGAPAAFKYFDTTIDRKRYTSTKEVLDATLIHQSITGLYETRIDLSQLGGDGGEAAAKGGGGGLDDEYRLYSPLVKPDQNIQFWLEQFPQAWAETAGMGLAKQVPPQVIQLKASATPVSVRQYPLSKEAQEGIRPHVQRLIQQGILVPVQSPWNTPLLPVRKPGTNDYRPVQDLREVNKRVQDIHPTVPNPYNLLCALPPQRSWYTVLDLKDAFFCLRLHPTSQPLFAFEWRDPGTGRTGQLTWTRLPQGFKNSPTIFNEALHRDLANFRIQHPQVTLLQYVDDLLLAGATKQDCLEGTKALLLELSDLGYRASAKKAQICRREVTYLGYSLRDGQRWLTEARKKTVVQIPAPTTAKQVREFLGKAGFCRLFIPGFATLAAPLYPLTKPKGEFSWAPEHQKAFDAIKKALLSAPALALPDVTKPFTLYVDERKGVARGVLTQTLGPWRRPVAYLSKKLDPVASGWPVCLKAIAAVAILVKDADKLTLGQNITVIAPHALENIVRQPPDRWMTNARMTHYQSLLLTERVTFAPPAALNPATLLPEETDEPVTHDCHQLLIEETGVRKDLTDIPLTGEVLTWFTDGSSYVVEGKRMAGAAVVDGTRTIWASSLPEGTSAQKAELMALTQALRLAEGKSINIYTDSRYAFATAHVHGAIYKQRGWLTSAGREIKNKEEILSLLEALHLPKRLAIIHCPGHQKAKDPISRGNQMADRVAKQAAQGVNLLPAGKRTADGSEFEKRTADGSEFESPKKKAKVE

SEQ ID NO: 49 - protein, 2088 aa, synthetic construct
MPAAKRVKLDGGDKKYSIGLDIGTNSVGWAVITDEYKVPSKKFKVLGNTDRHSIKKNLIGALLFDSGETAEATRLKRTARRRYTRRKNRICYLQEIFSNEMAKVDDSFFHRLEESFLVEEDKKHERHPIFGNIVDEVAYHEKYPTIYHLRKKLVDSTDKADLRLIYLALAHMIKFRGHFLIEGDLNPDNSDVDKLFIQLVQTYNQLFEENPINASGVDAKAILSARLSKSRRLENLIAQLPGEKKNGLFGNLIALSLGLTPNFKSNFDLAEDAKLQLSKDTYDDDLDNLLAQIGDQYADLFLAAKNLSDAILLSDILRVNTEITKAPLSASMIKRYDEHHQDLTLLKALVRQQLPEKYKEIFFDQSKNGYAGYIDGGASQEEFYKFIKPILEKMDGTEELLVKLNREDLLRKQRTFDNGSIPHQIHLGELHAILRRQEDFYPFLKDNREKIEKILTFRIPYYVGPLARGNSRFAWMTRKSEETITPWNFEEVVDKGASAQSFIERMTNFDKNLPNEKVLPKHSLLYEYFTVYNELTKVKYVTEGMRKPAFLSGEQKKAIVDLLFKTNRKVTVKQLKEDYFKKIECFDSVEISGVEDRFNASLGTYHDLLKIIKDKDFLDNEENEDILEDIVLTLTLFEDREMIEERLKTYAHLFDDKVMKQLKRRRYTGWGRLSRKLINGIRDKQSGKTILDFLKSDGFANRNFMQLIHDDSLTFKEDIQKAQVSGQGDSLHEHIANLAGSPAIKKGILQTVKVVDELVKVMGRHKPENIVIEMARENQTTQKGQKNSRERMKRIEEGIKELGSQILKEHPVENTQLQNEKLYLYYLQNGRDMYVDQELDINRLSDYDVDHIVPQSFLKDDSIDNKVLTRSDKARGKSDNVPSEEVVKKMKNYWRQLLNAKLITQRKFDNLTKAERGGLSELDKAGFIKRQLVETRQITKHVAQILDSRMNTKYDENDKLIREVKVITLKSKLVSDFRKDFQFYKVREINNYHHAHDAYLNAVVGTALIKKYPKLESEFVYGDYKVYDVRKMIAKSEQEIGKATAKYFFYSNIMNFFKTEITLANGEIRKRPLIETNGETGEIVWDKGRDFATVRKVLSMPQVNIVKKTEVQTGGFSKESILPKRNSDKLIARKKDWDPKKYGGFDSPTVAYSVLVVAKVEKGKSKKLKSVKELLGITIMERSSFEKNPIDFLEAKGYKEVKKDLIIKLPKYSLFELENGRKRMLASAGELQKGNELALPSKYVNFLYLASHYEKLKGSPEDNEQKQLFVEQHKHYLDEIIEQISEFSKRVILADANLDKVLSAYNKHRDKPIREQAENIIHLFTLTNLGAPAAFKYFDTTIDRKRYTSTKEVLDATLIHQSITGLYETRIDLSQLGGDGGGGSEAAAKPAPGGLDDEYRLYSPLVKPDQNIQFWLEQFPQAWAETAGMGLAKQVPPQVIQLKASATPVSVRQYPLSKEAQEGIRPHVQRLIQQGILVPVQSPWNTPLLPVRKPGTNDYRPVQDLREVNKRVQDIHPTVPNPYNLLCALPPQRSWYTVLDLKDAFFCLRLHPTSQPLFAFEWRDPGTGRTGQLTWTRLPQGFKNSPTIFNEALHRDLANFRIQHPQVTLLQYVDDLLLAGATKQDCLEGTKALLLELSDLGYRASAKKAQICRREVTYLGYSLRDGQRWLTEARKKTVVQIPAPTTAKQVREFLGKAGFCRLFIPGFATLAAPLYPLTKPKGEFSWAPEHQKAFDAIKKALLSAPALALPDVTKPFTLYVDERKGVARGVLTQTLGPWRRPVAYLSKKLDPVASGWPVCLKAIAAVAILVKDADKLTLGQNITVIAPHALENIVRQPPDRWMTNARMTHYQSLLLTERVTFAPPAALNPATLLPEETDEPVTHDCHQLLIEETGVRKDLTDIPLTGEVLTWFTDGSSYVVEGKRMAGAAVVDGTRTIWASSLPEGTSAQKAELMALTQALRLAEGKSINIYTDSRYAFATAHVHGAIYKQRGWLTSAGREIKNKEEILSLLEALHLPKRLAIIHCPGHQKAKDPISRGNQMADRVAKQAAQGVNLLPAGKRTADGSEFEKRTADGSEFESPKKKAKVE

SEQ ID NO: 50 - skipped

SEQ ID NO: 51 - protein, 2092 aa, synthetic construct
MPAAKRVKLDGGDKKYSIGLDIGTNSVGWAVITDEYKVPSKKFKVLGNTDRHSIKKNLIGALLFDSGETAEATRLKRTARRRYTRRKNRICYLQEIFSNEMAKVDDSFFHRLEESFLVEEDKKHERHPIFGNIVDEVAYHEKYPTIYHLRKKLVDSTDKADLRLIYLALAHMIKFRGHFLIEGDLNPDNSDVDKLFIQLVQTYNQLFEENPINASGVDAKAILSARLSKSRRLENLIAQLPGEKKNGLFGNLIALSLGLTPNFKSNFDLAEDAKLQLSKDTYDDDLDNLLAQIGDQYADLFLAAKNLSDAILLSDILRVNTEITKAPLSASMIKRYDEHHQDLTLLKALVRQQLPEKYKEIFFDQSKNGYAGYIDGGASQEEFYKFIKPILEKMDGTEELLVKLNREDLLRKQRTFDNGSIPHQIHLGELHAILRRQEDFYPFLKDNREKIEKILTFRIPYYVGPLARGNSRFAWMTRKSEETITPWNFEEVVDKGASAQSFIERMTNFDKNLPNEKVLPKHSLLYEYFTVYNELTKVKYVTEGMRKPAFLSGEQKKAIVDLLFKTNRKVTVKQLKEDYFKKIECFDSVEISGVEDRFNASLGTYHDLLKIIKDKDFLDNEENEDILEDIVLTLTLFEDREMIEERLKTYAHLFDDKVMKQLKRRRYTGWGRLSRKLINGIRDKQSGKTILDFLKSDGFANRNFMQLIHDDSLTFKEDIQKAQVSGQGDSLHEHIANLAGSPAIKKGILQTVKVVDELVKVMGRHKPENIVIEMARENQTTQKGQKNSRERMKRIEEGIKELGSQILKEHPVENTQLQNEKLYLYYLQNGRDMYVDQELDINRLSDYDVDHIVPQSFLKDDSIDNKVLTRSDKARGKSDNVPSEEVVKKMKNYWRQLLNAKLITQRKFDNLTKAERGGLSELDKAGFIKRQLVETRQITKHVAQILDSRMNTKYDENDKLIREVKVITLKSKLVSDFRKDFQFYKVREINNYHHAHDAYLNAVVGTALIKKYPKLESEFVYGDYKVYDVRKMIAKSEQEIGKATAKYFFYSNIMNFFKTEITLANGEIRKRPLIETNGETGEIVWDKGRDFATVRKVLSMPQVNIVKKTEVQTGGFSKESILPKRNSDKLIARKKDWDPKKYGGFDSPTVAYSVLVVAKVEKGKSKKLKSVKELLGITIMERSSFEKNPIDFLEAKGYKEVKKDLIIKLPKYSLFELENGRKRMLASAGELQKGNELALPSKYVNFLYLASHYEKLKGSPEDNEQKQLFVEQHKHYLDEIIEQISEFSKRVILADANLDKVLSAYNKHRDKPIREQAENIIHLFTLTNLGAPAAFKYFDTTIDRKRYTSTKEVLDATLIHQSITGLYETRIDLSQLGGDGGGGGGSGGGGSGGGGSGGLDDEYRLYSPLVKPDQNIQFWLEQFPQAWAETAGMGLAKQVPPQVIQLKASATPVSVRQYPLSKEAQEGIRPHVQRLIQQGILVPVQSPWNTPLLPVRKPGTNDYRPVQDLREVNKRVQDIHPTVPNPYNLLCALPPQRSWYTVLDLKDAFFCLRLHPTSQPLFAFEWRDPGTGRTGQLTWTRLPQGFKNSPTIFNEALHRDLANFRIQHPQVTLLQYVDDLLLAGATKQDCLEGTKALLLELSDLGYRASAKKAQICRREVTYLGYSLRDGQRWLTEARKKTVVQIPAPTTAKQVREFLGKAGFCRLFIPGFATLAAPLYPLTKPKGEFSWAPEHQKAFDAIKKALLSAPALALPDVTKPFTLYVDERKGVARGVLTQTLGPWRRPVAYLSKKLDPVASGWPVCLKAIAAVAILVKDADKLTLGQNITVIAPHALENIVRQPPDRWMTNARMTHYQSLLLTERVTFAPPAALNPATLLPEETDEPVTHDCHQLLIEETGVRKDLTDIPLTGEVLTWFTDGSSYVVEGKRMAGAAVVDGTRTIWASSLPEGTSAQKAELMALTQALRLAEGKSINIYTDSRYAFATAHVHGAIYKQRGWLTSAGREIKNKEEILSLLEALHLPKRLAIIHCPGHQKAKDPISRGNQMADRVAKQAAQGVNLLPAGKRTADGSEFEKRTADGSEFESPKKKAKVE

SEQ ID NO: 52-61 - skipped (10 entries)

SEQ ID NO: 62 - protein, 2088 aa, synthetic construct
MPAAKRVKLDGGDKKYSIGLDIGTNSVGWAVITDEYKVPSKKFKVLGNTDRHSIKKNLIGALLFDSGETAEATRLKRTARRRYTRRKNRICYLQEIFSNEMAKVDDSFFHRLEESFLVEEDKKHERHPIFGNIVDEVAYHEKYPTIYHLRKKLVDSTDKADLRLIYLALAHMIKFRGHFLIEGDLNPDNSDVDKLFIQLVQTYNQLFEENPINASGVDAKAILSARLSKSRRLENLIAQLPGEKKNGLFGNLIALSLGLTPNFKSNFDLAEDAKLQLSKDTYDDDLDNLLAQIGDQYADLFLAAKNLSDAILLSDILRVNTEITKAPLSASMIKRYDEHHQDLTLLKALVRQQLPEKYKEIFFDQSKNGYAGYIDGGASQEEFYKFIKPILEKMDGTEELLVKLNREDLLRKQRTFDNGSIPHQIHLGELHAILRRQEDFYPFLKDNREKIEKILTFRIPYYVGPLARGNSRFAWMTRKSEETITPWNFEEVVDKGASAQSFIERMTNFDKNLPNEKVLPKHSLLYEYFTVYNELTKVKYVTEGMRKPAFLSGEQKKAIVDLLFKTNRKVTVKQLKEDYFKKIECFDSVEISGVEDRFNASLGTYHDLLKIIKDKDFLDNEENEDILEDIVLTLTLFEDREMIEERLKTYAHLFDDKVMKQLKRRRYTGWGRLSRKLINGIRDKQSGKTILDFLKSDGFANRNFMQLIHDDSLTFKEDIQKAQVSGQGDSLHEHIANLAGSPAIKKGILQTVKVVDELVKVMGRHKPENIVIEMARENQTTQKGQKNSRERMKRIEEGIKELGSQILKEHPVENTQLQNEKLYLYYLQNGRDMYVDQELDINRLSDYDVDHIVPQSFLKDDSIDNKVLTRSDKARGKSDNVPSEEVVKKMKNYWRQLLNAKLITQRKFDNLTKAERGGLSELDKAGFIKRQLVETRQITKHVAQILDSRMNTKYDENDKLIREVKVITLKSKLVSDFRKDFQFYKVREINNYHHAHDAYLNAVVGTALIKKYPKLESEFVYGDYKVYDVRKMIAKSEQEIGKATAKYFFYSNIMNFFKTEITLANGEIRKRPLIETNGETGEIVWDKGRDFATVRKVLSMPQVNIVKKTEVQTGGFSKESILPKRNSDKLIARKKDWDPKKYGGFDSPTVAYSVLVVAKVEKGKSKKLKSVKELLGITIMERSSFEKNPIDFLEAKGYKEVKKDLIIKLPKYSLFELENGRKRMLASAGELQKGNELALPSKYVNFLYLASHYEKLKGSPEDNEQKQLFVEQHKHYLDEIIEQISEFSKRVILADANLDKVLSAYNKHRDKPIREQAENIIHLFTLTNLGAPAAFKYFDTTIDRKRYTSTKEVLDATLIHQSITGLYETRIDLSQLGGDGGPAPAPAPAPAPGGLDDEYRLYSPLVKPDQNIQFWLEQFPQAWAETAGMGLAKQVPPQVIQLKASATPVSVRQYPLSKEAQEGIRPHVQRLIQQGILVPVQSPWNTPLLPVRKPGTNDYRPVQDLREVNKRVQDIHPTVPNPYNLLCALPPQRSWYTVLDLKDAFFCLRLHPTSQPLFAFEWRDPGTGRTGQLTWTRLPQGFKNSPTIFNEALHRDLANFRIQHPQVTLLQYVDDLLLAGATKQDCLEGTKALLLELSDLGYRASAKKAQICRREVTYLGYSLRDGQRWLTEARKKTVVQIPAPTTAKQVREFLGKAGFCRLFIPGFATLAAPLYPLTKPKGEFSWAPEHQKAFDAIKKALLSAPALALPDVTKPFTLYVDERKGVARGVLTQTLGPWRRPVAYLSKKLDPVASGWPVCLKAIAAVAILVKDADKLTLGQNITVIAPHALENIVRQPPDRWMTNARMTHYQSLLLTERVTFAPPAALNPATLLPEETDEPVTHDCHQLLIEETGVRKDLTDIPLTGEVLTWFTDGSSYVVEGKRMAGAAVVDGTRTIWASSLPEGTSAQKAELMALTQALRLAEGKSINIYTDSRYAFATAHVHGAIYKQRGWLTSAGREIKNKEEILSLLEALHLPKRLAIIHCPGHQKAKDPISRGNQMADRVAKQAAQGVNLLPAGKRTADGSEFEKRTADGSEFESPKKKAKVE

SEQ ID NO: 63-64 - skipped (2 entries)

SEQ ID NO: 65 - protein, 2088 aa, synthetic construct
MPAAKRVKLDGGDKKYSIGLDIGTNSVGWAVITDEYKVPSKKFKVLGNTDRHSIKKNLIGALLFDSGETAEATRLKRTARRRYTRRKNRICYLQEIFSNEMAKVDDSFFHRLEESFLVEEDKKHERHPIFGNIVDEVAYHEKYPTIYHLRKKLVDSTDKADLRLIYLALAHMIKFRGHFLIEGDLNPDNSDVDKLFIQLVQTYNQLFEENPINASGVDAKAILSARLSKSRRLENLIAQLPGEKKNGLFGNLIALSLGLTPNFKSNFDLAEDAKLQLSKDTYDDDLDNLLAQIGDQYADLFLAAKNLSDAILLSDILRVNTEITKAPLSASMIKRYDEHHQDLTLLKALVRQQLPEKYKEIFFDQSKNGYAGYIDGGASQEEFYKFIKPILEKMDGTEELLVKLNREDLLRKQRTFDNGSIPHQIHLGELHAILRRQEDFYPFLKDNREKIEKILTFRIPYYVGPLARGNSRFAWMTRKSEETITPWNFEEVVDKGASAQSFIERMTNFDKNLPNEKVLPKHSLLYEYFTVYNELTKVKYVTEGMRKPAFLSGEQKKAIVDLLFKTNRKVTVKQLKEDYFKKIECFDSVEISGVEDRFNASLGTYHDLLKIIKDKDFLDNEENEDILEDIVLTLTLFEDREMIEERLKTYAHLFDDKVMKQLKRRRYTGWGRLSRKLINGIRDKQSGKTILDFLKSDGFANRNFMQLIHDDSLTFKEDIQKAQVSGQGDSLHEHIANLAGSPAIKKGILQTVKVVDELVKVMGRHKPENIVIEMARENQTTQKGQKNSRERMKRIEEGIKELGSQILKEHPVENTQLQNEKLYLYYLQNGRDMYVDQELDINRLSDYDVDHIVPQSFLKDDSIDNKVLTRSDKARGKSDNVPSEEVVKKMKNYWRQLLNAKLITQRKFDNLTKAERGGLSELDKAGFIKRQLVETRQITKHVAQILDSRMNTKYDENDKLIREVKVITLKSKLVSDFRKDFQFYKVREINNYHHAHDAYLNAVVGTALIKKYPKLESEFVYGDYKVYDVRKMIAKSEQEIGKATAKYFFYSNIMNFFKTEITLANGEIRKRPLIETNGETGEIVWDKGRDFATVRKVLSMPQVNIVKKTEVQTGGFSKESILPKRNSDKLIARKKDWDPKKYGGFDSPTVAYSVLVVAKVEKGKSKKLKSVKELLGITIMERSSFEKNPIDFLEAKGYKEVKKDLIIKLPKYSLFELENGRKRMLASAGELQKGNELALPSKYVNFLYLASHYEKLKGSPEDNEQKQLFVEQHKHYLDEIIEQISEFSKRVILADANLDKVLSAYNKHRDKPIREQAENIIHLFTLTNLGAPAAFKYFDTTIDRKRYTSTKEVLDATLIHQSITGLYETRIDLSQLGGDGGGGGEAAAKGGSGGLDDEYRLYSPLVKPDQNIQFWLEQFPQAWAETAGMGLAKQVPPQVIQLKASATPVSVRQYPLSKEAQEGIRPHVQRLIQQGILVPVQSPWNTPLLPVRKPGTNDYRPVQDLREVNKRVQDIHPTVPNPYNLLCALPPQRSWYTVLDLKDAFFCLRLHPTSQPLFAFEWRDPGTGRTGQLTWTRLPQGFKNSPTIFNEALHRDLANFRIQHPQVTLLQYVDDLLLAGATKQDCLEGTKALLLELSDLGYRASAKKAQICRREVTYLGYSLRDGQRWLTEARKKTVVQIPAPTTAKQVREFLGKAGFCRLFIPGFATLAAPLYPLTKPKGEFSWAPEHQKAFDAIKKALLSAPALALPDVTKPFTLYVDERKGVARGVLTQTLGPWRRPVAYLSKKLDPVASGWPVCLKAIAAVAILVKDADKLTLGQNITVIAPHALENIVRQPPDRWMTNARMTHYQSLLLTERVTFAPPAALNPATLLPEETDEPVTHDCHQLLIEETGVRKDLTDIPLTGEVLTWFTDGSSYVVEGKRMAGAAVVDGTRTIWASSLPEGTSAQKAELMALTQALRLAEGKSINIYTDSRYAFATAHVHGAIYKQRGWLTSAGREIKNKEEILSLLEALHLPKRLAIIHCPGHQKAKDPISRGNQMADRVAKQAAQGVNLLPAGKRTADGSEFEKRTADGSEFESPKKKAKVE

SEQ ID NO: 66-82 - skipped (17 entries)

SEQ ID NO: 83 - protein, 2088 aa, synthetic construct
MPAAKRVKLDGGDKKYSIGLDIGTNSVGWAVITDEYKVPSKKFKVLGNTDRHSIKKNLIGALLFDSGETAEATRLKRTARRRYTRRKNRICYLQEIFSNEMAKVDDSFFHRLEESFLVEEDKKHERHPIFGNIVDEVAYHEKYPTIYHLRKKLVDSTDKADLRLIYLALAHMIKFRGHFLIEGDLNPDNSDVDKLFIQLVQTYNQLFEENPINASGVDAKAILSARLSKSRRLENLIAQLPGEKKNGLFGNLIALSLGLTPNFKSNFDLAEDAKLQLSKDTYDDDLDNLLAQIGDQYADLFLAAKNLSDAILLSDILRVNTEITKAPLSASMIKRYDEHHQDLTLLKALVRQQLPEKYKEIFFDQSKNGYAGYIDGGASQEEFYKFIKPILEKMDGTEELLVKLNREDLLRKQRTFDNGSIPHQIHLGELHAILRRQEDFYPFLKDNREKIEKILTFRIPYYVGPLARGNSRFAWMTRKSEETITPWNFEEVVDKGASAQSFIERMTNFDKNLPNEKVLPKHSLLYEYFTVYNELTKVKYVTEGMRKPAFLSGEQKKAIVDLLFKTNRKVTVKQLKEDYFKKIECFDSVEISGVEDRFNASLGTYHDLLKIIKDKDFLDNEENEDILEDIVLTLTLFEDREMIEERLKTYAHLFDDKVMKQLKRRRYTGWGRLSRKLINGIRDKQSGKTILDFLKSDGFANRNFMQLIHDDSLTFKEDIQKAQVSGQGDSLHEHIANLAGSPAIKKGILQTVKVVDELVKVMGRHKPENIVIEMARENQTTQKGQKNSRERMKRIEEGIKELGSQILKEHPVENTQLQNEKLYLYYLQNGRDMYVDQELDINRLSDYDVDHIVPQSFLKDDSIDNKVLTRSDKARGKSDNVPSEEVVKKMKNYWRQLLNAKLITQRKFDNLTKAERGGLSELDKAGFIKRQLVETRQITKHVAQILDSRMNTKYDENDKLIREVKVITLKSKLVSDFRKDFQFYKVREINNYHHAHDAYLNAVVGTALIKKYPKLESEFVYGDYKVYDVRKMIAKSEQEIGKATAKYFFYSNIMNFFKTEITLANGEIRKRPLIETNGETGEIVWDKGRDFATVRKVLSMPQVNIVKKTEVQTGGFSKESILPKRNSDKLIARKKDWDPKKYGGFDSPTVAYSVLVVAKVEKGKSKKLKSVKELLGITIMERSSFEKNPIDFLEAKGYKEVKKDLIIKLPKYSLFELENGRKRMLASAGELQKGNELALPSKYVNFLYLASHYEKLKGSPEDNEQKQLFVEQHKHYLDEIIEQISEFSKRVILADANLDKVLSAYNKHRDKPIREQAENIIHLFTLTNLGAPAAFKYFDTTIDRKRYTSTKEVLDATLIHQSITGLYETRIDLSQLGGDGGEAAAKGSSGGSGGLDDEYRLYSPLVKPDQNIQFWLEQFPQAWAETAGMGLAKQVPPQVIQLKASATPVSVRQYPLSKEAQEGIRPHVQRLIQQGILVPVQSPWNTPLLPVRKPGTNDYRPVQDLREVNKRVQDIHPTVPNPYNLLCALPPQRSWYTVLDLKDAFFCLRLHPTSQPLFAFEWRDPGTGRTGQLTWTRLPQGFKNSPTIFNEALHRDLANFRIQHPQVTLLQYVDDLLLAGATKQDCLEGTKALLLELSDLGYRASAKKAQICRREVTYLGYSLRDGQRWLTEARKKTVVQIPAPTTAKQVREFLGKAGFCRLFIPGFATLAAPLYPLTKPKGEFSWAPEHQKAFDAIKKALLSAPALALPDVTKPFTLYVDERKGVARGVLTQTLGPWRRPVAYLSKKLDPVASGWPVCLKAIAAVAILVKDADKLTLGQNITVIAPHALENIVRQPPDRWMTNARMTHYQSLLLTERVTFAPPAALNPATLLPEETDEPVTHDCHQLLIEETGVRKDLTDIPLTGEVLTWFTDGSSYVVEGKRMAGAAVVDGTRTIWASSLPEGTSAQKAELMALTQALRLAEGKSINIYTDSRYAFATAHVHGAIYKQRGWLTSAGREIKNKEEILSLLEALHLPKRLAIIHCPGHQKAKDPISRGNQMADRVAKQAAQGVNLLPAGKRTADGSEFEKRTADGSEFESPKKKAKVE

SEQ ID NO: 84-89 - skipped (6 entries)

SEQ ID NO: 90 - protein, 2093 aa, synthetic construct
MPAAKRVKLDGGDKKYSIGLDIGTNSVGWAVITDEYKVPSKKFKVLGNTDRHSIKKNLIGALLFDSGETAEATRLKRTARRRYTRRKNRICYLQEIFSNEMAKVDDSFFHRLEESFLVEEDKKHERHPIFGNIVDEVAYHEKYPTIYHLRKKLVDSTDKADLRLIYLALAHMIKFRGHFLIEGDLNPDNSDVDKLFIQLVQTYNQLFEENPINASGVDAKAILSARLSKSRRLENLIAQLPGEKKNGLFGNLIALSLGLTPNFKSNFDLAEDAKLQLSKDTYDDDLDNLLAQIGDQYADLFLAAKNLSDAILLSDILRVNTEITKAPLSASMIKRYDEHHQDLTLLKALVRQQLPEKYKEIFFDQSKNGYAGYIDGGASQEEFYKFIKPILEKMDGTEELLVKLNREDLLRKQRTFDNGSIPHQIHLGELHAILRRQEDFYPFLKDNREKIEKILTFRIPYYVGPLARGNSRFAWMTRKSEETITPWNFEEVVDKGASAQSFIERMTNFDKNLPNEKVLPKHSLLYEYFTVYNELTKVKYVTEGMRKPAFLSGEQKKAIVDLLFKTNRKVTVKQLKEDYFKKIECFDSVEISGVEDRFNASLGTYHDLLKIIKDKDFLDNEENEDILEDIVLTLTLFEDREMIEERLKTYAHLFDDKVMKQLKRRRYTGWGRLSRKLINGIRDKQSGKTILDFLKSDGFANRNFMQLIHDDSLTFKEDIQKAQVSGQGDSLHEHIANLAGSPAIKKGILQTVKVVDELVKVMGRHKPENIVIEMARENQTTQKGQKNSRERMKRIEEGIKELGSQILKEHPVENTQLQNEKLYLYYLQNGRDMYVDQELDINRLSDYDVDHIVPQSFLKDDSIDNKVLTRSDKARGKSDNVPSEEVVKKMKNYWRQLLNAKLITQRKFDNLTKAERGGLSELDKAGFIKRQLVETRQITKHVAQILDSRMNTKYDENDKLIREVKVITLKSKLVSDFRKDFQFYKVREINNYHHAHDAYLNAVVGTALIKKYPKLESEFVYGDYKVYDVRKMIAKSEQEIGKATAKYFFYSNIMNFFKTEITLANGEIRKRPLIETNGETGEIVWDKGRDFATVRKVLSMPQVNIVKKTEVQTGGFSKESILPKRNSDKLIARKKDWDPKKYGGFDSPTVAYSVLVVAKVEKGKSKKLKSVKELLGITIMERSSFEKNPIDFLEAKGYKEVKKDLIIKLPKYSLFELENGRKRMLASAGELQKGNELALPSKYVNFLYLASHYEKLKGSPEDNEQKQLFVEQHKHYLDEIIEQISEFSKRVILADANLDKVLSAYNKHRDKPIREQAENIIHLFTLTNLGAPAAFKYFDTTIDRKRYTSTKEVLDATLIHQSITGLYETRIDLSQLGGDGGSGSETPGTSESATPESGGLDDEYRLYSPLVKPDQNIQFWLEQFPQAWAETAGMGLAKQVPPQVIQLKASATPVSVRQYPLSKEAQEGIRPHVQRLIQQGILVPVQSPWNTPLLPVRKPGTNDYRPVQDLREVNKRVQDIHPTVPNPYNLLCALPPQRSWYTVLDLKDAFFCLRLHPTSQPLFAFEWRDPGTGRTGQLTWTRLPQGFKNSPTIFNEALHRDLANFRIQHPQVTLLQYVDDLLLAGATKQDCLEGTKALLLELSDLGYRASAKKAQICRREVTYLGYSLRDGQRWLTEARKKTVVQIPAPTTAKQVREFLGKAGFCRLFIPGFATLAAPLYPLTKPKGEFSWAPEHQKAFDAIKKALLSAPALALPDVTKPFTLYVDERKGVARGVLTQTLGPWRRPVAYLSKKLDPVASGWPVCLKAIAAVAILVKDADKLTLGQNITVIAPHALENIVRQPPDRWMTNARMTHYQSLLLTERVTFAPPAALNPATLLPEETDEPVTHDCHQLLIEETGVRKDLTDIPLTGEVLTWFTDGSSYVVEGKRMAGAAVVDGTRTIWASSLPEGTSAQKAELMALTQALRLAEGKSINIYTDSRYAFATAHVHGAIYKQRGWLTSAGREIKNKEEILSLLEALHLPKRLAIIHCPGHQKAKDPISRGNQMADRVAKQAAQGVNLLPAGKRTADGSEFEKRTADGSEFESPKKKAKVE

SEQ ID NO: 91-96 - skipped (6 entries)

SEQ ID NO: 97 - protein, 2094 aa, synthetic construct
MPAAKRVKLDGGDKKYSIGLDIGTNSVGWAVITDEYKVPSKKFKVLGNTDRHSIKKNLIGALLFDSGETAEATRLKRTARRRYTRRKNRICYLQEIFSNEMAKVDDSFFHRLEESFLVEEDKKHERHPIFGNIVDEVAYHEKYPTIYHLRKKLVDSTDKADLRLIYLALAHMIKFRGHFLIEGDLNPDNSDVDKLFIQLVQTYNQLFEENPINASGVDAKAILSARLSKSRRLENLIAQLPGEKKNGLFGNLIALSLGLTPNFKSNFDLAEDAKLQLSKDTYDDDLDNLLAQIGDQYADLFLAAKNLSDAILLSDILRVNTEITKAPLSASMIKRYDEHHQDLTLLKALVRQQLPEKYKEIFFDQSKNGYAGYIDGGASQEEFYKFIKPILEKMDGTEELLVKLNREDLLRKQRTFDNGSIPHQIHLGELHAILRRQEDFYPFLKDNREKIEKILTFRIPYYVGPLARGNSRFAWMTRKSEETITPWNFEEVVDKGASAQSFIERMTNFDKNLPNEKVLPKHSLLYEYFTVYNELTKVKYVTEGMRKPAFLSGEQKKAIVDLLFKTNRKVTVKQLKEDYFKKIECFDSVEISGVEDRFNASLGTYHDLLKIIKDKDFLDNEENEDILEDIVLTLTLFEDREMIEERLKTYAHLFDDKVMKQLKRRRYTGWGRLSRKLINGIRDKQSGKTILDFLKSDGFANRNFMQLIHDDSLTFKEDIQKAQVSGQGDSLHEHIANLAGSPAIKKGILQTVKVVDELVKVMGRHKPENIVIEMARENQTTQKGQKNSRERMKRIEEGIKELGSQILKEHPVENTQLQNEKLYLYYLQNGRDMYVDQELDINRLSDYDVDHIVPQSFLKDDSIDNKVLTRSDKARGKSDNVPSEEVVKKMKNYWRQLLNAKLITQRKFDNLTKAERGGLSELDKAGFIKRQLVETRQITKHVAQILDSRMNTKYDENDKLIREVKVITLKSKLVSDFRKDFQFYKVREINNYHHAHDAYLNAVVGTALIKKYPKLESEFVYGDYKVYDVRKMIAKSEQEIGKATAKYFFYSNIMNFFKTEITLANGEIRKRPLIETNGETGEIVWDKGRDFATVRKVLSMPQVNIVKKTEVQTGGFSKESILPKRNSDKLIARKKDWDPKKYGGFDSPTVAYSVLVVAKVEKGKSKKLKSVKELLGITIMERSSFEKNPIDFLEAKGYKEVKKDLIIKLPKYSLFELENGRKRMLASAGELQKGNELALPSKYVNFLYLASHYEKLKGSPEDNEQKQLFVEQHKHYLDEIIEQISEFSKRVILADANLDKVLSAYNKHRDKPIREQAENIIHLFTLTNLGAPAAFKYFDTTIDRKRYTSTKEVLDATLIHQSITGLYETRIDLSQLGGDGGEAAAKGGGGSEAAAKGGTLQLDDEYRLYSPLVKPDQNIQFWLEQFPQAWAETAGMGLAKQVPPQVIQLKASATPVSVRQYPLSKEAQEGIRPHVQRLIQQGILVPVQSPWNTPLLPVRKPGTNDYRPVQDLREVNKRVQDIHPTVPNPYNLLCALPPQRSWYTVLDLKDAFFCLRLHPTSQPLFAFEWRDPGTGRTGQLTWTRLPQGFKNSPTIFDEALHRDLANFRIQHPQVTLLQYVDDLLLAGATKQDCLEGTKALLLELSDLGYRASAKKAQICRREVTYLGYSLRDGQRWLTEARKKTVVQIPAPTTAKQVREFLGTAGFCRLWIPGFATLAAPLYPLTKEKGEFSWAPEHQKAFDAIKKALLSAPALALPDVTKPFTLYVDERKGVARGVLTQTLGPWRRPVAYLSKKLDPVASGWPVCLKAIAAVAILVKDADKLTLGQNITVIAPHALENIVRQPPDRWMTNARMTHYQSLLLTERVTFAPPAALNPATLLPEETDEPVTHDCHQLLIEETGVRKDLTDIPLTGEVLTWFTDGSSYVVEGKRMAGAAVVDGTRTIWASSLPEGTSAQKAELMALTQALRLAEGKSINIYTDSRYAFATAHVHGAIYKQRGLLTSAGREIKNKEEILSLLEALHLPKRLAIIHCPGHQKAKDPISRGNQMADRVAKQAAQGVNLLAGKRTADGSEFEKRTADGSEFESPKKKAKVE

SEQ ID NO: 98-111 - skipped (14 entries)

SEQ ID NO: 112 - protein, 2090 aa, synthetic construct
MPAAKRVKLDGGDKKYSIGLDIGTNSVGWAVITDEYKVPSKKFKVLGNTDRHSIKKNLIGALLFDSGETAEATRLKRTARRRYTRRKNRICYLQEIFSNEMAKVDDSFFHRLEESFLVEEDKKHERHPIFGNIVDEVAYHEKYPTIYHLRKKLVDSTDKADLRLIYLALAHMIKFRGHFLIEGDLNPDNSDVDKLFIQLVQTYNQLFEENPINASGVDAKAILSARLSKSRRLENLIAQLPGEKKNGLFGNLIALSLGLTPNFKSNFDLAEDAKLQLSKDTYDDDLDNLLAQIGDQYADLFLAAKNLSDAILLSDILRVNTEITKAPLSASMIKRYDEHHQDLTLLKALVRQQLPEKYKEIFFDQSKNGYAGYIDGGASQEEFYKFIKPILEKMDGTEELLVKLNREDLLRKQRTFDNGSIPHQIHLGELHAILRRQEDFYPFLKDNREKIEKILTFRIPYYVGPLARGNSRFAWMTRKSEETITPWNFEEVVDKGASAQSFIERMTNFDKNLPNEKVLPKHSLLYEYFTVYNELTKVKYVTEGMRKPAFLSGEQKKAIVDLLFKTNRKVTVKQLKEDYFKKIECFDSVEISGVEDRFNASLGTYHDLLKIIKDKDFLDNEENEDILEDIVLTLTLFEDREMIEERLKTYAHLFDDKVMKQLKRRRYTGWGRLSRKLINGIRDKQSGKTILDFLKSDGFANRNFMQLIHDDSLTFKEDIQKAQVSGQGDSLHEHIANLAGSPAIKKGILQTVKVVDELVKVMGRHKPENIVIEMARENQTTQKGQKNSRERMKRIEEGIKELGSQILKEHPVENTQLQNEKLYLYYLQNGRDMYVDQELDINRLSDYDVDHIVPQSFLKDDSIDNKVLTRSDKARGKSDNVPSEEVVKKMKNYWRQLLNAKLITQRKFDNLTKAERGGLSELDKAGFIKRQLVETRQITKHVAQILDSRMNTKYDENDKLIREVKVITLKSKLVSDFRKDFQFYKVREINNYHHAHDAYLNAVVGTALIKKYPKLESEFVYGDYKVYDVRKMIAKSEQEIGKATAKYFFYSNIMNFFKTEITLANGEIRKRPLIETNGETGEIVWDKGRDFATVRKVLSMPQVNIVKKTEVQTGGFSKESILPKRNSDKLIARKKDWDPKKYGGFDSPTVAYSVLVVAKVEKGKSKKLKSVKELLGITIMERSSFEKNPIDFLEAKGYKEVKKDLIIKLPKYSLFELENGRKRMLASAGELQKGNELALPSKYVNFLYLASHYEKLKGSPEDNEQKQLFVEQHKHYLDEIIEQISEFSKRVILADANLDKVLSAYNKHRDKPIREQAENIIHLFTLTNLGAPAAFKYFDTTIDRKRYTSTKEVLDATLIHQSITGLYETRIDLSQLGGDGGEAAAKGGGPAPGGTLQLDDEYRLYSPLVKPDQNIQFWLEQFPQAWAETAGMGLAKQVPPQVIQLKASATPVSVRQYPLSKEAQEGIRPHVQRLIQQGILVPVQSPWNTPLLPVRKPGTNDYRPVQDLREVNKRVQDIHPTVPNPYNLLCALPPQRSWYTVLDLKDAFFCLRLHPTSQPLFAFEWRDPGTGRTGQLTWTRLPQGFKNSPTIFDEALHRDLANFRIQHPQVTLLQYVDDLLLAGATKQDCLEGTKALLLELSDLGYRASAKKAQICRREVTYLGYSLRDGQRWLTEARKKTVVQIPAPTTAKQVREFLGTAGFCRLWIPGFATLAAPLYPLTKEKGEFSWAPEHQKAFDAIKKALLSAPALALPDVTKPFTLYVDERKGVARGVLTQTLGPWRRPVAYLSKKLDPVASGWPVCLKAIAAVAILVKDADKLTLGQNITVIAPHALENIVRQPPDRWMTNARMTHYQSLLLTERVTFAPPAALNPATLLPEETDEPVTHDCHQLLIEETGVRKDLTDIPLTGEVLTWFTDGSSYVVEGKRMAGAAVVDGTRTIWASSLPEGTSAQKAELMALTQALRLAEGKSINIYTDSRYAFATAHVHGAIYKQRGLLTSAGREIKNKEEILSLLEALHLPKRLAIIHCPGHQKAKDPISRGNQMADRVAKQAAQGVNLLAGKRTADGSEFEKRTADGSEFESPKKKAKVE

SEQ ID NO: 113 - protein, 2097 aa, synthetic construct
MPAAKRVKLDGGDKKYSIGLDIGTNSVGWAVITDEYKVPSKKFKVLGNTDRHSIKKNLIGALLFDSGETAEATRLKRTARRRYTRRKNRICYLQEIFSNEMAKVDDSFFHRLEESFLVEEDKKHERHPIFGNIVDEVAYHEKYPTIYHLRKKLVDSTDKADLRLIYLALAHMIKFRGHFLIEGDLNPDNSDVDKLFIQLVQTYNQLFEENPINASGVDAKAILSARLSKSRRLENLIAQLPGEKKNGLFGNLIALSLGLTPNFKSNFDLAEDAKLQLSKDTYDDDLDNLLAQIGDQYADLFLAAKNLSDAILLSDILRVNTEITKAPLSASMIKRYDEHHQDLTLLKALVRQQLPEKYKEIFFDQSKNGYAGYIDGGASQEEFYKFIKPILEKMDGTEELLVKLNREDLLRKQRTFDNGSIPHQIHLGELHAILRRQEDFYPFLKDNREKIEKILTFRIPYYVGPLARGNSRFAWMTRKSEETITPWNFEEVVDKGASAQSFIERMTNFDKNLPNEKVLPKHSLLYEYFTVYNELTKVKYVTEGMRKPAFLSGEQKKAIVDLLFKTNRKVTVKQLKEDYFKKIECFDSVEISGVEDRFNASLGTYHDLLKIIKDKDFLDNEENEDILEDIVLTLTLFEDREMIEERLKTYAHLFDDKVMKQLKRRRYTGWGRLSRKLINGIRDKQSGKTILDFLKSDGFANRNFMQLIHDDSLTFKEDIQKAQVSGQGDSLHEHIANLAGSPAIKKGILQTVKVVDELVKVMGRHKPENIVIEMARENQTTQKGQKNSRERMKRIEEGIKELGSQILKEHPVENTQLQNEKLYLYYLQNGRDMYVDQELDINRLSDYDVDHIVPQSFLKDDSIDNKVLTRSDKARGKSDNVPSEEVVKKMKNYWRQLLNAKLITQRKFDNLTKAERGGLSELDKAGFIKRQLVETRQITKHVAQILDSRMNTKYDENDKLIREVKVITLKSKLVSDFRKDFQFYKVREINNYHHAHDAYLNAVVGTALIKKYPKLESEFVYGDYKVYDVRKMIAKSEQEIGKATAKYFFYSNIMNFFKTEITLANGEIRKRPLIETNGETGEIVWDKGRDFATVRKVLSMPQVNIVKKTEVQTGGFSKESILPKRNSDKLIARKKDWDPKKYGGFDSPTVAYSVLVVAKVEKGKSKKLKSVKELLGITIMERSSFEKNPIDFLEAKGYKEVKKDLIIKLPKYSLFELENGRKRMLASAGELQKGNELALPSKYVNFLYLASHYEKLKGSPEDNEQKQLFVEQHKHYLDEIIEQISEFSKRVILADANLDKVLSAYNKHRDKPIREQAENIIHLFTLTNLGAPAAFKYFDTTIDRKRYTSTKEVLDATLIHQSITGLYETRIDLSQLGGDGGGSSGSSGSSGSSGSSGSSGGTLQLDDEYRLYSPLVKPDQNIQFWLEQFPQAWAETAGMGLAKQVPPQVIQLKASATPVSVRQYPLSKEAQEGIRPHVQRLIQQGILVPVQSPWNTPLLPVRKPGTNDYRPVQDLREVNKRVQDIHPTVPNPYNLLCALPPQRSWYTVLDLKDAFFCLRLHPTSQPLFAFEWRDPGTGRTGQLTWTRLPQGFKNSPTIFNEALHRDLANFRIQHPQVTLLQYVDDLLLAGATKQDCLEGTKALLLELSDLGYRASAKKAQICRREVTYLGYSLRDGQRWLTEARKKTVVQIPAPTTAKQVREFLGTAGFCRLWIPGFATLAAPLYPLTKPKGEFSWAPEHQKAFDAIKKALLSAPALALPDVTKPFTLYVDERKGVARGVLTQTLGPWRRPVAYLSKKLDPVASGWPVCLKAIAAVAILVKDADKLTLGQNITVIAPHALENIVRQPPDRWMTNARMTHYQSLLLTERVTFAPPAALNPATLLPEETDEPVTHDCHQLLIEETGVRKDLTDIPLTGEVLTWFTDGSSYVVEGKRMAGAAVVDGTRTIWASSLPEGTSAQKAELMALTQALRLAEGKSINIYTDSRYAFATAHVHGAIYKQRGWLTSAGREIKNKEEILSLLEALHLPKRLAIIHCPGHQKAKDPISRGNQMADRVAKQAAQGVNLLAGKRTADGSEFEKRTADGSEFESPKKKAKVE

SEQ ID NO: 114-116 - skipped (3 entries)

SEQ ID NO: 117 - protein, 2109 aa, synthetic construct
MPAAKRVKLDGGDKKYSIGLDIGTNSVGWAVITDEYKVPSKKFKVLGNTDRHSIKKNLIGALLFDSGETAEATRLKRTARRRYTRRKNRICYLQEIFSNEMAKVDDSFFHRLEESFLVEEDKKHERHPIFGNIVDEVAYHEKYPTIYHLRKKLVDSTDKADLRLIYLALAHMIKFRGHFLIEGDLNPDNSDVDKLFIQLVQTYNQLFEENPINASGVDAKAILSARLSKSRRLENLIAQLPGEKKNGLFGNLIALSLGLTPNFKSNFDLAEDAKLQLSKDTYDDDLDNLLAQIGDQYADLFLAAKNLSDAILLSDILRVNTEITKAPLSASMIKRYDEHHQDLTLLKALVRQQLPEKYKEIFFDQSKNGYAGYIDGGASQEEFYKFIKPILEKMDGTEELLVKLNREDLLRKQRTFDNGSIPHQIHLGELHAILRRQEDFYPFLKDNREKIEKILTFRIPYYVGPLARGNSRFAWMTRKSEETITPWNFEEVVDKGASAQSFIERMTNFDKNLPNEKVLPKHSLLYEYFTVYNELTKVKYVTEGMRKPAFLSGEQKKAIVDLLFKTNRKVTVKQLKEDYFKKIECFDSVEISGVEDRFNASLGTYHDLLKIIKDKDFLDNEENEDILEDIVLTLTLFEDREMIEERLKTYAHLFDDKVMKQLKRRRYTGWGRLSRKLINGIRDKQSGKTILDFLKSDGFANRNFMQLIHDDSLTFKEDIQKAQVSGQGDSLHEHIANLAGSPAIKKGILQTVKVVDELVKVMGRHKPENIVIEMARENQTTQKGQKNSRERMKRIEEGIKELGSQILKEHPVENTQLQNEKLYLYYLQNGRDMYVDQELDINRLSDYDVDHIVPQSFLKDDSIDNKVLTRSDKARGKSDNVPSEEVVKKMKNYWRQLLNAKLITQRKFDNLTKAERGGLSELDKAGFIKRQLVETRQITKHVAQILDSRMNTKYDENDKLIREVKVITLKSKLVSDFRKDFQFYKVREINNYHHAHDAYLNAVVGTALIKKYPKLESEFVYGDYKVYDVRKMIAKSEQEIGKATAKYFFYSNIMNFFKTEITLANGEIRKRPLIETNGETGEIVWDKGRDFATVRKVLSMPQVNIVKKTEVQTGGFSKESILPKRNSDKLIARKKDWDPKKYGGFDSPTVAYSVLVVAKVEKGKSKKLKSVKELLGITIMERSSFEKNPIDFLEAKGYKEVKKDLIIKLPKYSLFELENGRKRMLASAGELQKGNELALPSKYVNFLYLASHYEKLKGSPEDNEQKQLFVEQHKHYLDEIIEQISEFSKRVILADANLDKVLSAYNKHRDKPIREQAENIIHLFTLTNLGAPAAFKYFDTTIDRKRYTSTKEVLDATLIHQSITGLYETRIDLSQLGGDGGEAAAKEAAAKEAAAKEAAAKEAAAKEAAAKGGTLQLDDEYRLYSPLVKPDQNIQFWLEQFPQAWAETAGMGLAKQVPPQVIQLKASATPVSVRQYPLSKEAQEGIRPHVQRLIQQGILVPVQSPWNTPLLPVRKPGTNDYRPVQDLREVNKRVQDIHPTVPNPYNLLCALPPQRSWYTVLDLKDAFFCLRLHPTSQPLFAFEWRDPGTGRTGQLTWTRLPQGFKNSPTIFNEALHRDLANFRIQHPQVTLLQYVDDLLLAGATKQDCLEGTKALLLELSDLGYRASAKKAQICRREVTYLGYSLRDGQRWLTEARKKTVVQIPAPTTAKQVREFLGTAGFCRLWIPGFATLAAPLYPLTKPKGEFSWAPEHQKAFDAIKKALLSAPALALPDVTKPFTLYVDERKGVARGVLTQTLGPWRRPVAYLSKKLDPVASGWPVCLKAIAAVAILVKDADKLTLGQNITVIAPHALENIVRQPPDRWMTNARMTHYQSLLLTERVTFAPPAALNPATLLPEETDEPVTHDCHQLLIEETGVRKDLTDIPLTGEVLTWFTDGSSYVVEGKRMAGAAVVDGTRTIWASSLPEGTSAQKAELMALTQALRLAEGKSINIYTDSRYAFATAHVHGAIYKQRGWLTSAGREIKNKEEILSLLEALHLPKRLAIIHCPGHQKAKDPISRGNQMADRVAKQAAQGVNLLAGKRTADGSEFEKRTADGSEFESPKKKAKVE

SEQ ID NO: 118-120 - skipped (3 entries)

SEQ ID NO: 121 - protein, 2090 aa, synthetic construct
MPAAKRVKLDGGDKKYSIGLDIGTNSVGWAVITDEYKVPSKKFKVLGNTDRHSIKKNLIGALLFDSGETAEATRLKRTARRRYTRRKNRICYLQEIFSNEMAKVDDSFFHRLEESFLVEEDKKHERHPIFGNIVDEVAYHEKYPTIYHLRKKLVDSTDKADLRLIYLALAHMIKFRGHFLIEGDLNPDNSDVDKLFIQLVQTYNQLFEENPINASGVDAKAILSARLSKSRRLENLIAQLPGEKKNGLFGNLIALSLGLTPNFKSNFDLAEDAKLQLSKDTYDDDLDNLLAQIGDQYADLFLAAKNLSDAILLSDILRVNTEITKAPLSASMIKRYDEHHQDLTLLKALVRQQLPEKYKEIFFDQSKNGYAGYIDGGASQEEFYKFIKPILEKMDGTEELLVKLNREDLLRKQRTFDNGSIPHQIHLGELHAILRRQEDFYPFLKDNREKIEKILTFRIPYYVGPLARGNSRFAWMTRKSEETITPWNFEEVVDKGASAQSFIERMTNFDKNLPNEKVLPKHSLLYEYFTVYNELTKVKYVTEGMRKPAFLSGEQKKAIVDLLFKTNRKVTVKQLKEDYFKKIECFDSVEISGVEDRFNASLGTYHDLLKIIKDKDFLDNEENEDILEDIVLTLTLFEDREMIEERLKTYAHLFDDKVMKQLKRRRYTGWGRLSRKLINGIRDKQSGKTILDFLKSDGFANRNFMQLIHDDSLTFKEDIQKAQVSGQGDSLHEHIANLAGSPAIKKGILQTVKVVDELVKVMGRHKPENIVIEMARENQTTQKGQKNSRERMKRIEEGIKELGSQILKEHPVENTQLQNEKLYLYYLQNGRDMYVDQELDINRLSDYDVDHIVPQSFLKDDSIDNKVLTRSDKARGKSDNVPSEEVVKKMKNYWRQLLNAKLITQRKFDNLTKAERGGLSELDKAGFIKRQLVETRQITKHVAQILDSRMNTKYDENDKLIREVKVITLKSKLVSDFRKDFQFYKVREINNYHHAHDAYLNAVVGTALIKKYPKLESEFVYGDYKVYDVRKMIAKSEQEIGKATAKYFFYSNIMNFFKTEITLANGEIRKRPLIETNGETGEIVWDKGRDFATVRKVLSMPQVNIVKKTEVQTGGFSKESILPKRNSDKLIARKKDWDPKKYGGFDSPTVAYSVLVVAKVEKGKSKKLKSVKELLGITIMERSSFEKNPIDFLEAKGYKEVKKDLIIKLPKYSLFELENGRKRMLASAGELQKGNELALPSKYVNFLYLASHYEKLKGSPEDNEQKQLFVEQHKHYLDEIIEQISEFSKRVILADANLDKVLSAYNKHRDKPIREQAENIIHLFTLTNLGAPAAFKYFDTTIDRKRYTSTKEVLDATLIHQSITGLYETRIDLSQLGGDGGGGGGSSEAAAKGGTLQLDDEYRLYSPLVKPDQNIQFWLEQFPQAWAETAGMGLAKQVPPQVIQLKASATPVSVRQYPLSKEAQEGIRPHVQRLIQQGILVPVQSPWNTPLLPVRKPGTNDYRPVQDLREVNKRVQDIHPTVPNPYNLLCALPPQRSWYTVLDLKDAFFCLRLHPTSQPLFAFEWRDPGTGRTGQLTWTRLPQGFKNSPTIFNEALHRDLANFRIQHPQVTLLQYVDDLLLAGATKQDCLEGTKALLLELSDLGYRASAKKAQICRREVTYLGYSLRDGQRWLTEARKKTVVQIPAPTTAKQVREFLGTAGFCRLWIPGFATLAAPLYPLTKPKGEFSWAPEHQKAFDAIKKALLSAPALALPDVTKPFTLYVDERKGVARGVLTQTLGPWRRPVAYLSKKLDPVASGWPVCLKAIAAVAILVKDADKLTLGQNITVIAPHALENIVRQPPDRWMTNARMTHYQSLLLTERVTFAPPAALNPATLLPEETDEPVTHDCHQLLIEETGVRKDLTDIPLTGEVLTWFTDGSSYVVEGKRMAGAAVVDGTRTIWASSLPEGTSAQKAELMALTQALRLAEGKSINIYTDSRYAFATAHVHGAIYKQRGWLTSAGREIKNKEEILSLLEALHLPKRLAIIHCPGHQKAKDPISRGNQMADRVAKQAAQGVNLLAGKRTADGSEFEKRTADGSEFESPKKKAKVE

SEQ ID NO: 122 - protein, 2095 aa, synthetic construct
MPAAKRVKLDGGDKKYSIGLDIGTNSVGWAVITDEYKVPSKKFKVLGNTDRHSIKKNLIGALLFDSGETAEATRLKRTARRRYTRRKNRICYLQEIFSNEMAKVDDSFFHRLEESFLVEEDKKHERHPIFGNIVDEVAYHEKYPTIYHLRKKLVDSTDKADLRLIYLALAHMIKFRGHFLIEGDLNPDNSDVDKLFIQLVQTYNQLFEENPINASGVDAKAILSARLSKSRRLENLIAQLPGEKKNGLFGNLIALSLGLTPNFKSNFDLAEDAKLQLSKDTYDDDLDNLLAQIGDQYADLFLAAKNLSDAILLSDILRVNTEITKAPLSASMIKRYDEHHQDLTLLKALVRQQLPEKYKEIFFDQSKNGYAGYIDGGASQEEFYKFIKPILEKMDGTEELLVKLNREDLLRKQRTFDNGSIPHQIHLGELHAILRRQEDFYPFLKDNREKIEKILTFRIPYYVGPLARGNSRFAWMTRKSEETITPWNFEEVVDKGASAQSFIERMTNFDKNLPNEKVLPKHSLLYEYFTVYNELTKVKYVTEGMRKPAFLSGEQKKAIVDLLFKTNRKVTVKQLKEDYFKKIECFDSVEISGVEDRFNASLGTYHDLLKIIKDKDFLDNEENEDILEDIVLTLTLFEDREMIEERLKTYAHLFDDKVMKQLKRRRYTGWGRLSRKLINGIRDKQSGKTILDFLKSDGFANRNFMQLIHDDSLTFKEDIQKAQVSGQGDSLHEHIANLAGSPAIKKGILQTVKVVDELVKVMGRHKPENIVIEMARENQTTQKGQKNSRERMKRIEEGIKELGSQILKEHPVENTQLQNEKLYLYYLQNGRDMYVDQELDINRLSDYDVDHIVPQSFLKDDSIDNKVLTRSDKARGKSDNVPSEEVVKKMKNYWRQLLNAKLITQRKFDNLTKAERGGLSELDKAGFIKRQLVETRQITKHVAQILDSRMNTKYDENDKLIREVKVITLKSKLVSDFRKDFQFYKVREINNYHHAHDAYLNAVVGTALIKKYPKLESEFVYGDYKVYDVRKMIAKSEQEIGKATAKYFFYSNIMNFFKTEITLANGEIRKRPLIETNGETGEIVWDKGRDFATVRKVLSMPQVNIVKKTEVQTGGFSKESILPKRNSDKLIARKKDWDPKKYGGFDSPTVAYSVLVVAKVEKGKSKKLKSVKELLGITIMERSSFEKNPIDFLEAKGYKEVKKDLIIKLPKYSLFELENGRKRMLASAGELQKGNELALPSKYVNFLYLASHYEKLKGSPEDNEQKQLFVEQHKHYLDEIIEQISEFSKRVILADANLDKVLSAYNKHRDKPIREQAENIIHLFTLTNLGAPAAFKYFDTTIDRKRYTSTKEVLDATLIHQSITGLYETRIDLSQLGGDGGSGSETPGTSESATPESGGTLQLDDEYRLYSPLVKPDQNIQFWLEQFPQAWAETAGMGLAKQVPPQVIQLKASATPVSVRQYPLSKEAQEGIRPHVQRLIQQGILVPVQSPWNTPLLPVRKPGTNDYRPVQDLREVNKRVQDIHPTVPNPYNLLCALPPQRSWYTVLDLKDAFFCLRLHPTSQPLFAFEWRDPGTGRTGQLTWTRLPQGFKNSPTIFNEALHRDLANFRIQHPQVTLLQYVDDLLLAGATKQDCLEGTKALLLELSDLGYRASAKKAQICRREVTYLGYSLRDGQRWLTEARKKTVVQIPAPTTAKQVREFLGTAGFCRLWIPGFATLAAPLYPLTKPKGEFSWAPEHQKAFDAIKKALLSAPALALPDVTKPFTLYVDERKGVARGVLTQTLGPWRRPVAYLSKKLDPVASGWPVCLKAIAAVAILVKDADKLTLGQNITVIAPHALENIVRQPPDRWMTNARMTHYQSLLLTERVTFAPPAALNPATLLPEETDEPVTHDCHQLLIEETGVRKDLTDIPLTGEVLTWFTDGSSYVVEGKRMAGAAVVDGTRTIWASSLPEGTSAQKAELMALTQALRLAEGKSINIYTDSRYAFATAHVHGAIYKQRGWLTSAGREIKNKEEILSLLEALHLPKRLAIIHCPGHQKAKDPISRGNQMADRVAKQAAQGVNLLAGKRTADGSEFEKRTADGSEFESPKKKAKVE

SEQ ID NO: 123 - protein, 2085 aa, synthetic construct
MPAAKRVKLDGGDKKYSIGLDIGTNSVGWAVITDEYKVPSKKFKVLGNTDRHSIKKNLIGALLFDSGETAEATRLKRTARRRYTRRKNRICYLQEIFSNEMAKVDDSFFHRLEESFLVEEDKKHERHPIFGNIVDEVAYHEKYPTIYHLRKKLVDSTDKADLRLIYLALAHMIKFRGHFLIEGDLNPDNSDVDKLFIQLVQTYNQLFEENPINASGVDAKAILSARLSKSRRLENLIAQLPGEKKNGLFGNLIALSLGLTPNFKSNFDLAEDAKLQLSKDTYDDDLDNLLAQIGDQYADLFLAAKNLSDAILLSDILRVNTEITKAPLSASMIKRYDEHHQDLTLLKALVRQQLPEKYKEIFFDQSKNGYAGYIDGGASQEEFYKFIKPILEKMDGTEELLVKLNREDLLRKQRTFDNGSIPHQIHLGELHAILRRQEDFYPFLKDNREKIEKILTFRIPYYVGPLARGNSRFAWMTRKSEETITPWNFEEVVDKGASAQSFIERMTNFDKNLPNEKVLPKHSLLYEYFTVYNELTKVKYVTEGMRKPAFLSGEQKKAIVDLLFKTNRKVTVKQLKEDYFKKIECFDSVEISGVEDRFNASLGTYHDLLKIIKDKDFLDNEENEDILEDIVLTLTLFEDREMIEERLKTYAHLFDDKVMKQLKRRRYTGWGRLSRKLINGIRDKQSGKTILDFLKSDGFANRNFMQLIHDDSLTFKEDIQKAQVSGQGDSLHEHIANLAGSPAIKKGILQTVKVVDELVKVMGRHKPENIVIEMARENQTTQKGQKNSRERMKRIEEGIKELGSQILKEHPVENTQLQNEKLYLYYLQNGRDMYVDQELDINRLSDYDVDHIVPQSFLKDDSIDNKVLTRSDKARGKSDNVPSEEVVKKMKNYWRQLLNAKLITQRKFDNLTKAERGGLSELDKAGFIKRQLVETRQITKHVAQILDSRMNTKYDENDKLIREVKVITLKSKLVSDFRKDFQFYKVREINNYHHAHDAYLNAVVGTALIKKYPKLESEFVYGDYKVYDVRKMIAKSEQEIGKATAKYFFYSNIMNFFKTEITLANGEIRKRPLIETNGETGEIVWDKGRDFATVRKVLSMPQVNIVKKTEVQTGGFSKESILPKRNSDKLIARKKDWDPKKYGGFDSPTVAYSVLVVAKVEKGKSKKLKSVKELLGITIMERSSFEKNPIDFLEAKGYKEVKKDLIIKLPKYSLFELENGRKRMLASAGELQKGNELALPSKYVNFLYLASHYEKLKGSPEDNEQKQLFVEQHKHYLDEIIEQISEFSKRVILADANLDKVLSAYNKHRDKPIREQAENIIHLFTLTNLGAPAAFKYFDTTIDRKRYTSTKEVLDATLIHQSITGLYETRIDLSQLGGDGGPAPGSSGGTLQLDDEYRLYSPLVKPDQNIQFWLEQFPQAWAETAGMGLAKQVPPQVIQLKASATPVSVRQYPLSKEAQEGIRPHVQRLIQQGILVPVQSPWNTPLLPVRKPGTNDYRPVQDLREVNKRVQDIHPTVPNPYNLLCALPPQRSWYTVLDLKDAFFCLRLHPTSQPLFAFEWRDPGTGRTGQLTWTRLPQGFKNSPTIFNEALHRDLANFRIQHPQVTLLQYVDDLLLAGATKQDCLEGTKALLLELSDLGYRASAKKAQICRREVTYLGYSLRDGQRWLTEARKKTVVQIPAPTTAKQVREFLGTAGFCRLWIPGFATLAAPLYPLTKPKGEFSWAPEHQKAFDAIKKALLSAPALALPDVTKPFTLYVDERKGVARGVLTQTLGPWRRPVAYLSKKLDPVASGWPVCLKAIAAVAILVKDADKLTLGQNITVIAPHALENIVRQPPDRWMTNARMTHYQSLLLTERVTFAPPAALNPATLLPEETDEPVTHDCHQLLIEETGVRKDLTDIPLTGEVLTWFTDGSSYVVEGKRMAGAAVVDGTRTIWASSLPEGTSAQKAELMALTQALRLAEGKSINIYTDSRYAFATAHVHGAIYKQRGWLTSAGREIKNKEEILSLLEALHLPKRLAIIHCPGHQKAKDPISRGNQMADRVAKQAAQGVNLLAGKRTADGSEFEKRTADGSEFESPKKKAKVE

SEQ ID NO: 124 - protein, 2090 aa, synthetic construct
MPAAKRVKLDGGDKKYSIGLDIGTNSVGWAVITDEYKVPSKKFKVLGNTDRHSIKKNLIGALLFDSGETAEATRLKRTARRRYTRRKNRICYLQEIFSNEMAKVDDSFFHRLEESFLVEEDKKHERHPIFGNIVDEVAYHEKYPTIYHLRKKLVDSTDKADLRLIYLALAHMIKFRGHFLIEGDLNPDNSDVDKLFIQLVQTYNQLFEENPINASGVDAKAILSARLSKSRRLENLIAQLPGEKKNGLFGNLIALSLGLTPNFKSNFDLAEDAKLQLSKDTYDDDLDNLLAQIGDQYADLFLAAKNLSDAILLSDILRVNTEITKAPLSASMIKRYDEHHQDLTLLKALVRQQLPEKYKEIFFDQSKNGYAGYIDGGASQEEFYKFIKPILEKMDGTEELLVKLNREDLLRKQRTFDNGSIPHQIHLGELHAILRRQEDFYPFLKDNREKIEKILTFRIPYYVGPLARGNSRFAWMTRKSEETITPWNFEEVVDKGASAQSFIERMTNFDKNLPNEKVLPKHSLLYEYFTVYNELTKVKYVTEGMRKPAFLSGEQKKAIVDLLFKTNRKVTVKQLKEDYFKKIECFDSVEISGVEDRFNASLGTYHDLLKIIKDKDFLDNEENEDILEDIVLTLTLFEDREMIEERLKTYAHLFDDKVMKQLKRRRYTGWGRLSRKLINGIRDKQSGKTILDFLKSDGFANRNFMQLIHDDSLTFKEDIQKAQVSGQGDSLHEHIANLAGSPAIKKGILQTVKVVDELVKVMGRHKPENIVIEMARENQTTQKGQKNSRERMKRIEEGIKELGSQILKEHPVENTQLQNEKLYLYYLQNGRDMYVDQELDINRLSDYDVDHIVPQSFLKDDSIDNKVLTRSDKARGKSDNVPSEEVVKKMKNYWRQLLNAKLITQRKFDNLTKAERGGLSELDKAGFIKRQLVETRQITKHVAQILDSRMNTKYDENDKLIREVKVITLKSKLVSDFRKDFQFYKVREINNYHHAHDAYLNAVVGTALIKKYPKLESEFVYGDYKVYDVRKMIAKSEQEIGKATAKYFFYSNIMNFFKTEITLANGEIRKRPLIETNGETGEIVWDKGRDFATVRKVLSMPQVNIVKKTEVQTGGFSKESILPKRNSDKLIARKKDWDPKKYGGFDSPTVAYSVLVVAKVEKGKSKKLKSVKELLGITIMERSSFEKNPIDFLEAKGYKEVKKDLIIKLPKYSLFELENGRKRMLASAGELQKGNELALPSKYVNFLYLASHYEKLKGSPEDNEQKQLFVEQHKHYLDEIIEQISEFSKRVILADANLDKVLSAYNKHRDKPIREQAENIIHLFTLTNLGAPAAFKYFDTTIDRKRYTSTKEVLDATLIHQSITGLYETRIDLSQLGGDGGPAPEAAAKGGGGGTLQLDDEYRLYSPLVKPDQNIQFWLEQFPQAWAETAGMGLAKQVPPQVIQLKASATPVSVRQYPLSKEAQEGIRPHVQRLIQQGILVPVQSPWNTPLLPVRKPGTNDYRPVQDLREVNKRVQDIHPTVPNPYNLLCALPPQRSWYTVLDLKDAFFCLRLHPTSQPLFAFEWRDPGTGRTGQLTWTRLPQGFKNSPTIFNEALHRDLANFRIQHPQVTLLQYVDDLLLAGATKQDCLEGTKALLLELSDLGYRASAKKAQICRREVTYLGYSLRDGQRWLTEARKKTVVQIPAPTTAKQVREFLGTAGFCRLWIPGFATLAAPLYPLTKPKGEFSWAPEHQKAFDAIKKALLSAPALALPDVTKPFTLYVDERKGVARGVLTQTLGPWRRPVAYLSKKLDPVASGWPVCLKAIAAVAILVKDADKLTLGQNITVIAPHALENIVRQPPDRWMTNARMTHYQSLLLTERVTFAPPAALNPATLLPEETDEPVTHDCHQLLIEETGVRKDLTDIPLTGEVLTWFTDGSSYVVEGKRMAGAAVVDGTRTIWASSLPEGTSAQKAELMALTQALRLAEGKSINIYTDSRYAFATAHVHGAIYKQRGWLTSAGREIKNKEEILSLLEALHLPKRLAIIHCPGHQKAKDPISRGNQMADRVAKQAAQGVNLLAGKRTADGSEFEKRTADGSEFESPKKKAKVE

SEQ ID NO: 125 - skipped

SEQ ID NO: 126 - protein, 2087 aa, synthetic construct
MPAAKRVKLDGGDKKYSIGLDIGTNSVGWAVITDEYKVPSKKFKVLGNTDRHSIKKNLIGALLFDSGETAEATRLKRTARRRYTRRKNRICYLQEIFSNEMAKVDDSFFHRLEESFLVEEDKKHERHPIFGNIVDEVAYHEKYPTIYHLRKKLVDSTDKADLRLIYLALAHMIKFRGHFLIEGDLNPDNSDVDKLFIQLVQTYNQLFEENPINASGVDAKAILSARLSKSRRLENLIAQLPGEKKNGLFGNLIALSLGLTPNFKSNFDLAEDAKLQLSKDTYDDDLDNLLAQIGDQYADLFLAAKNLSDAILLSDILRVNTEITKAPLSASMIKRYDEHHQDLTLLKALVRQQLPEKYKEIFFDQSKNGYAGYIDGGASQEEFYKFIKPILEKMDGTEELLVKLNREDLLRKQRTFDNGSIPHQIHLGELHAILRRQEDFYPFLKDNREKIEKILTFRIPYYVGPLARGNSRFAWMTRKSEETITPWNFEEVVDKGASAQSFIERMTNFDKNLPNEKVLPKHSLLYEYFTVYNELTKVKYVTEGMRKPAFLSGEQKKAIVDLLFKTNRKVTVKQLKEDYFKKIECFDSVEISGVEDRFNASLGTYHDLLKIIKDKDFLDNEENEDILEDIVLTLTLFEDREMIEERLKTYAHLFDDKVMKQLKRRRYTGWGRLSRKLINGIRDKQSGKTILDFLKSDGFANRNFMQLIHDDSLTFKEDIQKAQVSGQGDSLHEHIANLAGSPAIKKGILQTVKVVDELVKVMGRHKPENIVIEMARENQTTQKGQKNSRERMKRIEEGIKELGSQILKEHPVENTQLQNEKLYLYYLQNGRDMYVDQELDINRLSDYDVDHIVPQSFLKDDSIDNKVLTRSDKARGKSDNVPSEEVVKKMKNYWRQLLNAKLITQRKFDNLTKAERGGLSELDKAGFIKRQLVETRQITKHVAQILDSRMNTKYDENDKLIREVKVITLKSKLVSDFRKDFQFYKVREINNYHHAHDAYLNAVVGTALIKKYPKLESEFVYGDYKVYDVRKMIAKSEQEIGKATAKYFFYSNIMNFFKTEITLANGEIRKRPLIETNGETGEIVWDKGRDFATVRKVLSMPQVNIVKKTEVQTGGFSKESILPKRNSDKLIARKKDWDPKKYGGFDSPTVAYSVLVVAKVEKGKSKKLKSVKELLGITIMERSSFEKNPIDFLEAKGYKEVKKDLIIKLPKYSLFELENGRKRMLASAGELQKGNELALPSKYVNFLYLASHYEKLKGSPEDNEQKQLFVEQHKHYLDEIIEQISEFSKRVILADANLDKVLSAYNKHRDKPIREQAENIIHLFTLTNLGAPAAFKYFDTTIDRKRYTSTKEVLDATLIHQSITGLYETRIDLSQLGGDGGEAAAKGGGGGTLQLDDEYRLYSPLVKPDQNIQFWLEQFPQAWAETAGMGLAKQVPPQVIQLKASATPVSVRQYPLSKEAQEGIRPHVQRLIQQGILVPVQSPWNTPLLPVRKPGTNDYRPVQDLREVNKRVQDIHPTVPNPYNLLCALPPQRSWYTVLDLKDAFFCLRLHPTSQPLFAFEWRDPGTGRTGQLTWTRLPQGFKNSPTIFNEALHRDLANFRIQHPQVTLLQYVDDLLLAGATKQDCLEGTKALLLELSDLGYRASAKKAQICRREVTYLGYSLRDGQRWLTEARKKTVVQIPAPTTAKQVREFLGTAGFCRLWIPGFATLAAPLYPLTKPKGEFSWAPEHQKAFDAIKKALLSAPALALPDVTKPFTLYVDERKGVARGVLTQTLGPWRRPVAYLSKKLDPVASGWPVCLKAIAAVAILVKDADKLTLGQNITVIAPHALENIVRQPPDRWMTNARMTHYQSLLLTERVTFAPPAALNPATLLPEETDEPVTHDCHQLLIEETGVRKDLTDIPLTGEVLTWFTDGSSYVVEGKRMAGAAVVDGTRTIWASSLPEGTSAQKAELMALTQALRLAEGKSINIYTDSRYAFATAHVHGAIYKQRGWLTSAGREIKNKEEILSLLEALHLPKRLAIIHCPGHQKAKDPISRGNQMADRVAKQAAQGVNLLAGKRTADGSEFEKRTADGSEFESPKKKAKVE

SEQ ID NO: 127 - protein, 2090 aa, synthetic construct
MPAAKRVKLDGGDKKYSIGLDIGTNSVGWAVITDEYKVPSKKFKVLGNTDRHSIKKNLIGALLFDSGETAEATRLKRTARRRYTRRKNRICYLQEIFSNEMAKVDDSFFHRLEESFLVEEDKKHERHPIFGNIVDEVAYHEKYPTIYHLRKKLVDSTDKADLRLIYLALAHMIKFRGHFLIEGDLNPDNSDVDKLFIQLVQTYNQLFEENPINASGVDAKAILSARLSKSRRLENLIAQLPGEKKNGLFGNLIALSLGLTPNFKSNFDLAEDAKLQLSKDTYDDDLDNLLAQIGDQYADLFLAAKNLSDAILLSDILRVNTEITKAPLSASMIKRYDEHHQDLTLLKALVRQQLPEKYKEIFFDQSKNGYAGYIDGGASQEEFYKFIKPILEKMDGTEELLVKLNREDLLRKQRTFDNGSIPHQIHLGELHAILRRQEDFYPFLKDNREKIEKILTFRIPYYVGPLARGNSRFAWMTRKSEETITPWNFEEVVDKGASAQSFIERMTNFDKNLPNEKVLPKHSLLYEYFTVYNELTKVKYVTEGMRKPAFLSGEQKKAIVDLLFKTNRKVTVKQLKEDYFKKIECFDSVEISGVEDRFNASLGTYHDLLKIIKDKDFLDNEENEDILEDIVLTLTLFEDREMIEERLKTYAHLFDDKVMKQLKRRRYTGWGRLSRKLINGIRDKQSGKTILDFLKSDGFANRNFMQLIHDDSLTFKEDIQKAQVSGQGDSLHEHIANLAGSPAIKKGILQTVKVVDELVKVMGRHKPENIVIEMARENQTTQKGQKNSRERMKRIEEGIKELGSQILKEHPVENTQLQNEKLYLYYLQNGRDMYVDQELDINRLSDYDVDHIVPQSFLKDDSIDNKVLTRSDKARGKSDNVPSEEVVKKMKNYWRQLLNAKLITQRKFDNLTKAERGGLSELDKAGFIKRQLVETRQITKHVAQILDSRMNTKYDENDKLIREVKVITLKSKLVSDFRKDFQFYKVREINNYHHAHDAYLNAVVGTALIKKYPKLESEFVYGDYKVYDVRKMIAKSEQEIGKATAKYFFYSNIMNFFKTEITLANGEIRKRPLIETNGETGEIVWDKGRDFATVRKVLSMPQVNIVKKTEVQTGGFSKESILPKRNSDKLIARKKDWDPKKYGGFDSPTVAYSVLVVAKVEKGKSKKLKSVKELLGITIMERSSFEKNPIDFLEAKGYKEVKKDLIIKLPKYSLFELENGRKRMLASAGELQKGNELALPSKYVNFLYLASHYEKLKGSPEDNEQKQLFVEQHKHYLDEIIEQISEFSKRVILADANLDKVLSAYNKHRDKPIREQAENIIHLFTLTNLGAPAAFKYFDTTIDRKRYTSTKEVLDATLIHQSITGLYETRIDLSQLGGDGGPAPGGGEAAAKGGTLQLDDEYRLYSPLVKPDQNIQFWLEQFPQAWAETAGMGLAKQVPPQVIQLKASATPVSVRQYPLSKEAQEGIRPHVQRLIQQGILVPVQSPWNTPLLPVRKPGTNDYRPVQDLREVNKRVQDIHPTVPNPYNLLCALPPQRSWYTVLDLKDAFFCLRLHPTSQPLFAFEWRDPGTGRTGQLTWTRLPQGFKNSPTIFNEALHRDLANFRIQHPQVTLLQYVDDLLLAGATKQDCLEGTKALLLELSDLGYRASAKKAQICRREVTYLGYSLRDGQRWLTEARKKTVVQIPAPTTAKQVREFLGTAGFCRLWIPGFATLAAPLYPLTKPKGEFSWAPEHQKAFDAIKKALLSAPALALPDVTKPFTLYVDERKGVARGVLTQTLGPWRRPVAYLSKKLDPVASGWPVCLKAIAAVAILVKDADKLTLGQNITVIAPHALENIVRQPPDRWMTNARMTHYQSLLLTERVTFAPPAALNPATLLPEETDEPVTHDCHQLLIEETGVRKDLTDIPLTGEVLTWFTDGSSYVVEGKRMAGAAVVDGTRTIWASSLPEGTSAQKAELMALTQALRLAEGKSINIYTDSRYAFATAHVHGAIYKQRGWLTSAGREIKNKEEILSLLEALHLPKRLAIIHCPGHQKAKDPISRGNQMADRVAKQAAQGVNLLAGKRTADGSEFEKRTADGSEFESPKKKAKVE

SEQ ID NO: 128-132 - skipped (5 entries)

SEQ ID NO: 133 - protein, 2090 aa, synthetic construct
MPAAKRVKLDGGDKKYSIGLDIGTNSVGWAVITDEYKVPSKKFKVLGNTDRHSIKKNLIGALLFDSGETAEATRLKRTARRRYTRRKNRICYLQEIFSNEMAKVDDSFFHRLEESFLVEEDKKHERHPIFGNIVDEVAYHEKYPTIYHLRKKLVDSTDKADLRLIYLALAHMIKFRGHFLIEGDLNPDNSDVDKLFIQLVQTYNQLFEENPINASGVDAKAILSARLSKSRRLENLIAQLPGEKKNGLFGNLIALSLGLTPNFKSNFDLAEDAKLQLSKDTYDDDLDNLLAQIGDQYADLFLAAKNLSDAILLSDILRVNTEITKAPLSASMIKRYDEHHQDLTLLKALVRQQLPEKYKEIFFDQSKNGYAGYIDGGASQEEFYKFIKPILEKMDGTEELLVKLNREDLLRKQRTFDNGSIPHQIHLGELHAILRRQEDFYPFLKDNREKIEKILTFRIPYYVGPLARGNSRFAWMTRKSEETITPWNFEEVVDKGASAQSFIERMTNFDKNLPNEKVLPKHSLLYEYFTVYNELTKVKYVTEGMRKPAFLSGEQKKAIVDLLFKTNRKVTVKQLKEDYFKKIECFDSVEISGVEDRFNASLGTYHDLLKIIKDKDFLDNEENEDILEDIVLTLTLFEDREMIEERLKTYAHLFDDKVMKQLKRRRYTGWGRLSRKLINGIRDKQSGKTILDFLKSDGFANRNFMQLIHDDSLTFKEDIQKAQVSGQGDSLHEHIANLAGSPAIKKGILQTVKVVDELVKVMGRHKPENIVIEMARENQTTQKGQKNSRERMKRIEEGIKELGSQILKEHPVENTQLQNEKLYLYYLQNGRDMYVDQELDINRLSDYDVDHIVPQSFLKDDSIDNKVLTRSDKARGKSDNVPSEEVVKKMKNYWRQLLNAKLITQRKFDNLTKAERGGLSELDKAGFIKRQLVETRQITKHVAQILDSRMNTKYDENDKLIREVKVITLKSKLVSDFRKDFQFYKVREINNYHHAHDAYLNAVVGTALIKKYPKLESEFVYGDYKVYDVRKMIAKSEQEIGKATAKYFFYSNIMNFFKTEITLANGEIRKRPLIETNGETGEIVWDKGRDFATVRKVLSMPQVNIVKKTEVQTGGFSKESILPKRNSDKLIARKKDWDPKKYGGFDSPTVAYSVLVVAKVEKGKSKKLKSVKELLGITIMERSSFEKNPIDFLEAKGYKEVKKDLIIKLPKYSLFELENGRKRMLASAGELQKGNELALPSKYVNFLYLASHYEKLKGSPEDNEQKQLFVEQHKHYLDEIIEQISEFSKRVILADANLDKVLSAYNKHRDKPIREQAENIIHLFTLTNLGAPAAFKYFDTTIDRKRYTSTKEVLDATLIHQSITGLYETRIDLSQLGGDGGGSSEAAAKGGGGGTLQLDDEYRLYSPLVKPDQNIQFWLEQFPQAWAETAGMGLAKQVPPQVIQLKASATPVSVRQYPLSKEAQEGIRPHVQRLIQQGILVPVQSPWNTPLLPVRKPGTNDYRPVQDLREVNKRVQDIHPTVPNPYNLLCALPPQRSWYTVLDLKDAFFCLRLHPTSQPLFAFEWRDPGTGRTGQLTWTRLPQGFKNSPTIFNEALHRDLANFRIQHPQVTLLQYVDDLLLAGATKQDCLEGTKALLLELSDLGYRASAKKAQICRREVTYLGYSLRDGQRWLTEARKKTVVQIPAPTTAKQVREFLGTAGFCRLWIPGFATLAAPLYPLTKPKGEFSWAPEHQKAFDAIKKALLSAPALALPDVTKPFTLYVDERKGVARGVLTQTLGPWRRPVAYLSKKLDPVASGWPVCLKAIAAVAILVKDADKLTLGQNITVIAPHALENIVRQPPDRWMTNARMTHYQSLLLTERVTFAPPAALNPATLLPEETDEPVTHDCHQLLIEETGVRKDLTDIPLTGEVLTWFTDGSSYVVEGKRMAGAAVVDGTRTIWASSLPEGTSAQKAELMALTQALRLAEGKSINIYTDSRYAFATAHVHGAIYKQRGWLTSAGREIKNKEEILSLLEALHLPKRLAIIHCPGHQKAKDPISRGNQMADRVAKQAAQGVNLLAGKRTADGSEFEKRTADGSEFESPKKKAKVE

SEQ ID NO: 134-137 - skipped (4 entries)

SEQ ID NO: 138 - protein, 2090 aa, synthetic construct
MPAAKRVKLDGGDKKYSIGLDIGTNSVGWAVITDEYKVPSKKFKVLGNTDRHSIKKNLIGALLFDSGETAEATRLKRTARRRYTRRKNRICYLQEIFSNEMAKVDDSFFHRLEESFLVEEDKKHERHPIFGNIVDEVAYHEKYPTIYHLRKKLVDSTDKADLRLIYLALAHMIKFRGHFLIEGDLNPDNSDVDKLFIQLVQTYNQLFEENPINASGVDAKAILSARLSKSRRLENLIAQLPGEKKNGLFGNLIALSLGLTPNFKSNFDLAEDAKLQLSKDTYDDDLDNLLAQIGDQYADLFLAAKNLSDAILLSDILRVNTEITKAPLSASMIKRYDEHHQDLTLLKALVRQQLPEKYKEIFFDQSKNGYAGYIDGGASQEEFYKFIKPILEKMDGTEELLVKLNREDLLRKQRTFDNGSIPHQIHLGELHAILRRQEDFYPFLKDNREKIEKILTFRIPYYVGPLARGNSRFAWMTRKSEETITPWNFEEVVDKGASAQSFIERMTNFDKNLPNEKVLPKHSLLYEYFTVYNELTKVKYVTEGMRKPAFLSGEQKKAIVDLLFKTNRKVTVKQLKEDYFKKIECFDSVEISGVEDRFNASLGTYHDLLKIIKDKDFLDNEENEDILEDIVLTLTLFEDREMIEERLKTYAHLFDDKVMKQLKRRRYTGWGRLSRKLINGIRDKQSGKTILDFLKSDGFANRNFMQLIHDDSLTFKEDIQKAQVSGQGDSLHEHIANLAGSPAIKKGILQTVKVVDELVKVMGRHKPENIVIEMARENQTTQKGQKNSRERMKRIEEGIKELGSQILKEHPVENTQLQNEKLYLYYLQNGRDMYVDQELDINRLSDYDVDHIVPQSFLKDDSIDNKVLTRSDKARGKSDNVPSEEVVKKMKNYWRQLLNAKLITQRKFDNLTKAERGGLSELDKAGFIKRQLVETRQITKHVAQILDSRMNTKYDENDKLIREVKVITLKSKLVSDFRKDFQFYKVREINNYHHAHDAYLNAVVGTALIKKYPKLESEFVYGDYKVYDVRKMIAKSEQEIGKATAKYFFYSNIMNFFKTEITLANGEIRKRPLIETNGETGEIVWDKGRDFATVRKVLSMPQVNIVKKTEVQTGGFSKESILPKRNSDKLIARKKDWDPKKYGGFDSPTVAYSVLVVAKVEKGKSKKLKSVKELLGITIMERSSFEKNPIDFLEAKGYKEVKKDLIIKLPKYSLFELENGRKRMLASAGELQKGNELALPSKYVNFLYLASHYEKLKGSPEDNEQKQLFVEQHKHYLDEIIEQISEFSKRVILADANLDKVLSAYNKHRDKPIREQAENIIHLFTLTNLGAPAAFKYFDTTIDRKRYTSTKEVLDATLIHQSITGLYETRIDLSQLGGDGGPAPGGSEAAAKGGTLQLDDEYRLYSPLVKPDQNIQFWLEQFPQAWAETAGMGLAKQVPPQVIQLKASATPVSVRQYPLSKEAQEGIRPHVQRLIQQGILVPVQSPWNTPLLPVRKPGTNDYRPVQDLREVNKRVQDIHPTVPNPYNLLCALPPQRSWYTVLDLKDAFFCLRLHPTSQPLFAFEWRDPGTGRTGQLTWTRLPQGFKNSPTIFNEALHRDLANFRIQHPQVTLLQYVDDLLLAGATKQDCLEGTKALLLELSDLGYRASAKKAQICRREVTYLGYSLRDGQRWLTEARKKTVVQIPAPTTAKQVREFLGTAGFCRLWIPGFATLAAPLYPLTKPKGEFSWAPEHQKAFDAIKKALLSAPALALPDVTKPFTLYVDERKGVARGVLTQTLGPWRRPVAYLSKKLDPVASGWPVCLKAIAAVAILVKDADKLTLGQNITVIAPHALENIVRQPPDRWMTNARMTHYQSLLLTERVTFAPPAALNPATLLPEETDEPVTHDCHQLLIEETGVRKDLTDIPLTGEVLTWFTDGSSYVVEGKRMAGAAVVDGTRTIWASSLPEGTSAQKAELMALTQALRLAEGKSINIYTDSRYAFATAHVHGAIYKQRGWLTSAGREIKNKEEILSLLEALHLPKRLAIIHCPGHQKAKDPISRGNQMADRVAKQAAQGVNLLAGKRTADGSEFEKRTADGSEFESPKKKAKVE

SEQ ID NO: 139 - protein, 2090 aa, synthetic construct
MPAAKRVKLDGGDKKYSIGLDIGTNSVGWAVITDEYKVPSKKFKVLGNTDRHSIKKNLIGALLFDSGETAEATRLKRTARRRYTRRKNRICYLQEIFSNEMAKVDDSFFHRLEESFLVEEDKKHERHPIFGNIVDEVAYHEKYPTIYHLRKKLVDSTDKADLRLIYLALAHMIKFRGHFLIEGDLNPDNSDVDKLFIQLVQTYNQLFEENPINASGVDAKAILSARLSKSRRLENLIAQLPGEKKNGLFGNLIALSLGLTPNFKSNFDLAEDAKLQLSKDTYDDDLDNLLAQIGDQYADLFLAAKNLSDAILLSDILRVNTEITKAPLSASMIKRYDEHHQDLTLLKALVRQQLPEKYKEIFFDQSKNGYAGYIDGGASQEEFYKFIKPILEKMDGTEELLVKLNREDLLRKQRTFDNGSIPHQIHLGELHAILRRQEDFYPFLKDNREKIEKILTFRIPYYVGPLARGNSRFAWMTRKSEETITPWNFEEVVDKGASAQSFIERMTNFDKNLPNEKVLPKHSLLYEYFTVYNELTKVKYVTEGMRKPAFLSGEQKKAIVDLLFKTNRKVTVKQLKEDYFKKIECFDSVEISGVEDRFNASLGTYHDLLKIIKDKDFLDNEENEDILEDIVLTLTLFEDREMIEERLKTYAHLFDDKVMKQLKRRRYTGWGRLSRKLINGIRDKQSGKTILDFLKSDGFANRNFMQLIHDDSLTFKEDIQKAQVSGQGDSLHEHIANLAGSPAIKKGILQTVKVVDELVKVMGRHKPENIVIEMARENQTTQKGQKNSRERMKRIEEGIKELGSQILKEHPVENTQLQNEKLYLYYLQNGRDMYVDQELDINRLSDYDVDHIVPQSFLKDDSIDNKVLTRSDKARGKSDNVPSEEVVKKMKNYWRQLLNAKLITQRKFDNLTKAERGGLSELDKAGFIKRQLVETRQITKHVAQILDSRMNTKYDENDKLIREVKVITLKSKLVSDFRKDFQFYKVREINNYHHAHDAYLNAVVGTALIKKYPKLESEFVYGDYKVYDVRKMIAKSEQEIGKATAKYFFYSNIMNFFKTEITLANGEIRKRPLIETNGETGEIVWDKGRDFATVRKVLSMPQVNIVKKTEVQTGGFSKESILPKRNSDKLIARKKDWDPKKYGGFDSPTVAYSVLVVAKVEKGKSKKLKSVKELLGITIMERSSFEKNPIDFLEAKGYKEVKKDLIIKLPKYSLFELENGRKRMLASAGELQKGNELALPSKYVNFLYLASHYEKLKGSPEDNEQKQLFVEQHKHYLDEIIEQISEFSKRVILADANLDKVLSAYNKHRDKPIREQAENIIHLFTLTNLGAPAAFKYFDTTIDRKRYTSTKEVLDATLIHQSITGLYETRIDLSQLGGDGGGGSGSSEAAAKGGTLQLDDEYRLYSPLVKPDQNIQFWLEQFPQAWAETAGMGLAKQVPPQVIQLKASATPVSVRQYPLSKEAQEGIRPHVQRLIQQGILVPVQSPWNTPLLPVRKPGTNDYRPVQDLREVNKRVQDIHPTVPNPYNLLCALPPQRSWYTVLDLKDAFFCLRLHPTSQPLFAFEWRDPGTGRTGQLTWTRLPQGFKNSPTIFNEALHRDLANFRIQHPQVTLLQYVDDLLLAGATKQDCLEGTKALLLELSDLGYRASAKKAQICRREVTYLGYSLRDGQRWLTEARKKTVVQIPAPTTAKQVREFLGTAGFCRLWIPGFATLAAPLYPLTKPKGEFSWAPEHQKAFDAIKKALLSAPALALPDVTKPFTLYVDERKGVARGVLTQTLGPWRRPVAYLSKKLDPVASGWPVCLKAIAAVAILVKDADKLTLGQNITVIAPHALENIVRQPPDRWMTNARMTHYQSLLLTERVTFAPPAALNPATLLPEETDEPVTHDCHQLLIEETGVRKDLTDIPLTGEVLTWFTDGSSYVVEGKRMAGAAVVDGTRTIWASSLPEGTSAQKAELMALTQALRLAEGKSINIYTDSRYAFATAHVHGAIYKQRGWLTSAGREIKNKEEILSLLEALHLPKRLAIIHCPGHQKAKDPISRGNQMADRVAKQAAQGVNLLAGKRTADGSEFEKRTADGSEFESPKKKAKVE

SEQ ID NO: 140 - protein, 2112 aa, synthetic construct
MPAAKRVKLDGGDKKYSIGLDIGTNSVGWAVITDEYKVPSKKFKVLGNTDRHSIKKNLIGALLFDSGETAEATRLKRTARRRYTRRKNRICYLQEIFSNEMAKVDDSFFHRLEESFLVEEDKKHERHPIFGNIVDEVAYHEKYPTIYHLRKKLVDSTDKADLRLIYLALAHMIKFRGHFLIEGDLNPDNSDVDKLFIQLVQTYNQLFEENPINASGVDAKAILSARLSKSRRLENLIAQLPGEKKNGLFGNLIALSLGLTPNFKSNFDLAEDAKLQLSKDTYDDDLDNLLAQIGDQYADLFLAAKNLSDAILLSDILRVNTEITKAPLSASMIKRYDEHHQDLTLLKALVRQQLPEKYKEIFFDQSKNGYAGYIDGGASQEEFYKFIKPILEKMDGTEELLVKLNREDLLRKQRTFDNGSIPHQIHLGELHAILRRQEDFYPFLKDNREKIEKILTFRIPYYVGPLARGNSRFAWMTRKSEETITPWNFEEVVDKGASAQSFIERMTNFDKNLPNEKVLPKHSLLYEYFTVYNELTKVKYVTEGMRKPAFLSGEQKKAIVDLLFKTNRKVTVKQLKEDYFKKIECFDSVEISGVEDRFNASLGTYHDLLKIIKDKDFLDNEENEDILEDIVLTLTLFEDREMIEERLKTYAHLFDDKVMKQLKRRRYTGWGRLSRKLINGIRDKQSGKTILDFLKSDGFANRNFMQLIHDDSLTFKEDIQKAQVSGQGDSLHEHIANLAGSPAIKKGILQTVKVVDELVKVMGRHKPENIVIEMARENQTTQKGQKNSRERMKRIEEGIKELGSQILKEHPVENTQLQNEKLYLYYLQNGRDMYVDQELDINRLSDYDVDHIVPQSFLKDDSIDNKVLTRSDKARGKSDNVPSEEVVKKMKNYWRQLLNAKLITQRKFDNLTKAERGGLSELDKAGFIKRQLVETRQITKHVAQILDSRMNTKYDENDKLIREVKVITLKSKLVSDFRKDFQFYKVREINNYHHAHDAYLNAVVGTALIKKYPKLESEFVYGDYKVYDVRKMIAKSEQEIGKATAKYFFYSNIMNFFKTEITLANGEIRKRPLIETNGETGEIVWDKGRDFATVRKVLSMPQVNIVKKTEVQTGGFSKESILPKRNSDKLIARKKDWDPKKYGGFDSPTVAYSVLVVAKVEKGKSKKLKSVKELLGITIMERSSFEKNPIDFLEAKGYKEVKKDLIIKLPKYSLFELENGRKRMLASAGELQKGNELALPSKYVNFLYLASHYEKLKGSPEDNEQKQLFVEQHKHYLDEIIEQISEFSKRVILADANLDKVLSAYNKHRDKPIREQAENIIHLFTLTNLGAPAAFKYFDTTIDRKRYTSTKEVLDATLIHQSITGLYETRIDLSQLGGDGGSGGSSGGSSGSETPGTSESATPESSGGSSGGSSGGTLQLDDEYRLYSPLVKPDQNIQFWLEQFPQAWAETAGMGLAKQVPPQVIQLKASATPVSVRQYPLSKEAQEGIRPHVQRLIQQGILVPVQSPWNTPLLPVRKPGTNDYRPVQDLREVNKRVQDIHPTVPNPYNLLCALPPQRSWYTVLDLKDAFFCLRLHPTSQPLFAFEWRDPGTGRTGQLTWTRLPQGFKNSPTIFNEALHRDLANFRIQHPQVTLLQYVDDLLLAGATKQDCLEGTKALLLELSDLGYRASAKKAQICRREVTYLGYSLRDGQRWLTEARKKTVVQIPAPTTAKQVREFLGTAGFCRLWIPGFATLAAPLYPLTKPKGEFSWAPEHQKAFDAIKKALLSAPALALPDVTKPFTLYVDERKGVARGVLTQTLGPWRRPVAYLSKKLDPVASGWPVCLKAIAAVAILVKDADKLTLGQNITVIAPHALENIVRQPPDRWMTNARMTHYQSLLLTERVTFAPPAALNPATLLPEETDEPVTHDCHQLLIEETGVRKDLTDIPLTGEVLTWFTDGSSYVVEGKRMAGAAVVDGTRTIWASSLPEGTSAQKAELMALTQALRLAEGKSINIYTDSRYAFATAHVHGAIYKQRGWLTSAGREIKNKEEILSLLEALHLPKRLAIIHCPGHQKAKDPISRGNQMADRVAKQAAQGVNLLAGKRTADGSEFEKRTADGSEFESPKKKAKVE

SEQ ID NO: 141 - protein, 2090 aa, synthetic construct
MPAAKRVKLDGGDKKYSIGLDIGTNSVGWAVITDEYKVPSKKFKVLGNTDRHSIKKNLIGALLFDSGETAEATRLKRTARRRYTRRKNRICYLQEIFSNEMAKVDDSFFHRLEESFLVEEDKKHERHPIFGNIVDEVAYHEKYPTIYHLRKKLVDSTDKADLRLIYLALAHMIKFRGHFLIEGDLNPDNSDVDKLFIQLVQTYNQLFEENPINASGVDAKAILSARLSKSRRLENLIAQLPGEKKNGLFGNLIALSLGLTPNFKSNFDLAEDAKLQLSKDTYDDDLDNLLAQIGDQYADLFLAAKNLSDAILLSDILRVNTEITKAPLSASMIKRYDEHHQDLTLLKALVRQQLPEKYKEIFFDQSKNGYAGYIDGGASQEEFYKFIKPILEKMDGTEELLVKLNREDLLRKQRTFDNGSIPHQIHLGELHAILRRQEDFYPFLKDNREKIEKILTFRIPYYVGPLARGNSRFAWMTRKSEETITPWNFEEVVDKGASAQSFIERMTNFDKNLPNEKVLPKHSLLYEYFTVYNELTKVKYVTEGMRKPAFLSGEQKKAIVDLLFKTNRKVTVKQLKEDYFKKIECFDSVEISGVEDRFNASLGTYHDLLKIIKDKDFLDNEENEDILEDIVLTLTLFEDREMIEERLKTYAHLFDDKVMKQLKRRRYTGWGRLSRKLINGIRDKQSGKTILDFLKSDGFANRNFMQLIHDDSLTFKEDIQKAQVSGQGDSLHEHIANLAGSPAIKKGILQTVKVVDELVKVMGRHKPENIVIEMARENQTTQKGQKNSRERMKRIEEGIKELGSQILKEHPVENTQLQNEKLYLYYLQNGRDMYVDQELDINRLSDYDVDHIVPQSFLKDDSIDNKVLTRSDKARGKSDNVPSEEVVKKMKNYWRQLLNAKLITQRKFDNLTKAERGGLSELDKAGFIKRQLVETRQITKHVAQILDSRMNTKYDENDKLIREVKVITLKSKLVSDFRKDFQFYKVREINNYHHAHDAYLNAVVGTALIKKYPKLESEFVYGDYKVYDVRKMIAKSEQEIGKATAKYFFYSNIMNFFKTEITLANGEIRKRPLIETNGETGEIVWDKGRDFATVRKVLSMPQVNIVKKTEVQTGGFSKESILPKRNSDKLIARKKDWDPKKYGGFDSPTVAYSVLVVAKVEKGKSKKLKSVKELLGITIMERSSFEKNPIDFLEAKGYKEVKKDLIIKLPKYSLFELENGRKRMLASAGELQKGNELALPSKYVNFLYLASHYEKLKGSPEDNEQKQLFVEQHKHYLDEIIEQISEFSKRVILADANLDKVLSAYNKHRDKPIREQAENIIHLFTLTNLGAPAAFKYFDTTIDRKRYTSTKEVLDATLIHQSITGLYETRIDLSQLGGDGGEAAAKGGSPAPGGTLQLDDEYRLYSPLVKPDQNIQFWLEQFPQAWAETAGMGLAKQVPPQVIQLKASATPVSVRQYPLSKEAQEGIRPHVQRLIQQGILVPVQSPWNTPLLPVRKPGTNDYRPVQDLREVNKRVQDIHPTVPNPYNLLCALPPQRSWYTVLDLKDAFFCLRLHPTSQPLFAFEWRDPGTGRTGQLTWTRLPQGFKNSPTIFNEALHRDLANFRIQHPQVTLLQYVDDLLLAGATKQDCLEGTKALLLELSDLGYRASAKKAQICRREVTYLGYSLRDGQRWLTEARKKTVVQIPAPTTAKQVREFLGTAGFCRLWIPGFATLAAPLYPLTKPKGEFSWAPEHQKAFDAIKKALLSAPALALPDVTKPFTLYVDERKGVARGVLTQTLGPWRRPVAYLSKKLDPVASGWPVCLKAIAAVAILVKDADKLTLGQNITVIAPHALENIVRQPPDRWMTNARMTHYQSLLLTERVTFAPPAALNPATLLPEETDEPVTHDCHQLLIEETGVRKDLTDIPLTGEVLTWFTDGSSYVVEGKRMAGAAVVDGTRTIWASSLPEGTSAQKAELMALTQALRLAEGKSINIYTDSRYAFATAHVHGAIYKQRGWLTSAGREIKNKEEILSLLEALHLPKRLAIIHCPGHQKAKDPISRGNQMADRVAKQAAQGVNLLAGKRTADGSEFEKRTADGSEFESPKKKAKVE

SEQ ID NO: 142 - protein, 2097 aa, synthetic construct
MPAAKRVKLDGGDKKYSIGLDIGTNSVGWAVITDEYKVPSKKFKVLGNTDRHSIKKNLIGALLFDSGETAEATRLKRTARRRYTRRKNRICYLQEIFSNEMAKVDDSFFHRLEESFLVEEDKKHERHPIFGNIVDEVAYHEKYPTIYHLRKKLVDSTDKADLRLIYLALAHMIKFRGHFLIEGDLNPDNSDVDKLFIQLVQTYNQLFEENPINASGVDAKAILSARLSKSRRLENLIAQLPGEKKNGLFGNLIALSLGLTPNFKSNFDLAEDAKLQLSKDTYDDDLDNLLAQIGDQYADLFLAAKNLSDAILLSDILRVNTEITKAPLSASMIKRYDEHHQDLTLLKALVRQQLPEKYKEIFFDQSKNGYAGYIDGGASQEEFYKFIKPILEKMDGTEELLVKLNREDLLRKQRTFDNGSIPHQIHLGELHAILRRQEDFYPFLKDNREKIEKILTFRIPYYVGPLARGNSRFAWMTRKSEETITPWNFEEVVDKGASAQSFIERMTNFDKNLPNEKVLPKHSLLYEYFTVYNELTKVKYVTEGMRKPAFLSGEQKKAIVDLLFKTNRKVTVKQLKEDYFKKIECFDSVEISGVEDRFNASLGTYHDLLKIIKDKDFLDNEENEDILEDIVLTLTLFEDREMIEERLKTYAHLFDDKVMKQLKRRRYTGWGRLSRKLINGIRDKQSGKTILDFLKSDGFANRNFMQLIHDDSLTFKEDIQKAQVSGQGDSLHEHIANLAGSPAIKKGILQTVKVVDELVKVMGRHKPENIVIEMARENQTTQKGQKNSRERMKRIEEGIKELGSQILKEHPVENTQLQNEKLYLYYLQNGRDMYVDQELDINRLSDYDVDHIVPQSFLKDDSIDNKVLTRSDKARGKSDNVPSEEVVKKMKNYWRQLLNAKLITQRKFDNLTKAERGGLSELDKAGFIKRQLVETRQITKHVAQILDSRMNTKYDENDKLIREVKVITLKSKLVSDFRKDFQFYKVREINNYHHAHDAYLNAVVGTALIKKYPKLESEFVYGDYKVYDVRKMIAKSEQEIGKATAKYFFYSNIMNFFKTEITLANGEIRKRPLIETNGETGEIVWDKGRDFATVRKVLSMPQVNIVKKTEVQTGGFSKESILPKRNSDKLIARKKDWDPKKYGGFDSPTVAYSVLVVAKVEKGKSKKLKSVKELLGITIMERSSFEKNPIDFLEAKGYKEVKKDLIIKLPKYSLFELENGRKRMLASAGELQKGNELALPSKYVNFLYLASHYEKLKGSPEDNEQKQLFVEQHKHYLDEIIEQISEFSKRVILADANLDKVLSAYNKHRDKPIREQAENIIHLFTLTNLGAPAAFKYFDTTIDRKRYTSTKEVLDATLIHQSITGLYETRIDLSQLGGDGGGGSGGSGGSGGSGGSGGSGGTLQLDDEYRLYSPLVKPDQNIQFWLEQFPQAWAETAGMGLAKQVPPQVIQLKASATPVSVRQYPLSKEAQEGIRPHVQRLIQQGILVPVQSPWNTPLLPVRKPGTNDYRPVQDLREVNKRVQDIHPTVPNPYNLLCALPPQRSWYTVLDLKDAFFCLRLHPTSQPLFAFEWRDPGTGRTGQLTWTRLPQGFKNSPTIFNEALHRDLANFRIQHPQVTLLQYVDDLLLAGATKQDCLEGTKALLLELSDLGYRASAKKAQICRREVTYLGYSLRDGQRWLTEARKKTVVQIPAPTTAKQVREFLGTAGFCRLWIPGFATLAAPLYPLTKPKGEFSWAPEHQKAFDAIKKALLSAPALALPDVTKPFTLYVDERKGVARGVLTQTLGPWRRPVAYLSKKLDPVASGWPVCLKAIAAVAILVKDADKLTLGQNITVIAPHALENIVRQPPDRWMTNARMTHYQSLLLTERVTFAPPAALNPATLLPEETDEPVTHDCHQLLIEETGVRKDLTDIPLTGEVLTWFTDGSSYVVEGKRMAGAAVVDGTRTIWASSLPEGTSAQKAELMALTQALRLAEGKSINIYTDSRYAFATAHVHGAIYKQRGWLTSAGREIKNKEEILSLLEALHLPKRLAIIHCPGHQKAKDPISRGNQMADRVAKQAAQGVNLLAGKRTADGSEFEKRTADGSEFESPKKKAKVE

SEQ ID NO: 143 - skipped

SEQ ID NO: 144 - protein, 2088 aa, synthetic construct
MPAAKRVKLDGGDKKYSIGLDIGTNSVGWAVITDEYKVPSKKFKVLGNTDRHSIKKNLIGALLFDSGETAEATRLKRTARRRYTRRKNRICYLQEIFSNEMAKVDDSFFHRLEESFLVEEDKKHERHPIFGNIVDEVAYHEKYPTIYHLRKKLVDSTDKADLRLIYLALAHMIKFRGHFLIEGDLNPDNSDVDKLFIQLVQTYNQLFEENPINASGVDAKAILSARLSKSRRLENLIAQLPGEKKNGLFGNLIALSLGLTPNFKSNFDLAEDAKLQLSKDTYDDDLDNLLAQIGDQYADLFLAAKNLSDAILLSDILRVNTEITKAPLSASMIKRYDEHHQDLTLLKALVRQQLPEKYKEIFFDQSKNGYAGYIDGGASQEEFYKFIKPILEKMDGTEELLVKLNREDLLRKQRTFDNGSIPHQIHLGELHAILRRQEDFYPFLKDNREKIEKILTFRIPYYVGPLARGNSRFAWMTRKSEETITPWNFEEVVDKGASAQSFIERMTNFDKNLPNEKVLPKHSLLYEYFTVYNELTKVKYVTEGMRKPAFLSGEQKKAIVDLLFKTNRKVTVKQLKEDYFKKIECFDSVEISGVEDRFNASLGTYHDLLKIIKDKDFLDNEENEDILEDIVLTLTLFEDREMIEERLKTYAHLFDDKVMKQLKRRRYTGWGRLSRKLINGIRDKQSGKTILDFLKSDGFANRNFMQLIHDDSLTFKEDIQKAQVSGQGDSLHEHIANLAGSPAIKKGILQTVKVVDELVKVMGRHKPENIVIEMARENQTTQKGQKNSRERMKRIEEGIKELGSQILKEHPVENTQLQNEKLYLYYLQNGRDMYVDQELDINRLSDYDVDHIVPQSFLKDDSIDNKVLTRSDKARGKSDNVPSEEVVKKMKNYWRQLLNAKLITQRKFDNLTKAERGGLSELDKAGFIKRQLVETRQITKHVAQILDSRMNTKYDENDKLIREVKVITLKSKLVSDFRKDFQFYKVREINNYHHAHDAYLNAVVGTALIKKYPKLESEFVYGDYKVYDVRKMIAKSEQEIGKATAKYFFYSNIMNFFKTEITLANGEIRKRPLIETNGETGEIVWDKGRDFATVRKVLSMPQVNIVKKTEVQTGGFSKESILPKRNSDKLIARKKDWDPKKYGGFDSPTVAYSVLVVAKVEKGKSKKLKSVKELLGITIMERSSFEKNPIDFLEAKGYKEVKKDLIIKLPKYSLFELENGRKRMLASAGELQKGNELALPSKYVNFLYLASHYEKLKGSPEDNEQKQLFVEQHKHYLDEIIEQISEFSKRVILADANLDKVLSAYNKHRDKPIREQAENIIHLFTLTNLGAPAAFKYFDTTIDRKRYTSTKEVLDATLIHQSITGLYETRIDLSQLGGDGGGGSGSSGGGGGTLQLDDEYRLYSPLVKPDQNIQFWLEQFPQAWAETAGMGLAKQVPPQVIQLKASATPVSVRQYPLSKEAQEGIRPHVQRLIQQGILVPVQSPWNTPLLPVRKPGTNDYRPVQDLREVNKRVQDIHPTVPNPYNLLCALPPQRSWYTVLDLKDAFFCLRLHPTSQPLFAFEWRDPGTGRTGQLTWTRLPQGFKNSPTIFNEALHRDLANFRIQHPQVTLLQYVDDLLLAGATKQDCLEGTKALLLELSDLGYRASAKKAQICRREVTYLGYSLRDGQRWLTEARKKTVVQIPAPTTAKQVREFLGTAGFCRLWIPGFATLAAPLYPLTKPKGEFSWAPEHQKAFDAIKKALLSAPALALPDVTKPFTLYVDERKGVARGVLTQTLGPWRRPVAYLSKKLDPVASGWPVCLKAIAAVAILVKDADKLTLGQNITVIAPHALENIVRQPPDRWMTNARMTHYQSLLLTERVTFAPPAALNPATLLPEETDEPVTHDCHQLLIEETGVRKDLTDIPLTGEVLTWFTDGSSYVVEGKRMAGAAVVDGTRTIWASSLPEGTSAQKAELMALTQALRLAEGKSINIYTDSRYAFATAHVHGAIYKQRGWLTSAGREIKNKEEILSLLEALHLPKRLAIIHCPGHQKAKDPISRGNQMADRVAKQAAQGVNLLAGKRTADGSEFEKRTADGSEFESPKKKAKVE

SEQ ID NO: 145-146 - skipped (2 entries)

SEQ ID NO: 147 - protein, 2084 aa, synthetic construct
MPAAKRVKLDGGDKKYSIGLDIGTNSVGWAVITDEYKVPSKKFKVLGNTDRHSIKKNLIGALLFDSGETAEATRLKRTARRRYTRRKNRICYLQEIFSNEMAKVDDSFFHRLEESFLVEEDKKHERHPIFGNIVDEVAYHEKYPTIYHLRKKLVDSTDKADLRLIYLALAHMIKFRGHFLIEGDLNPDNSDVDKLFIQLVQTYNQLFEENPINASGVDAKAILSARLSKSRRLENLIAQLPGEKKNGLFGNLIALSLGLTPNFKSNFDLAEDAKLQLSKDTYDDDLDNLLAQIGDQYADLFLAAKNLSDAILLSDILRVNTEITKAPLSASMIKRYDEHHQDLTLLKALVRQQLPEKYKEIFFDQSKNGYAGYIDGGASQEEFYKFIKPILEKMDGTEELLVKLNREDLLRKQRTFDNGSIPHQIHLGELHAILRRQEDFYPFLKDNREKIEKILTFRIPYYVGPLARGNSRFAWMTRKSEETITPWNFEEVVDKGASAQSFIERMTNFDKNLPNEKVLPKHSLLYEYFTVYNELTKVKYVTEGMRKPAFLSGEQKKAIVDLLFKTNRKVTVKQLKEDYFKKIECFDSVEISGVEDRFNASLGTYHDLLKIIKDKDFLDNEENEDILEDIVLTLTLFEDREMIEERLKTYAHLFDDKVMKQLKRRRYTGWGRLSRKLINGIRDKQSGKTILDFLKSDGFANRNFMQLIHDDSLTFKEDIQKAQVSGQGDSLHEHIANLAGSPAIKKGILQTVKVVDELVKVMGRHKPENIVIEMARENQTTQKGQKNSRERMKRIEEGIKELGSQILKEHPVENTQLQNEKLYLYYLQNGRDMYVDQELDINRLSDYDVDHIVPQSFLKDDSIDNKVLTRSDKARGKSDNVPSEEVVKKMKNYWRQLLNAKLITQRKFDNLTKAERGGLSELDKAGFIKRQLVETRQITKHVAQILDSRMNTKYDENDKLIREVKVITLKSKLVSDFRKDFQFYKVREINNYHHAHDAYLNAVVGTALIKKYPKLESEFVYGDYKVYDVRKMIAKSEQEIGKATAKYFFYSNIMNFFKTEITLANGEIRKRPLIETNGETGEIVWDKGRDFATVRKVLSMPQVNIVKKTEVQTGGFSKESILPKRNSDKLIARKKDWDPKKYGGFDSPTVAYSVLVVAKVEKGKSKKLKSVKELLGITIMERSSFEKNPIDFLEAKGYKEVKKDLIIKLPKYSLFELENGRKRMLASAGELQKGNELALPSKYVNFLYLASHYEKLKGSPEDNEQKQLFVEQHKHYLDEIIEQISEFSKRVILADANLDKVLSAYNKHRDKPIREQAENIIHLFTLTNLGAPAAFKYFDTTIDRKRYTSTKEVLDATLIHQSITGLYETRIDLSQLGGDGGGGGGSGGTLQLDDEYRLYSPLVKPDQNIQFWLEQFPQAWAETAGMGLAKQVPPQVIQLKASATPVSVRQYPLSKEAQEGIRPHVQRLIQQGILVPVQSPWNTPLLPVRKPGTNDYRPVQDLREVNKRVQDIHPTVPNPYNLLCALPPQRSWYTVLDLKDAFFCLRLHPTSQPLFAFEWRDPGTGRTGQLTWTRLPQGFKNSPTIFNEALHRDLANFRIQHPQVTLLQYVDDLLLAGATKQDCLEGTKALLLELSDLGYRASAKKAQICRREVTYLGYSLRDGQRWLTEARKKTVVQIPAPTTAKQVREFLGTAGFCRLWIPGFATLAAPLYPLTKPKGEFSWAPEHQKAFDAIKKALLSAPALALPDVTKPFTLYVDERKGVARGVLTQTLGPWRRPVAYLSKKLDPVASGWPVCLKAIAAVAILVKDADKLTLGQNITVIAPHALENIVRQPPDRWMTNARMTHYQSLLLTERVTFAPPAALNPATLLPEETDEPVTHDCHQLLIEETGVRKDLTDIPLTGEVLTWFTDGSSYVVEGKRMAGAAVVDGTRTIWASSLPEGTSAQKAELMALTQALRLAEGKSINIYTDSRYAFATAHVHGAIYKQRGWLTSAGREIKNKEEILSLLEALHLPKRLAIIHCPGHQKAKDPISRGNQMADRVAKQAAQGVNLLAGKRTADGSEFEKRTADGSEFESPKKKAKVE

SEQ ID NO: 148-150 - skipped (3 entries)

SEQ ID NO: 151 - protein, 2084 aa, synthetic construct
MPAAKRVKLDGGDKKYSIGLDIGTNSVGWAVITDEYKVPSKKFKVLGNTDRHSIKKNLIGALLFDSGETAEATRLKRTARRRYTRRKNRICYLQEIFSNEMAKVDDSFFHRLEESFLVEEDKKHERHPIFGNIVDEVAYHEKYPTIYHLRKKLVDSTDKADLRLIYLALAHMIKFRGHFLIEGDLNPDNSDVDKLFIQLVQTYNQLFEENPINASGVDAKAILSARLSKSRRLENLIAQLPGEKKNGLFGNLIALSLGLTPNFKSNFDLAEDAKLQLSKDTYDDDLDNLLAQIGDQYADLFLAAKNLSDAILLSDILRVNTEITKAPLSASMIKRYDEHHQDLTLLKALVRQQLPEKYKEIFFDQSKNGYAGYIDGGASQEEFYKFIKPILEKMDGTEELLVKLNREDLLRKQRTFDNGSIPHQIHLGELHAILRRQEDFYPFLKDNREKIEKILTFRIPYYVGPLARGNSRFAWMTRKSEETITPWNFEEVVDKGASAQSFIERMTNFDKNLPNEKVLPKHSLLYEYFTVYNELTKVKYVTEGMRKPAFLSGEQKKAIVDLLFKTNRKVTVKQLKEDYFKKIECFDSVEISGVEDRFNASLGTYHDLLKIIKDKDFLDNEENEDILEDIVLTLTLFEDREMIEERLKTYAHLFDDKVMKQLKRRRYTGWGRLSRKLINGIRDKQSGKTILDFLKSDGFANRNFMQLIHDDSLTFKEDIQKAQVSGQGDSLHEHIANLAGSPAIKKGILQTVKVVDELVKVMGRHKPENIVIEMARENQTTQKGQKNSRERMKRIEEGIKELGSQILKEHPVENTQLQNEKLYLYYLQNGRDMYVDQELDINRLSDYDVDHIVPQSFLKDDSIDNKVLTRSDKARGKSDNVPSEEVVKKMKNYWRQLLNAKLITQRKFDNLTKAERGGLSELDKAGFIKRQLVETRQITKHVAQILDSRMNTKYDENDKLIREVKVITLKSKLVSDFRKDFQFYKVREINNYHHAHDAYLNAVVGTALIKKYPKLESEFVYGDYKVYDVRKMIAKSEQEIGKATAKYFFYSNIMNFFKTEITLANGEIRKRPLIETNGETGEIVWDKGRDFATVRKVLSMPQVNIVKKTEVQTGGFSKESILPKRNSDKLIARKKDWDPKKYGGFDSPTVAYSVLVVAKVEKGKSKKLKSVKELLGITIMERSSFEKNPIDFLEAKGYKEVKKDLIIKLPKYSLFELENGRKRMLASAGELQKGNELALPSKYVNFLYLASHYEKLKGSPEDNEQKQLFVEQHKHYLDEIIEQISEFSKRVILADANLDKVLSAYNKHRDKPIREQAENIIHLFTLTNLGAPAAFKYFDTTIDRKRYTSTKEVLDATLIHQSITGLYETRIDLSQLGGDGGEAAAKGGTLQLDDEYRLYSPLVKPDQNIQFWLEQFPQAWAETAGMGLAKQVPPQVIQLKASATPVSVRQYPLSKEAQEGIRPHVQRLIQQGILVPVQSPWNTPLLPVRKPGTNDYRPVQDLREVNKRVQDIHPTVPNPYNLLCALPPQRSWYTVLDLKDAFFCLRLHPTSQPLFAFEWRDPGTGRTGQLTWTRLPQGFKNSPTIFNEALHRDLANFRIQHPQVTLLQYVDDLLLAGATKQDCLEGTKALLLELSDLGYRASAKKAQICRREVTYLGYSLRDGQRWLTEARKKTVVQIPAPTTAKQVREFLGTAGFCRLWIPGFATLAAPLYPLTKPKGEFSWAPEHQKAFDAIKKALLSAPALALPDVTKPFTLYVDERKGVARGVLTQTLGPWRRPVAYLSKKLDPVASGWPVCLKAIAAVAILVKDADKLTLGQNITVIAPHALENIVRQPPDRWMTNARMTHYQSLLLTERVTFAPPAALNPATLLPEETDEPVTHDCHQLLIEETGVRKDLTDIPLTGEVLTWFTDGSSYVVEGKRMAGAAVVDGTRTIWASSLPEGTSAQKAELMALTQALRLAEGKSINIYTDSRYAFATAHVHGAIYKQRGWLTSAGREIKNKEEILSLLEALHLPKRLAIIHCPGHQKAKDPISRGNQMADRVAKQAAQGVNLLAGKRTADGSEFEKRTADGSEFESPKKKAKVE

SEQ ID NO: 152-155 - skipped (4 entries)

SEQ ID NO: 156 - protein, 2125 aa, synthetic construct
MPAAKRVKLDGGDKKYSIGLDIGTNSVGWAVITDEYKVPSKKFKVLGNTDRHSIKKNLIGALLFDSGETAEATRLKRTARRRYTRRKNRICYLQEIFSNEMAKVDDSFFHRLEESFLVEEDKKHERHPIFGNIVDEVAYHEKYPTIYHLRKKLVDSTDKADLRLIYLALAHMIKFRGHFLIEGDLNPDNSDVDKLFIQLVQTYNQLFEENPINASGVDAKAILSARLSKSRRLENLIAQLPGEKKNGLFGNLIALSLGLTPNFKSNFDLAEDAKLQLSKDTYDDDLDNLLAQIGDQYADLFLAAKNLSDAILLSDILRVNTEITKAPLSASMIKRYDEHHQDLTLLKALVRQQLPEKYKEIFFDQSKNGYAGYIDGGASQEEFYKFIKPILEKMDGTEELLVKLNREDLLRKQRTFDNGSIPHQIHLGELHAILRRQEDFYPFLKDNREKIEKILTFRIPYYVGPLARGNSRFAWMTRKSEETITPWNFEEVVDKGASAQSFIERMTNFDKNLPNEKVLPKHSLLYEYFTVYNELTKVKYVTEGMRKPAFLSGEQKKAIVDLLFKTNRKVTVKQLKEDYFKKIECFDSVEISGVEDRFNASLGTYHDLLKIIKDKDFLDNEENEDILEDIVLTLTLFEDREMIEERLKTYAHLFDDKVMKQLKRRRYTGWGRLSRKLINGIRDKQSGKTILDFLKSDGFANRNFMQLIHDDSLTFKEDIQKAQVSGQGDSLHEHIANLAGSPAIKKGILQTVKVVDELVKVMGRHKPENIVIEMARENQTTQKGQKNSRERMKRIEEGIKELGSQILKEHPVENTQLQNEKLYLYYLQNGRDMYVDQELDINRLSDYDVDHIVPQSFLKDDSIDNKVLTRSDKARGKSDNVPSEEVVKKMKNYWRQLLNAKLITQRKFDNLTKAERGGLSELDKAGFIKRQLVETRQITKHVAQILDSRMNTKYDENDKLIREVKVITLKSKLVSDFRKDFQFYKVREINNYHHAHDAYLNAVVGTALIKKYPKLESEFVYGDYKVYDVRKMIAKSEQEIGKATAKYFFYSNIMNFFKTEITLANGEIRKRPLIETNGETGEIVWDKGRDFATVRKVLSMPQVNIVKKTEVQTGGFSKESILPKRNSDKLIARKKDWDPKKYGGFDSPTVAYSVLVVAKVEKGKSKKLKSVKELLGITIMERSSFEKNPIDFLEAKGYKEVKKDLIIKLPKYSLFELENGRKRMLASAGELQKGNELALPSKYVNFLYLASHYEKLKGSPEDNEQKQLFVEQHKHYLDEIIEQISEFSKRVILADANLDKVLSAYNKHRDKPIREQAENIIHLFTLTNLGAPAAFKYFDTTIDRKRYTSTKEVLDATLIHQSITGLYETRIDLSQLGGDGGAEAAAKEAAAKEAAAKEAAAKALEAEAAAKEAAAKEAAAKEAAAKAGGTLQLDDEYRLYSPLVKPDQNIQFWLEQFPQAWAETAGMGLAKQVPPQVIQLKASATPVSVRQYPLSKEAQEGIRPHVQRLIQQGILVPVQSPWNTPLLPVRKPGTNDYRPVQDLREVNKRVQDIHPTVPNPYNLLCALPPQRSWYTVLDLKDAFFCLRLHPTSQPLFAFEWRDPGTGRTGQLTWTRLPQGFKNSPTIFNEALHRDLANFRIQHPQVTLLQYVDDLLLAGATKQDCLEGTKALLLELSDLGYRASAKKAQICRREVTYLGYSLRDGQRWLTEARKKTVVQIPAPTTAKQVREFLGTAGFCRLWIPGFATLAAPLYPLTKPKGEFSWAPEHQKAFDAIKKALLSAPALALPDVTKPFTLYVDERKGVARGVLTQTLGPWRRPVAYLSKKLDPVASGWPVCLKAIAAVAILVKDADKLTLGQNITVIAPHALENIVRQPPDRWMTNARMTHYQSLLLTERVTFAPPAALNPATLLPEETDEPVTHDCHQLLIEETGVRKDLTDIPLTGEVLTWFTDGSSYVVEGKRMAGAAVVDGTRTIWASSLPEGTSAQKAELMALTQALRLAEGKSINIYTDSRYAFATAHVHGAIYKQRGWLTSAGREIKNKEEILSLLEALHLPKRLAIIHCPGHQKAKDPISRGNQMADRVAKQAAQGVNLLAGKRTADGSEFEKRTADGSEFESPKKKAKVE

SEQ ID NO: 157 - protein, 2092 aa, synthetic construct
MPAAKRVKLDGGDKKYSIGLDIGTNSVGWAVITDEYKVPSKKFKVLGNTDRHSIKKNLIGALLFDSGETAEATRLKRTARRRYTRRKNRICYLQEIFSNEMAKVDDSFFHRLEESFLVEEDKKHERHPIFGNIVDEVAYHEKYPTIYHLRKKLVDSTDKADLRLIYLALAHMIKFRGHFLIEGDLNPDNSDVDKLFIQLVQTYNQLFEENPINASGVDAKAILSARLSKSRRLENLIAQLPGEKKNGLFGNLIALSLGLTPNFKSNFDLAEDAKLQLSKDTYDDDLDNLLAQIGDQYADLFLAAKNLSDAILLSDILRVNTEITKAPLSASMIKRYDEHHQDLTLLKALVRQQLPEKYKEIFFDQSKNGYAGYIDGGASQEEFYKFIKPILEKMDGTEELLVKLNREDLLRKQRTFDNGSIPHQIHLGELHAILRRQEDFYPFLKDNREKIEKILTFRIPYYVGPLARGNSRFAWMTRKSEETITPWNFEEVVDKGASAQSFIERMTNFDKNLPNEKVLPKHSLLYEYFTVYNELTKVKYVTEGMRKPAFLSGEQKKAIVDLLFKTNRKVTVKQLKEDYFKKIECFDSVEISGVEDRFNASLGTYHDLLKIIKDKDFLDNEENEDILEDIVLTLTLFEDREMIEERLKTYAHLFDDKVMKQLKRRRYTGWGRLSRKLINGIRDKQSGKTILDFLKSDGFANRNFMQLIHDDSLTFKEDIQKAQVSGQGDSLHEHIANLAGSPAIKKGILQTVKVVDELVKVMGRHKPENIVIEMARENQTTQKGQKNSRERMKRIEEGIKELGSQILKEHPVENTQLQNEKLYLYYLQNGRDMYVDQELDINRLSDYDVDHIVPQSFLKDDSIDNKVLTRSDKARGKSDNVPSEEVVKKMKNYWRQLLNAKLITQRKFDNLTKAERGGLSELDKAGFIKRQLVETRQITKHVAQILDSRMNTKYDENDKLIREVKVITLKSKLVSDFRKDFQFYKVREINNYHHAHDAYLNAVVGTALIKKYPKLESEFVYGDYKVYDVRKMIAKSEQEIGKATAKYFFYSNIMNFFKTEITLANGEIRKRPLIETNGETGEIVWDKGRDFATVRKVLSMPQVNIVKKTEVQTGGFSKESILPKRNSDKLIARKKDWDPKKYGGFDSPTVAYSVLVVAKVEKGKSKKLKSVKELLGITIMERSSFEKNPIDFLEAKGYKEVKKDLIIKLPKYSLFELENGRKRMLASAGELQKGNELALPSKYVNFLYLASHYEKLKGSPEDNEQKQLFVEQHKHYLDEIIEQISEFSKRVILADANLDKVLSAYNKHRDKPIREQAENIIHLFTLTNLGAPAAFKYFDTTIDRKRYTSTKEVLDATLIHQSITGLYETRIDLSQLGGDGGPAPAPAPAPAPAPGGTLQLDDEYRLYSPLVKPDQNIQFWLEQFPQAWAETAGMGLAKQVPPQVIQLKASATPVSVRQYPLSKEAQEGIRPHVQRLIQQGILVPVQSPWNTPLLPVRKPGTNDYRPVQDLREVNKRVQDIHPTVPNPYNLLCALPPQRSWYTVLDLKDAFFCLRLHPTSQPLFAFEWRDPGTGRTGQLTWTRLPQGFKNSPTIFNEALHRDLANFRIQHPQVTLLQYVDDLLLAGATKQDCLEGTKALLLELSDLGYRASAKKAQICRREVTYLGYSLRDGQRWLTEARKKTVVQIPAPTTAKQVREFLGTAGFCRLWIPGFATLAAPLYPLTKPKGEFSWAPEHQKAFDAIKKALLSAPALALPDVTKPFTLYVDERKGVARGVLTQTLGPWRRPVAYLSKKLDPVASGWPVCLKAIAAVAILVKDADKLTLGQNITVIAPHALENIVRQPPDRWMTNARMTHYQSLLLTERVTFAPPAALNPATLLPEETDEPVTHDCHQLLIEETGVRKDLTDIPLTGEVLTWFTDGSSYVVEGKRMAGAAVVDGTRTIWASSLPEGTSAQKAELMALTQALRLAEGKSINIYTDSRYAFATAHVHGAIYKQRGWLTSAGREIKNKEEILSLLEALHLPKRLAIIHCPGHQKAKDPISRGNQMADRVAKQAAQGVNLLAGKRTADGSEFEKRTADGSEFESPKKKAKVE

SEQ ID NO: 158-163 - skipped (6 entries)

SEQ ID NO: 164 - protein, 2090 aa, synthetic construct
MPAAKRVKLDGGDKKYSIGLDIGTNSVGWAVITDEYKVPSKKFKVLGNTDRHSIKKNLIGALLFDSGETAEATRLKRTARRRYTRRKNRICYLQEIFSNEMAKVDDSFFHRLEESFLVEEDKKHERHPIFGNIVDEVAYHEKYPTIYHLRKKLVDSTDKADLRLIYLALAHMIKFRGHFLIEGDLNPDNSDVDKLFIQLVQTYNQLFEENPINASGVDAKAILSARLSKSRRLENLIAQLPGEKKNGLFGNLIALSLGLTPNFKSNFDLAEDAKLQLSKDTYDDDLDNLLAQIGDQYADLFLAAKNLSDAILLSDILRVNTEITKAPLSASMIKRYDEHHQDLTLLKALVRQQLPEKYKEIFFDQSKNGYAGYIDGGASQEEFYKFIKPILEKMDGTEELLVKLNREDLLRKQRTFDNGSIPHQIHLGELHAILRRQEDFYPFLKDNREKIEKILTFRIPYYVGPLARGNSRFAWMTRKSEETITPWNFEEVVDKGASAQSFIERMTNFDKNLPNEKVLPKHSLLYEYFTVYNELTKVKYVTEGMRKPAFLSGEQKKAIVDLLFKTNRKVTVKQLKEDYFKKIECFDSVEISGVEDRFNASLGTYHDLLKIIKDKDFLDNEENEDILEDIVLTLTLFEDREMIEERLKTYAHLFDDKVMKQLKRRRYTGWGRLSRKLINGIRDKQSGKTILDFLKSDGFANRNFMQLIHDDSLTFKEDIQKAQVSGQGDSLHEHIANLAGSPAIKKGILQTVKVVDELVKVMGRHKPENIVIEMARENQTTQKGQKNSRERMKRIEEGIKELGSQILKEHPVENTQLQNEKLYLYYLQNGRDMYVDQELDINRLSDYDVDHIVPQSFLKDDSIDNKVLTRSDKARGKSDNVPSEEVVKKMKNYWRQLLNAKLITQRKFDNLTKAERGGLSELDKAGFIKRQLVETRQITKHVAQILDSRMNTKYDENDKLIREVKVITLKSKLVSDFRKDFQFYKVREINNYHHAHDAYLNAVVGTALIKKYPKLESEFVYGDYKVYDVRKMIAKSEQEIGKATAKYFFYSNIMNFFKTEITLANGEIRKRPLIETNGETGEIVWDKGRDFATVRKVLSMPQVNIVKKTEVQTGGFSKESILPKRNSDKLIARKKDWDPKKYGGFDSPTVAYSVLVVAKVEKGKSKKLKSVKELLGITIMERSSFEKNPIDFLEAKGYKEVKKDLIIKLPKYSLFELENGRKRMLASAGELQKGNELALPSKYVNFLYLASHYEKLKGSPEDNEQKQLFVEQHKHYLDEIIEQISEFSKRVILADANLDKVLSAYNKHRDKPIREQAENIIHLFTLTNLGAPAAFKYFDTTIDRKRYTSTKEVLDATLIHQSITGLYETRIDLSQLGGDGGGGSPAPEAAAKGGTLQLDDEYRLYSPLVKPDQNIQFWLEQFPQAWAETAGMGLAKQVPPQVIQLKASATPVSVRQYPLSKEAQEGIRPHVQRLIQQGILVPVQSPWNTPLLPVRKPGTNDYRPVQDLREVNKRVQDIHPTVPNPYNLLCALPPQRSWYTVLDLKDAFFCLRLHPTSQPLFAFEWRDPGTGRTGQLTWTRLPQGFKNSPTIFNEALHRDLANFRIQHPQVTLLQYVDDLLLAGATKQDCLEGTKALLLELSDLGYRASAKKAQICRREVTYLGYSLRDGQRWLTEARKKTVVQIPAPTTAKQVREFLGTAGFCRLWIPGFATLAAPLYPLTKPKGEFSWAPEHQKAFDAIKKALLSAPALALPDVTKPFTLYVDERKGVARGVLTQTLGPWRRPVAYLSKKLDPVASGWPVCLKAIAAVAILVKDADKLTLGQNITVIAPHALENIVRQPPDRWMTNARMTHYQSLLLTERVTFAPPAALNPATLLPEETDEPVTHDCHQLLIEETGVRKDLTDIPLTGEVLTWFTDGSSYVVEGKRMAGAAVVDGTRTIWASSLPEGTSAQKAELMALTQALRLAEGKSINIYTDSRYAFATAHVHGAIYKQRGWLTSAGREIKNKEEILSLLEALHLPKRLAIIHCPGHQKAKDPISRGNQMADRVAKQAAQGVNLLAGKRTADGSEFEKRTADGSEFESPKKKAKVE

SEQ ID NO: 165-167 - skipped (3 entries)

SEQ ID NO: 168 - protein, 2090 aa, synthetic construct
MPAAKRVKLDGGDKKYSIGLDIGTNSVGWAVITDEYKVPSKKFKVLGNTDRHSIKKNLIGALLFDSGETAEATRLKRTARRRYTRRKNRICYLQEIFSNEMAKVDDSFFHRLEESFLVEEDKKHERHPIFGNIVDEVAYHEKYPTIYHLRKKLVDSTDKADLRLIYLALAHMIKFRGHFLIEGDLNPDNSDVDKLFIQLVQTYNQLFEENPINASGVDAKAILSARLSKSRRLENLIAQLPGEKKNGLFGNLIALSLGLTPNFKSNFDLAEDAKLQLSKDTYDDDLDNLLAQIGDQYADLFLAAKNLSDAILLSDILRVNTEITKAPLSASMIKRYDEHHQDLTLLKALVRQQLPEKYKEIFFDQSKNGYAGYIDGGASQEEFYKFIKPILEKMDGTEELLVKLNREDLLRKQRTFDNGSIPHQIHLGELHAILRRQEDFYPFLKDNREKIEKILTFRIPYYVGPLARGNSRFAWMTRKSEETITPWNFEEVVDKGASAQSFIERMTNFDKNLPNEKVLPKHSLLYEYFTVYNELTKVKYVTEGMRKPAFLSGEQKKAIVDLLFKTNRKVTVKQLKEDYFKKIECFDSVEISGVEDRFNASLGTYHDLLKIIKDKDFLDNEENEDILEDIVLTLTLFEDREMIEERLKTYAHLFDDKVMKQLKRRRYTGWGRLSRKLINGIRDKQSGKTILDFLKSDGFANRNFMQLIHDDSLTFKEDIQKAQVSGQGDSLHEHIANLAGSPAIKKGILQTVKVVDELVKVMGRHKPENIVIEMARENQTTQKGQKNSRERMKRIEEGIKELGSQILKEHPVENTQLQNEKLYLYYLQNGRDMYVDQELDINRLSDYDVDHIVPQSFLKDDSIDNKVLTRSDKARGKSDNVPSEEVVKKMKNYWRQLLNAKLITQRKFDNLTKAERGGLSELDKAGFIKRQLVETRQITKHVAQILDSRMNTKYDENDKLIREVKVITLKSKLVSDFRKDFQFYKVREINNYHHAHDAYLNAVVGTALIKKYPKLESEFVYGDYKVYDVRKMIAKSEQEIGKATAKYFFYSNIMNFFKTEITLANGEIRKRPLIETNGETGEIVWDKGRDFATVRKVLSMPQVNIVKKTEVQTGGFSKESILPKRNSDKLIARKKDWDPKKYGGFDSPTVAYSVLVVAKVEKGKSKKLKSVKELLGITIMERSSFEKNPIDFLEAKGYKEVKKDLIIKLPKYSLFELENGRKRMLASAGELQKGNELALPSKYVNFLYLASHYEKLKGSPEDNEQKQLFVEQHKHYLDEIIEQISEFSKRVILADANLDKVLSAYNKHRDKPIREQAENIIHLFTLTNLGAPAAFKYFDTTIDRKRYTSTKEVLDATLIHQSITGLYETRIDLSQLGGDGGEAAAKPAPGGSGGTLQLDDEYRLYSPLVKPDQNIQFWLEQFPQAWAETAGMGLAKQVPPQVIQLKASATPVSVRQYPLSKEAQEGIRPHVQRLIQQGILVPVQSPWNTPLLPVRKPGTNDYRPVQDLREVNKRVQDIHPTVPNPYNLLCALPPQRSWYTVLDLKDAFFCLRLHPTSQPLFAFEWRDPGTGRTGQLTWTRLPQGFKNSPTIFNEALHRDLANFRIQHPQVTLLQYVDDLLLAGATKQDCLEGTKALLLELSDLGYRASAKKAQICRREVTYLGYSLRDGQRWLTEARKKTVVQIPAPTTAKQVREFLGTAGFCRLWIPGFATLAAPLYPLTKPKGEFSWAPEHQKAFDAIKKALLSAPALALPDVTKPFTLYVDERKGVARGVLTQTLGPWRRPVAYLSKKLDPVASGWPVCLKAIAAVAILVKDADKLTLGQNITVIAPHALENIVRQPPDRWMTNARMTHYQSLLLTERVTFAPPAALNPATLLPEETDEPVTHDCHQLLIEETGVRKDLTDIPLTGEVLTWFTDGSSYVVEGKRMAGAAVVDGTRTIWASSLPEGTSAQKAELMALTQALRLAEGKSINIYTDSRYAFATAHVHGAIYKQRGWLTSAGREIKNKEEILSLLEALHLPKRLAIIHCPGHQKAKDPISRGNQMADRVAKQAAQGVNLLAGKRTADGSEFEKRTADGSEFESPKKKAKVE

SEQ ID NO: 169-172 - skipped (4 entries)

SEQ ID NO: 173 - protein, 2088 aa, synthetic construct
MPAAKRVKLDGGDKKYSIGLDIGTNSVGWAVITDEYKVPSKKFKVLGNTDRHSIKKNLIGALLFDSGETAEATRLKRTARRRYTRRKNRICYLQEIFSNEMAKVDDSFFHRLEESFLVEEDKKHERHPIFGNIVDEVAYHEKYPTIYHLRKKLVDSTDKADLRLIYLALAHMIKFRGHFLIEGDLNPDNSDVDKLFIQLVQTYNQLFEENPINASGVDAKAILSARLSKSRRLENLIAQLPGEKKNGLFGNLIALSLGLTPNFKSNFDLAEDAKLQLSKDTYDDDLDNLLAQIGDQYADLFLAAKNLSDAILLSDILRVNTEITKAPLSASMIKRYDEHHQDLTLLKALVRQQLPEKYKEIFFDQSKNGYAGYIDGGASQEEFYKFIKPILEKMDGTEELLVKLNREDLLRKQRTFDNGSIPHQIHLGELHAILRRQEDFYPFLKDNREKIEKILTFRIPYYVGPLARGNSRFAWMTRKSEETITPWNFEEVVDKGASAQSFIERMTNFDKNLPNEKVLPKHSLLYEYFTVYNELTKVKYVTEGMRKPAFLSGEQKKAIVDLLFKTNRKVTVKQLKEDYFKKIECFDSVEISGVEDRFNASLGTYHDLLKIIKDKDFLDNEENEDILEDIVLTLTLFEDREMIEERLKTYAHLFDDKVMKQLKRRRYTGWGRLSRKLINGIRDKQSGKTILDFLKSDGFANRNFMQLIHDDSLTFKEDIQKAQVSGQGDSLHEHIANLAGSPAIKKGILQTVKVVDELVKVMGRHKPENIVIEMARENQTTQKGQKNSRERMKRIEEGIKELGSQILKEHPVENTQLQNEKLYLYYLQNGRDMYVDQELDINRLSDYDVDHIVPQSFLKDDSIDNKVLTRSDKARGKSDNVPSEEVVKKMKNYWRQLLNAKLITQRKFDNLTKAERGGLSELDKAGFIKRQLVETRQITKHVAQILDSRMNTKYDENDKLIREVKVITLKSKLVSDFRKDFQFYKVREINNYHHAHDAYLNAVVGTALIKKYPKLESEFVYGDYKVYDVRKMIAKSEQEIGKATAKYFFYSNIMNFFKTEITLANGEIRKRPLIETNGETGEIVWDKGRDFATVRKVLSMPQVNIVKKTEVQTGGFSKESILPKRNSDKLIARKKDWDPKKYGGFDSPTVAYSVLVVAKVEKGKSKKLKSVKELLGITIMERSSFEKNPIDFLEAKGYKEVKKDLIIKLPKYSLFELENGRKRMLASAGELQKGNELALPSKYVNFLYLASHYEKLKGSPEDNEQKQLFVEQHKHYLDEIIEQISEFSKRVILADANLDKVLSAYNKHRDKPIREQAENIIHLFTLTNLGAPAAFKYFDTTIDRKRYTSTKEVLDATLIHQSITGLYETRIDLSQLGGDGGPAPGGGGGSGGTLQLDDEYRLYSPLVKPDQNIQFWLEQFPQAWAETAGMGLAKQVPPQVIQLKASATPVSVRQYPLSKEAQEGIRPHVQRLIQQGILVPVQSPWNTPLLPVRKPGTNDYRPVQDLREVNKRVQDIHPTVPNPYNLLCALPPQRSWYTVLDLKDAFFCLRLHPTSQPLFAFEWRDPGTGRTGQLTWTRLPQGFKNSPTIFNEALHRDLANFRIQHPQVTLLQYVDDLLLAGATKQDCLEGTKALLLELSDLGYRASAKKAQICRREVTYLGYSLRDGQRWLTEARKKTVVQIPAPTTAKQVREFLGTAGFCRLWIPGFATLAAPLYPLTKPKGEFSWAPEHQKAFDAIKKALLSAPALALPDVTKPFTLYVDERKGVARGVLTQTLGPWRRPVAYLSKKLDPVASGWPVCLKAIAAVAILVKDADKLTLGQNITVIAPHALENIVRQPPDRWMTNARMTHYQSLLLTERVTFAPPAALNPATLLPEETDEPVTHDCHQLLIEETGVRKDLTDIPLTGEVLTWFTDGSSYVVEGKRMAGAAVVDGTRTIWASSLPEGTSAQKAELMALTQALRLAEGKSINIYTDSRYAFATAHVHGAIYKQRGWLTSAGREIKNKEEILSLLEALHLPKRLAIIHCPGHQKAKDPISRGNQMADRVAKQAAQGVNLLAGKRTADGSEFEKRTADGSEFESPKKKAKVE

SEQ ID NO: 174-189 - skipped (16 entries)

SEQ ID NO: 190 - protein, 2123 aa, synthetic construct; identical to SEQ ID NO: 36

SEQ ID NO: 191 - protein, 2095 aa, synthetic construct
MPAAKRVKLDGGDKKYSIGLDIGTNSVGWAVITDEYKVPSKKFKVLGNTDRHSIKKNLIGALLFDSGETAEATRLKRTARRRYTRRKNRICYLQEIFSNEMAKVDDSFFHRLEESFLVEEDKKHERHPIFGNIVDEVAYHEKYPTIYHLRKKLVDSTDKADLRLIYLALAHMIKFRGHFLIEGDLNPDNSDVDKLFIQLVQTYNQLFEENPINASGVDAKAILSARLSKSRRLENLIAQLPGEKKNGLFGNLIALSLGLTPNFKSNFDLAEDAKLQLSKDTYDDDLDNLLAQIGDQYADLFLAAKNLSDAILLSDILRVNTEITKAPLSASMIKRYDEHHQDLTLLKALVRQQLPEKYKEIFFDQSKNGYAGYIDGGASQEEFYKFIKPILEKMDGTEELLVKLNREDLLRKQRTFDNGSIPHQIHLGELHAILRRQEDFYPFLKDNREKIEKILTFRIPYYVGPLARGNSRFAWMTRKSEETITPWNFEEVVDKGASAQSFIERMTNFDKNLPNEKVLPKHSLLYEYFTVYNELTKVKYVTEGMRKPAFLSGEQKKAIVDLLFKTNRKVTVKQLKEDYFKKIECFDSVEISGVEDRFNASLGTYHDLLKIIKDKDFLDNEENEDILEDIVLTLTLFEDREMIEERLKTYAHLFDDKVMKQLKRRRYTGWGRLSRKLINGIRDKQSGKTILDFLKSDGFANRNFMQLIHDDSLTFKEDIQKAQVSGQGDSLHEHIANLAGSPAIKKGILQTVKVVDELVKVMGRHKPENIVIEMARENQTTQKGQKNSRERMKRIEEGIKELGSQILKEHPVENTQLQNEKLYLYYLQNGRDMYVDQELDINRLSDYDVDHIVPQSFLKDDSIDNKVLTRSDKARGKSDNVPSEEVVKKMKNYWRQLLNAKLITQRKFDNLTKAERGGLSELDKAGFIKRQLVETRQITKHVAQILDSRMNTKYDENDKLIREVKVITLKSKLVSDFRKDFQFYKVREINNYHHAHDAYLNAVVGTALIKKYPKLESEFVYGDYKVYDVRKMIAKSEQEIGKATAKYFFYSNIMNFFKTEITLANGEIRKRPLIETNGETGEIVWDKGRDFATVRKVLSMPQVNIVKKTEVQTGGFSKESILPKRNSDKLIARKKDWDPKKYGGFDSPTVAYSVLVVAKVEKGKSKKLKSVKELLGITIMERSSFEKNPIDFLEAKGYKEVKKDLIIKLPKYSLFELENGRKRMLASAGELQKGNELALPSKYVNFLYLASHYEKLKGSPEDNEQKQLFVEQHKHYLDEIIEQISEFSKRVILADANLDKVLSAYNKHRDKPIREQAENIIHLFTLTNLGAPAAFKYFDTTIDRKRYTSTKEVLDATLIHQSITGLYETRIDLSQLGGDGGGGSGGSGGSGGSGGSGGSGGLDDEYRLYSPLVKPDQNIQFWLEQFPQAWAETAGMGLAKQVPPQVIQLKASATPVSVRQYPLSKEAQEGIRPHVQRLIQQGILVPVQSPWNTPLLPVRKPGTNDYRPVQDLREVNKRVQDIHPTVPNPYNLLCALPPQRSWYTVLDLKDAFFCLRLHPTSQPLFAFEWRDPGTGRTGQLTWTRLPQGFKNSPTIFNEALHRDLANFRIQHPQVTLLQYVDDLLLAGATKQDCLEGTKALLLELSDLGYRASAKKAQICRREVTYLGYSLRDGQRWLTEARKKTVVQIPAPTTAKQVREFLGKAGFCRLFIPGFATLAAPLYPLTKPKGEFSWAPEHQKAFDAIKKALLSAPALALPDVTKPFTLYVDERKGVARGVLTQTLGPWRRPVAYLSKKLDPVASGWPVCLKAIAAVAILVKDADKLTLGQNITVIAPHALENIVRQPPDRWMTNARMTHYQSLLLTERVTFAPPAALNPATLLPEETDEPVTHDCHQLLIEETGVRKDLTDIPLTGEVLTWFTDGSSYVVEGKRMAGAAVVDGTRTIWASSLPEGTSAQKAELMALTQALRLAEGKSINIYTDSRYAFATAHVHGAIYKQRGWLTSAGREIKNKEEILSLLEALHLPKRLAIIHCPGHQKAKDPISRGNQMADRVAKQAAQGVNLLPAGKRTADGSEFEKRTADGSEFESPKKKAKVE

SEQ ID NO: 192 - protein, 2088 aa, synthetic construct
MPAAKRVKLDGGDKKYSIGLDIGTNSVGWAVITDEYKVPSKKFKVLGNTDRHSIKKNLIGALLFDSGETAEATRLKRTARRRYTRRKNRICYLQEIFSNEMAKVDDSFFHRLEESFLVEEDKKHERHPIFGNIVDEVAYHEKYPTIYHLRKKLVDSTDKADLRLIYLALAHMIKFRGHFLIEGDLNPDNSDVDKLFIQLVQTYNQLFEENPINASGVDAKAILSARLSKSRRLENLIAQLPGEKKNGLFGNLIALSLGLTPNFKSNFDLAEDAKLQLSKDTYDDDLDNLLAQIGDQYADLFLAAKNLSDAILLSDILRVNTEITKAPLSASMIKRYDEHHQDLTLLKALVRQQLPEKYKEIFFDQSKNGYAGYIDGGASQEEFYKFIKPILEKMDGTEELLVKLNREDLLRKQRTFDNGSIPHQIHLGELHAILRRQEDFYPFLKDNREKIEKILTFRIPYYVGPLARGNSRFAWMTRKSEETITPWNFEEVVDKGASAQSFIERMTNFDKNLPNEKVLPKHSLLYEYFTVYNELTKVKYVTEGMRKPAFLSGEQKKAIVDLLFKTNRKVTVKQLKEDYFKKIECFDSVEISGVEDRFNASLGTYHDLLKIIKDKDFLDNEENEDILEDIVLTLTLFEDREMIEERLKTYAHLFDDKVMKQLKRRRYTGWGRLSRKLINGIRDKQSGKTILDFLKSDGFANRNFMQLIHDDSLTFKEDIQKAQVSGQGDSLHEHIANLAGSPAIKKGILQTVKVVDELVKVMGRHKPENIVIEMARENQTTQKGQKNSRERMKRIEEGIKELGSQILKEHPVENTQLQNEKLYLYYLQNGRDMYVDQELDINRLSDYDVDHIVPQSFLKDDSIDNKVLTRSDKARGKSDNVPSEEVVKKMKNYWRQLLNAKLITQRKFDNLTKAERGGLSELDKAGFIKRQLVETRQITKHVAQILDSRMNTKYDENDKLIREVKVITLKSKLVSDFRKDFQFYKVREINNYHHAHDAYLNAVVGTALIKKYPKLESEFVYGDYKVYDVRKMIAKSEQEIGKATAKYFFYSNIMNFFKTEITLANGEIRKRPLIETNGETGEIVWDKGRDFATVRKVLSMPQVNIVKKTEVQTGGFSKESILPKRNSDKLIARKKDWDPKKYGGFDSPTVAYSVLVVAKVEKGKSKKLKSVKELLGITIMERSSFEKNPIDFLEAKGYKEVKKDLIIKLPKYSLFELENGRKRMLASAGELQKGNELALPSKYVNFLYLASHYEKLKGSPEDNEQKQLFVEQHKHYLDEIIEQISEFSKRVILADANLDKVLSAYNKHRDKPIREQAENIIHLFTLTNLGAPAAFKYFDTTIDRKRYTSTKEVLDATLIHQSITGLYETRIDLSQLGGDGGPAPEAAAKGGGGGLDDEYRLYSPLVKPDQNIQFWLEQFPQAWAETAGMGLAKQVPPQVIQLKASATPVSVRQYPLSKEAQEGIRPHVQRLIQQGILVPVQSPWNTPLLPVRKPGTNDYRPVQDLREVNKRVQDIHPTVPNPYNLLCALPPQRSWYTVLDLKDAFFCLRLHPTSQPLFAFEWRDPGTGRTGQLTWTRLPQGFKNSPTIFNEALHRDLANFRIQHPQVTLLQYVDDLLLAGATKQDCLEGTKALLLELSDLGYRASAKKAQICRREVTYLGYSLRDGQRWLTEARKKTVVQIPAPTTAKQVREFLGKAGFCRLFIPGFATLAAPLYPLTKPKGEFSWAPEHQKAFDAIKKALLSAPALALPDVTKPFTLYVDERKGVARGVLTQTLGPWRRPVAYLSKKLDPVASGWPVCLKAIAAVAILVKDADKLTLGQNITVIAPHALENIVRQPPDRWMTNARMTHYQSLLLTERVTFAPPAALNPATLLPEETDEPVTHDCHQLLIEETGVRKDLTDIPLTGEVLTWFTDGSSYVVEGKRMAGAAVVDGTRTIWASSLPEGTSAQKAELMALTQALRLAEGKSINIYTDSRYAFATAHVHGAIYKQRGWLTSAGREIKNKEEILSLLEALHLPKRLAIIHCPGHQKAKDPISRGNQMADRVAKQAAQGVNLLPAGKRTADGSEFEKRTADGSEFESPKKKAKVE

SEQ ID NO: 193 - protein, 2107 aa, synthetic construct
MPAAKRVKLDGGDKKYSIGLDIGTNSVGWAVITDEYKVPSKKFKVLGNTDRHSIKKNLIGALLFDSGETAEATRLKRTARRRYTRRKNRICYLQEIFSNEMAKVDDSFFHRLEESFLVEEDKKHERHPIFGNIVDEVAYHEKYPTIYHLRKKLVDSTDKADLRLIYLALAHMIKFRGHFLIEGDLNPDNSDVDKLFIQLVQTYNQLFEENPINASGVDAKAILSARLSKSRRLENLIAQLPGEKKNGLFGNLIALSLGLTPNFKSNFDLAEDAKLQLSKDTYDDDLDNLLAQIGDQYADLFLAAKNLSDAILLSDILRVNTEITKAPLSASMIKRYDEHHQDLTLLKALVRQQLPEKYKEIFFDQSKNGYAGYIDGGASQEEFYKFIKPILEKMDGTEELLVKLNREDLLRKQRTFDNGSIPHQIHLGELHAILRRQEDFYPFLKDNREKIEKILTFRIPYYVGPLARGNSRFAWMTRKSEETITPWNFEEVVDKGASAQSFIERMTNFDKNLPNEKVLPKHSLLYEYFTVYNELTKVKYVTEGMRKPAFLSGEQKKAIVDLLFKTNRKVTVKQLKEDYFKKIECFDSVEISGVEDRFNASLGTYHDLLKIIKDKDFLDNEENEDILEDIVLTLTLFEDREMIEERLKTYAHLFDDKVMKQLKRRRYTGWGRLSRKLINGIRDKQSGKTILDFLKSDGFANRNFMQLIHDDSLTFKEDIQKAQVSGQGDSLHEHIANLAGSPAIKKGILQTVKVVDELVKVMGRHKPENIVIEMARENQTTQKGQKNSRERMKRIEEGIKELGSQILKEHPVENTQLQNEKLYLYYLQNGRDMYVDQELDINRLSDYDVDHIVPQSFLKDDSIDNKVLTRSDKARGKSDNVPSEEVVKKMKNYWRQLLNAKLITQRKFDNLTKAERGGLSELDKAGFIKRQLVETRQITKHVAQILDSRMNTKYDENDKLIREVKVITLKSKLVSDFRKDFQFYKVREINNYHHAHDAYLNAVVGTALIKKYPKLESEFVYGDYKVYDVRKMIAKSEQEIGKATAKYFFYSNIMNFFKTEITLANGEIRKRPLIETNGETGEIVWDKGRDFATVRKVLSMPQVNIVKKTEVQTGGFSKESILPKRNSDKLIARKKDWDPKKYGGFDSPTVAYSVLVVAKVEKGKSKKLKSVKELLGITIMERSSFEKNPIDFLEAKGYKEVKKDLIIKLPKYSLFELENGRKRMLASAGELQKGNELALPSKYVNFLYLASHYEKLKGSPEDNEQKQLFVEQHKHYLDEIIEQISEFSKRVILADANLDKVLSAYNKHRDKPIREQAENIIHLFTLTNLGAPAAFKYFDTTIDRKRYTSTKEVLDATLIHQSITGLYETRIDLSQLGGDGGEAAAKEAAAKEAAAKEAAAKEAAAKEAAAKGGLDDEYRLYSPLVKPDQNIQFWLEQFPQAWAETAGMGLAKQVPPQVIQLKASATPVSVRQYPLSKEAQEGIRPHVQRLIQQGILVPVQSPWNTPLLPVRKPGTNDYRPVQDLREVNKRVQDIHPTVPNPYNLLCALPPQRSWYTVLDLKDAFFCLRLHPTSQPLFAFEWRDPGTGRTGQLTWTRLPQGFKNSPTIFNEALHRDLANFRIQHPQVTLLQYVDDLLLAGATKQDCLEGTKALLLELSDLGYRASAKKAQICRREVTYLGYSLRDGQRWLTEARKKTVVQIPAPTTAKQVREFLGKAGFCRLFIPGFATLAAPLYPLTKPKGEFSWAPEHQKAFDAIKKALLSAPALALPDVTKPFTLYVDERKGVARGVLTQTLGPWRRPVAYLSKKLDPVASGWPVCLKAIAAVAILVKDADKLTLGQNITVIAPHALENIVRQPPDRWMTNARMTHYQSLLLTERVTFAPPAALNPATLLPEETDEPVTHDCHQLLIEETGVRKDLTDIPLTGEVLTWFTDGSSYVVEGKRMAGAAVVDGTRTIWASSLPEGTSAQKAELMALTQALRLAEGKSINIYTDSRYAFATAHVHGAIYKQRGWLTSAGREIKNKEEILSLLEALHLPKRLAIIHCPGHQKAKDPISRGNQMADRVAKQAAQGVNLLPAGKRTADGSEFEKRTADGSEFESPKKKAKVE

SEQ ID NO: 194 - skipped

SEQ ID NO: 195 - protein, 2088 aa, synthetic construct; identical to SEQ ID NO: 35

SEQ ID NO: 196 - protein, 2093 aa, synthetic construct; identical to SEQ ID NO: 90

SEQ ID NO: 197-198 - skipped (2 entries)

SEQ ID NO: 199 - protein, 2088 aa, synthetic construct; identical to SEQ ID NO: 40

SEQ ID NO: 200-201 - skipped (2 entries)

SEQ ID NO: 202 - protein, 2092 aa, synthetic construct
MPAAKRVKLDGGDKKYSIGLDIGTNSVGWAVITDEYKVPSKKFKVLGNTDRHSIKKNLIGALLFDSGETAEATRLKRTARRRYTRRKNRICYLQEIFSNEMAKVDDSFFHRLEESFLVEEDKKHERHPIFGNIVDEVAYHEKYPTIYHLRKKLVDSTDKADLRLIYLALAHMIKFRGHFLIEGDLNPDNSDVDKLFIQLVQTYNQLFEENPINASGVDAKAILSARLSKSRRLENLIAQLPGEKKNGLFGNLIALSLGLTPNFKSNFDLAEDAKLQLSKDTYDDDLDNLLAQIGDQYADLFLAAKNLSDAILLSDILRVNTEITKAPLSASMIKRYDEHHQDLTLLKALVRQQLPEKYKEIFFDQSKNGYAGYIDGGASQEEFYKFIKPILEKMDGTEELLVKLNREDLLRKQRTFDNGSIPHQIHLGELHAILRRQEDFYPFLKDNREKIEKILTFRIPYYVGPLARGNSRFAWMTRKSEETITPWNFEEVVDKGASAQSFIERMTNFDKNLPNEKVLPKHSLLYEYFTVYNELTKVKYVTEGMRKPAFLSGEQKKAIVDLLFKTNRKVTVKQLKEDYFKKIECFDSVEISGVEDRFNASLGTYHDLLKIIKDKDFLDNEENEDILEDIVLTLTLFEDREMIEERLKTYAHLFDDKVMKQLKRRRYTGWGRLSRKLINGIRDKQSGKTILDFLKSDGFANRNFMQLIHDDSLTFKEDIQKAQVSGQGDSLHEHIANLAGSPAIKKGILQTVKVVDELVKVMGRHKPENIVIEMARENQTTQKGQKNSRERMKRIEEGIKELGSQILKEHPVENTQLQNEKLYLYYLQNGRDMYVDQELDINRLSDYDVDHIVPQSFLKDDSIDNKVLTRSDKARGKSDNVPSEEVVKKMKNYWRQLLNAKLITQRKFDNLTKAERGGLSELDKAGFIKRQLVETRQITKHVAQILDSRMNTKYDENDKLIREVKVITLKSKLVSDFRKDFQFYKVREINNYHHAHDAYLNAVVGTALIKKYPKLESEFVYGDYKVYDVRKMIAKSEQEIGKATAKYFFYSNIMNFFKTEITLANGEIRKRPLIETNGETGEIVWDKGRDFATVRKVLSMPQVNIVKKTEVQTGGFSKESILPKRNSDKLIARKKDWDPKKYGGFDSPTVAYSVLVVAKVEKGKSKKLKSVKELLGITIMERSSFEKNPIDFLEAKGYKEVKKDLIIKLPKYSLFELENGRKRMLASAGELQKGNELALPSKYVNFLYLASHYEKLKGSPEDNEQKQLFVEQHKHYLDEIIEQISEFSKRVILADANLDKVLSAYNKHRDKPIREQAENIIHLFTLTNLGAPAAFKYFDTTIDRKRYTSTKEVLDATLIHQSITGLYETRIDLSQLGGDGGGSSGSSGSSGSSGSSGGLDDEYRLYSPLVKPDQNIQFWLEQFPQAWAETAGMGLAKQVPPQVIQLKASATPVSVRQYPLSKEAQEGIRPHVQRLIQQGILVPVQSPWNTPLLPVRKPGTNDYRPVQDLREVNKRVQDIHPTVPNPYNLLCALPPQRSWYTVLDLKDAFFCLRLHPTSQPLFAFEWRDPGTGRTGQLTWTRLPQGFKNSPTIFNEALHRDLANFRIQHPQVTLLQYVDDLLLAGATKQDCLEGTKALLLELSDLGYRASAKKAQICRREVTYLGYSLRDGQRWLTEARKKTVVQIPAPTTAKQVREFLGKAGFCRLFIPGFATLAAPLYPLTKPKGEFSWAPEHQKAFDAIKKALLSAPALALPDVTKPFTLYVDERKGVARGVLTQTLGPWRRPVAYLSKKLDPVASGWPVCLKAIAAVAILVKDADKLTLGQNITVIAPHALENIVRQPPDRWMTNARMTHYQSLLLTERVTFAPPAALNPATLLPEETDEPVTHDCHQLLIEETGVRKDLTDIPLTGEVLTWFTDGSSYVVEGKRMAGAAVVDGTRTIWASSLPEGTSAQKAELMALTQALRLAEGKSINIYTDSRYAFATAHVHGAIYKQRGWLTSAGREIKNKEEILSLLEALHLPKRLAIIHCPGHQKAKDPISRGNQMADRVAKQAAQGVNLLPAGKRTADGSEFEKRTADGSEFESPKKKAKVE

SEQ ID NO: 203-206 - skipped (4 entries)

SEQ ID NO: 207 - protein, 2086 aa, synthetic construct; identical to SEQ ID NO: 43

SEQ ID NO: 208 - protein, 2086 aa, synthetic construct
MPAAKRVKLDGGDKKYSIGLDIGTNSVGWAVITDEYKVPSKKFKVLGNTDRHSIKKNLIGALLFDSGETAEATRLKRTARRRYTRRKNRICYLQEIFSNEMAKVDDSFFHRLEESFLVEEDKKHERHPIFGNIVDEVAYHEKYPTIYHLRKKLVDSTDKADLRLIYLALAHMIKFRGHFLIEGDLNPDNSDVDKLFIQLVQTYNQLFEENPINASGVDAKAILSARLSKSRRLENLIAQLPGEKKNGLFGNLIALSLGLTPNFKSNFDLAEDAKLQLSKDTYDDDLDNLLAQIGDQYADLFLAAKNLSDAILLSDILRVNTEITKAPLSASMIKRYDEHHQDLTLLKALVRQQLPEKYKEIFFDQSKNGYAGYIDGGASQEEFYKFIKPILEKMDGTEELLVKLNREDLLRKQRTFDNGSIPHQIHLGELHAILRRQEDFYPFLKDNREKIEKILTFRIPYYVGPLARGNSRFAWMTRKSEETITPWNFEEVVDKGASAQSFIERMTNFDKNLPNEKVLPKHSLLYEYFTVYNELTKVKYVTEGMRKPAFLSGEQKKAIVDLLFKTNRKVTVKQLKEDYFKKIECFDSVEISGVEDRFNASLGTYHDLLKIIKDKDFLDNEENEDILEDIVLTLTLFEDREMIEERLKTYAHLFDDKVMKQLKRRRYTGWGRLSRKLINGIRDKQSGKTILDFLKSDGFANRNFMQLIHDDSLTFKEDIQKAQVSGQGDSLHEHIANLAGSPAIKKGILQTVKVVDELVKVMGRHKPENIVIEMARENQTTQKGQKNSRERMKRIEEGIKELGSQILKEHPVENTQLQNEKLYLYYLQNGRDMYVDQELDINRLSDYDVDHIVPQSFLKDDSIDNKVLTRSDKARGKSDNVPSEEVVKKMKNYWRQLLNAKLITQRKFDNLTKAERGGLSELDKAGFIKRQLVETRQITKHVAQILDSRMNTKYDENDKLIREVKVITLKSKLVSDFRKDFQFYKVREINNYHHAHDAYLNAVVGTALIKKYPKLESEFVYGDYKVYDVRKMIAKSEQEIGKATAKYFFYSNIMNFFKTEITLANGEIRKRPLIETNGETGEIVWDKGRDFATVRKVLSMPQVNIVKKTEVQTGGFSKESILPKRNSDKLIARKKDWDPKKYGGFDSPTVAYSVLVVAKVEKGKSKKLKSVKELLGITIMERSSFEKNPIDFLEAKGYKEVKKDLIIKLPKYSLFELENGRKRMLASAGELQKGNELALPSKYVNFLYLASHYEKLKGSPEDNEQKQLFVEQHKHYLDEIIEQISEFSKRVILADANLDKVLSAYNKHRDKPIREQAENIIHLFTLTNLGAPAAFKYFDTTIDRKRYTSTKEVLDATLIHQSITGLYETRIDLSQLGGDGGGSSGSSGSSGGLDDEYRLYSPLVKPDQNIQFWLEQFPQAWAETAGMGLAKQVPPQVIQLKASATPVSVRQYPLSKEAQEGIRPHVQRLIQQGILVPVQSPWNTPLLPVRKPGTNDYRPVQDLREVNKRVQDIHPTVPNPYNLLCALPPQRSWYTVLDLKDAFFCLRLHPTSQPLFAFEWRDPGTGRTGQLTWTRLPQGFKNSPTIFNEALHRDLANFRIQHPQVTLLQYVDDLLLAGATKQDCLEGTKALLLELSDLGYRASAKKAQICRREVTYLGYSLRDGQRWLTEARKKTVVQIPAPTTAKQVREFLGKAGFCRLFIPGFATLAAPLYPLTKPKGEFSWAPEHQKAFDAIKKALLSAPALALPDVTKPFTLYVDERKGVARGVLTQTLGPWRRPVAYLSKKLDPVASGWPVCLKAIAAVAILVKDADKLTLGQNITVIAPHALENIVRQPPDRWMTNARMTHYQSLLLTERVTFAPPAALNPATLLPEETDEPVTHDCHQLLIEETGVRKDLTDIPLTGEVLTWFTDGSSYVVEGKRMAGAAVVDGTRTIWASSLPEGTSAQKAELMALTQALRLAEGKSINIYTDSRYAFATAHVHGAIYKQRGWLTSAGREIKNKEEILSLLEALHLPKRLAIIHCPGHQKAKDPISRGNQMADRVAKQAAQGVNLLPAGKRTADGSEFEKRTADGSEFESPKKKAKVE

SEQ ID NO: 209-211 - skipped (3 entries)

SEQ ID NO: 212 - protein, 2083 aa, synthetic construct
MPAAKRVKLDGGDKKYSIGLDIGTNSVGWAVITDEYKVPSKKFKVLGNTDRHSIKKNLIGALLFDSGETAEATRLKRTARRRYTRRKNRICYLQEIFSNEMAKVDDSFFHRLEESFLVEEDKKHERHPIFGNIVDEVAYHEKYPTIYHLRKKLVDSTDKADLRLIYLALAHMIKFRGHFLIEGDLNPDNSDVDKLFIQLVQTYNQLFEENPINASGVDAKAILSARLSKSRRLENLIAQLPGEKKNGLFGNLIALSLGLTPNFKSNFDLAEDAKLQLSKDTYDDDLDNLLAQIGDQYADLFLAAKNLSDAILLSDILRVNTEITKAPLSASMIKRYDEHHQDLTLLKALVRQQLPEKYKEIFFDQSKNGYAGYIDGGASQEEFYKFIKPILEKMDGTEELLVKLNREDLLRKQRTFDNGSIPHQIHLGELHAILRRQEDFYPFLKDNREKIEKILTFRIPYYVGPLARGNSRFAWMTRKSEETITPWNFEEVVDKGASAQSFIERMTNFDKNLPNEKVLPKHSLLYEYFTVYNELTKVKYVTEGMRKPAFLSGEQKKAIVDLLFKTNRKVTVKQLKEDYFKKIECFDSVEISGVEDRFNASLGTYHDLLKIIKDKDFLDNEENEDILEDIVLTLTLFEDREMIEERLKTYAHLFDDKVMKQLKRRRYTGWGRLSRKLINGIRDKQSGKTILDFLKSDGFANRNFMQLIHDDSLTFKEDIQKAQVSGQGDSLHEHIANLAGSPAIKKGILQTVKVVDELVKVMGRHKPENIVIEMARENQTTQKGQKNSRERMKRIEEGIKELGSQILKEHPVENTQLQNEKLYLYYLQNGRDMYVDQELDINRLSDYDVDHIVPQSFLKDDSIDNKVLTRSDKARGKSDNVPSEEVVKKMKNYWRQLLNAKLITQRKFDNLTKAERGGLSELDKAGFIKRQLVETRQITKHVAQILDSRMNTKYDENDKLIREVKVITLKSKLVSDFRKDFQFYKVREINNYHHAHDAYLNAVVGTALIKKYPKLESEFVYGDYKVYDVRKMIAKSEQEIGKATAKYFFYSNIMNFFKTEITLANGEIRKRPLIETNGETGEIVWDKGRDFATVRKVLSMPQVNIVKKTEVQTGGFSKESILPKRNSDKLIARKKDWDPKKYGGFDSPTVAYSVLVVAKVEKGKSKKLKSVKELLGITIMERSSFEKNPIDFLEAKGYKEVKKDLIIKLPKYSLFELENGRKRMLASAGELQKGNELALPSKYVNFLYLASHYEKLKGSPEDNEQKQLFVEQHKHYLDEIIEQISEFSKRVILADANLDKVLSAYNKHRDKPIREQAENIIHLFTLTNLGAPAAFKYFDTTIDRKRYTSTKEVLDATLIHQSITGLYETRIDLSQLGGDGGGGSGSSGGLDDEYRLYSPLVKPDQNIQFWLEQFPQAWAETAGMGLAKQVPPQVIQLKASATPVSVRQYPLSKEAQEGIRPHVQRLIQQGILVPVQSPWNTPLLPVRKPGTNDYRPVQDLREVNKRVQDIHPTVPNPYNLLCALPPQRSWYTVLDLKDAFFCLRLHPTSQPLFAFEWRDPGTGRTGQLTWTRLPQGFKNSPTIFNEALHRDLANFRIQHPQVTLLQYVDDLLLAGATKQDCLEGTKALLLELSDLGYRASAKKAQICRREVTYLGYSLRDGQRWLTEARKKTVVQIPAPTTAKQVREFLGKAGFCRLFIPGFATLAAPLYPLTKPKGEFSWAPEHQKAFDAIKKALLSAPALALPDVTKPFTLYVDERKGVARGVLTQTLGPWRRPVAYLSKKLDPVASGWPVCLKAIAAVAILVKDADKLTLGQNITVIAPHALENIVRQPPDRWMTNARMTHYQSLLLTERVTFAPPAALNPATLLPEETDEPVTHDCHQLLIEETGVRKDLTDIPLTGEVLTWFTDGSSYVVEGKRMAGAAVVDGTRTIWASSLPEGTSAQKAELMALTQALRLAEGKSINIYTDSRYAFATAHVHGAIYKQRGWLTSAGREIKNKEEILSLLEALHLPKRLAIIHCPGHQKAKDPISRGNQMADRVAKQAAQGVNLLPAGKRTADGSEFEKRTADGSEFESPKKKAKVE

SEQ ID NO: 213 - protein, 2086 aa, synthetic construct
MPAAKRVKLDGGDKKYSIGLDIGTNSVGWAVITDEYKVPSKKFKVLGNTDRHSIKKNLIGALLFDSGETAEATRLKRTARRRYTRRKNRICYLQEIFSNEMAKVDDSFFHRLEESFLVEEDKKHERHPIFGNIVDEVAYHEKYPTIYHLRKKLVDSTDKADLRLIYLALAHMIKFRGHFLIEGDLNPDNSDVDKLFIQLVQTYNQLFEENPINASGVDAKAILSARLSKSRRLENLIAQLPGEKKNGLFGNLIALSLGLTPNFKSNFDLAEDAKLQLSKDTYDDDLDNLLAQIGDQYADLFLAAKNLSDAILLSDILRVNTEITKAPLSASMIKRYDEHHQDLTLLKALVRQQLPEKYKEIFFDQSKNGYAGYIDGGASQEEFYKFIKPILEKMDGTEELLVKLNREDLLRKQRTFDNGSIPHQIHLGELHAILRRQEDFYPFLKDNREKIEKILTFRIPYYVGPLARGNSRFAWMTRKSEETITPWNFEEVVDKGASAQSFIERMTNFDKNLPNEKVLPKHSLLYEYFTVYNELTKVKYVTEGMRKPAFLSGEQKKAIVDLLFKTNRKVTVKQLKEDYFKKIECFDSVEISGVEDRFNASLGTYHDLLKIIKDKDFLDNEENEDILEDIVLTLTLFEDREMIEERLKTYAHLFDDKVMKQLKRRRYTGWGRLSRKLINGIRDKQSGKTILDFLKSDGFANRNFMQLIHDDSLTFKEDIQKAQVSGQGDSLHEHIANLAGSPAIKKGILQTVKVVDELVKVMGRHKPENIVIEMARENQTTQKGQKNSRERMKRIEEGIKELGSQILKEHPVENTQLQNEKLYLYYLQNGRDMYVDQELDINRLSDYDVDHIVPQSFLKDDSIDNKVLTRSDKARGKSDNVPSEEVVKKMKNYWRQLLNAKLITQRKFDNLTKAERGGLSELDKAGFIKRQLVETRQITKHVAQILDSRMNTKYDENDKLIREVKVITLKSKLVSDFRKDFQFYKVREINNYHHAHDAYLNAVVGTALIKKYPKLESEFVYGDYKVYDVRKMIAKSEQEIGKATAKYFFYSNIMNFFKTEITLANGEIRKRPLIETNGETGEIVWDKGRDFATVRKVLSMPQVNIVKKTEVQTGGFSKESILPKRNSDKLIARKKDWDPKKYGGFDSPTVAYSVLVVAKVEKGKSKKLKSVKELLGITIMERSSFEKNPIDFLEAKGYKEVKKDLIIKLPKYSLFELENGRKRMLASAGELQKGNELALPSKYVNFLYLASHYEKLKGSPEDNEQKQLFVEQHKHYLDEIIEQISEFSKRVILADANLDKVLSAYNKHRDKPIREQAENIIHLFTLTNLGAPAAFKYFDTTIDRKRYTSTKEVLDATLIHQSITGLYETRIDLSQLGGDGGGGSGGGPAPGGLDDEYRLYSPLVKPDQNIQFWLEQFPQAWAETAGMGLAKQVPPQVIQLKASATPVSVRQYPLSKEAQEGIRPHVQRLIQQGILVPVQSPWNTPLLPVRKPGTNDYRPVQDLREVNKRVQDIHPTVPNPYNLLCALPPQRSWYTVLDLKDAFFCLRLHPTSQPLFAFEWRDPGTGRTGQLTWTRLPQGFKNSPTIFNEALHRDLANFRIQHPQVTLLQYVDDLLLAGATKQDCLEGTKALLLELSDLGYRASAKKAQICRREVTYLGYSLRDGQRWLTEARKKTVVQIPAPTTAKQVREFLGKAGFCRLFIPGFATLAAPLYPLTKPKGEFSWAPEHQKAFDAIKKALLSAPALALPDVTKPFTLYVDERKGVARGVLTQTLGPWRRPVAYLSKKLDPVASGWPVCLKAIAAVAILVKDADKLTLGQNITVIAPHALENIVRQPPDRWMTNARMTHYQSLLLTERVTFAPPAALNPATLLPEETDEPVTHDCHQLLIEETGVRKDLTDIPLTGEVLTWFTDGSSYVVEGKRMAGAAVVDGTRTIWASSLPEGTSAQKAELMALTQALRLAEGKSINIYTDSRYAFATAHVHGAIYKQRGWLTSAGREIKNKEEILSLLEALHLPKRLAIIHCPGHQKAKDPISRGNQMADRVAKQAAQGVNLLPAGKRTADGSEFEKRTADGSEFESPKKKAKVE

SEQ ID NO: 214-215 - skipped (2 entries)

SEQ ID NO: 216 - protein, 2092 aa, synthetic construct; identical to SEQ ID NO: 51

SEQ ID NO: 217 - protein, 2088 aa, synthetic construct
MPAAKRVKLDGGDKKYSIGLDIGTNSVGWAVITDEYKVPSKKFKVLGNTDRHSIKKNLIGALLFDSGETAEATRLKRTARRRYTRRKNRICYLQEIFSNEMAKVDDSFFHRLEESFLVEEDKKHERHPIFGNIVDEVAYHEKYPTIYHLRKKLVDSTDKADLRLIYLALAHMIKFRGHFLIEGDLNPDNSDVDKLFIQLVQTYNQLFEENPINASGVDAKAILSARLSKSRRLENLIAQLPGEKKNGLFGNLIALSLGLTPNFKSNFDLAEDAKLQLSKDTYDDDLDNLLAQIGDQYADLFLAAKNLSDAILLSDILRVNTEITKAPLSASMIKRYDEHHQDLTLLKALVRQQLPEKYKEIFFDQSKNGYAGYIDGGASQEEFYKFIKPILEKMDGTEELLVKLNREDLLRKQRTFDNGSIPHQIHLGELHAILRRQEDFYPFLKDNREKIEKILTFRIPYYVGPLARGNSRFAWMTRKSEETITPWNFEEVVDKGASAQSFIERMTNFDKNLPNEKVLPKHSLLYEYFTVYNELTKVKYVTEGMRKPAFLSGEQKKAIVDLLFKTNRKVTVKQLKEDYFKKIECFDSVEISGVEDRFNASLGTYHDLLKIIKDKDFLDNEENEDILEDIVLTLTLFEDREMIEERLKTYAHLFDDKVMKQLKRRRYTGWGRLSRKLINGIRDKQSGKTILDFLKSDGFANRNFMQLIHDDSLTFKEDIQKAQVSGQGDSLHEHIANLAGSPAIKKGILQTVKVVDELVKVMGRHKPENIVIEMARENQTTQKGQKNSRERMKRIEEGIKELGSQILKEHPVENTQLQNEKLYLYYLQNGRDMYVDQELDINRLSDYDVDHIVPQSFLKDDSIDNKVLTRSDKARGKSDNVPSEEVVKKMKNYWRQLLNAKLITQRKFDNLTKAERGGLSELDKAGFIKRQLVETRQITKHVAQILDSRMNTKYDENDKLIREVKVITLKSKLVSDFRKDFQFYKVREINNYHHAHDAYLNAVVGTALIKKYPKLESEFVYGDYKVYDVRKMIAKSEQEIGKATAKYFFYSNIMNFFKTEITLANGEIRKRPLIETNGETGEIVWDKGRDFATVRKVLSMPQVNIVKKTEVQTGGFSKESILPKRNSDKLIARKKDWDPKKYGGFDSPTVAYSVLVVAKVEKGKSKKLKSVKELLGITIMERSSFEKNPIDFLEAKGYKEVKKDLIIKLPKYSLFELENGRKRMLASAGELQKGNELALPSKYVNFLYLASHYEKLKGSPEDNEQKQLFVEQHKHYLDEIIEQISEFSKRVILADANLDKVLSAYNKHRDKPIREQAENIIHLFTLTNLGAPAAFKYFDTTIDRKRYTSTKEVLDATLIHQSITGLYETRIDLSQLGGDGGPAPGGSEAAAKGGLDDEYRLYSPLVKPDQNIQFWLEQFPQAWAETAGMGLAKQVPPQVIQLKASATPVSVRQYPLSKEAQEGIRPHVQRLIQQGILVPVQSPWNTPLLPVRKPGTNDYRPVQDLREVNKRVQDIHPTVPNPYNLLCALPPQRSWYTVLDLKDAFFCLRLHPTSQPLFAFEWRDPGTGRTGQLTWTRLPQGFKNSPTIFNEALHRDLANFRIQHPQVTLLQYVDDLLLAGATKQDCLEGTKALLLELSDLGYRASAKKAQICRREVTYLGYSLRDGQRWLTEARKKTVVQIPAPTTAKQVREFLGKAGFCRLFIPGFATLAAPLYPLTKPKGEFSWAPEHQKAFDAIKKALLSAPALALPDVTKPFTLYVDERKGVARGVLTQTLGPWRRPVAYLSKKLDPVASGWPVCLKAIAAVAILVKDADKLTLGQNITVIAPHALENIVRQPPDRWMTNARMTHYQSLLLTERVTFAPPAALNPATLLPEETDEPVTHDCHQLLIEETGVRKDLTDIPLTGEVLTWFTDGSSYVVEGKRMAGAAVVDGTRTIWASSLPEGTSAQKAELMALTQALRLAEGKSINIYTDSRYAFATAHVHGAIYKQRGWLTSAGREIKNKEEILSLLEALHLPKRLAIIHCPGHQKAKDPISRGNQMADRVAKQAAQGVNLLPAGKRTADGSEFEKRTADGSEFESPKKKAKVE

SEQ ID NO: 218 - skipped

SEQ ID NO: 219 - protein, 2085 aa, synthetic construct; identical to SEQ ID NO: 48

SEQ ID NO: 220-222 - skipped (3 entries)

SEQ ID NO: 223 - protein, 2083 aa, synthetic construct; identical to SEQ ID NO: 47

SEQ ID NO: 224 - protein, 2088 aa, synthetic construct
MPAAKRVKLDGGDKKYSIGLDIGTNSVGWAVITDEYKVPSKKFKVLGNTDRHSIKKNLIGALLFDSGETAEATRLKRTARRRYTRRKNRICYLQEIFSNEMAKVDDSFFHRLEESFLVEEDKKHERHPIFGNIVDEVAYHEKYPTIYHLRKKLVDSTDKADLRLIYLALAHMIKFRGHFLIEGDLNPDNSDVDKLFIQLVQTYNQLFEENPINASGVDAKAILSARLSKSRRLENLIAQLPGEKKNGLFGNLIALSLGLTPNFKSNFDLAEDAKLQLSKDTYDDDLDNLLAQIGDQYADLFLAAKNLSDAILLSDILRVNTEITKAPLSASMIKRYDEHHQDLTLLKALVRQQLPEKYKEIFFDQSKNGYAGYIDGGASQEEFYKFIKPILEKMDGTEELLVKLNREDLLRKQRTFDNGSIPHQIHLGELHAILRRQEDFYPFLKDNREKIEKILTFRIPYYVGPLARGNSRFAWMTRKSEETITPWNFEEVVDKGASAQSFIERMTNFDKNLPNEKVLPKHSLLYEYFTVYNELTKVKYVTEGMRKPAFLSGEQKKAIVDLLFKTNRKVTVKQLKEDYFKKIECFDSVEISGVEDRFNASLGTYHDLLKIIKDKDFLDNEENEDILEDIVLTLTLFEDREMIEERLKTYAHLFDDKVMKQLKRRRYTGWGRLSRKLINGIRDKQSGKTILDFLKSDGFANRNFMQLIHDDSLTFKEDIQKAQVSGQGDSLHEHIANLAGSPAIKKGILQTVKVVDELVKVMGRHKPENIVIEMARENQTTQKGQKNSRERMKRIEEGIKELGSQILKEHPVENTQLQNEKLYLYYLQNGRDMYVDQELDINRLSDYDVDHIVPQSFLKDDSIDNKVLTRSDKARGKSDNVPSEEVVKKMKNYWRQLLNAKLITQRKFDNLTKAERGGLSELDKAGFIKRQLVETRQITKHVAQILDSRMNTKYDENDKLIREVKVITLKSKLVSDFRKDFQFYKVREINNYHHAHDAYLNAVVGTALIKKYPKLESEFVYGDYKVYDVRKMIAKSEQEIGKATAKYFFYSNIMNFFKTEITLANGEIRKRPLIETNGETGEIVWDKGRDFATVRKVLSMPQVNIVKKTEVQTGGFSKESILPKRNSDKLIARKKDWDPKKYGGFDSPTVAYSVLVVAKVEKGKSKKLKSVKELLGITIMERSSFEKNPIDFLEAKGYKEVKKDLIIKLPKYSLFELENGRKRMLASAGELQKGNELALPSKYVNFLYLASHYEKLKGSPEDNEQKQLFVEQHKHYLDEIIEQISEFSKRVILADANLDKVLSAYNKHRDKPIREQAENIIHLFTLTNLGAPAAFKYFDTTIDRKRYTSTKEVLDATLIHQSITGLYETRIDLSQLGGDGGEAAAKPAPGSSGGLDDEYRLYSPLVKPDQNIQFWLEQFPQAWAETAGMGLAKQVPPQVIQLKASATPVSVRQYPLSKEAQEGIRPHVQRLIQQGILVPVQSPWNTPLLPVRKPGTNDYRPVQDLREVNKRVQDIHPTVPNPYNLLCALPPQRSWYTVLDLKDAFFCLRLHPTSQPLFAFEWRDPGTGRTGQLTWTRLPQGFKNSPTIFNEALHRDLANFRIQHPQVTLLQYVDDLLLAGATKQDCLEGTKALLLELSDLGYRASAKKAQICRREVTYLGYSLRDGQRWLTEARKKTVVQIPAPTTAKQVREFLGKAGFCRLFIPGFATLAAPLYPLTKPKGEFSWAPEHQKAFDAIKKALLSAPALALPDVTKPFTLYVDERKGVARGVLTQTLGPWRRPVAYLSKKLDPVASGWPVCLKAIAAVAILVKDADKLTLGQNITVIAPHALENIVRQPPDRWMTNARMTHYQSLLLTERVTFAPPAALNPATLLPEETDEPVTHDCHQLLIEETGVRKDLTDIPLTGEVLTWFTDGSSYVVEGKRMAGAAVVDGTRTIWASSLPEGTSAQKAELMALTQALRLAEGKSINIYTDSRYAFATAHVHGAIYKQRGWLTSAGREIKNKEEILSLLEALHLPKRLAIIHCPGHQKAKDPISRGNQMADRVAKQAAQGVNLLPAGKRTADGSEFEKRTADGSEFESPKKKAKVE

SEQ ID NO: 225 - protein, 2088 aa, synthetic construct
MPAAKRVKLDGGDKKYSIGLDIGTNSVGWAVITDEYKVPSKKFKVLGNTDRHSIKKNLIGALLFDSGETAEATRLKRTARRRYTRRKNRICYLQEIFSNEMAKVDDSFFHRLEESFLVEEDKKHERHPIFGNIVDEVAYHEKYPTIYHLRKKLVDSTDKADLRLIYLALAHMIKFRGHFLIEGDLNPDNSDVDKLFIQLVQTYNQLFEENPINASGVDAKAILSARLSKSRRLENLIAQLPGEKKNGLFGNLIALSLGLTPNFKSNFDLAEDAKLQLSKDTYDDDLDNLLAQIGDQYADLFLAAKNLSDAILLSDILRVNTEITKAPLSASMIKRYDEHHQDLTLLKALVRQQLPEKYKEIFFDQSKNGYAGYIDGGASQEEFYKFIKPILEKMDGTEELLVKLNREDLLRKQRTFDNGSIPHQIHLGELHAILRRQEDFYPFLKDNREKIEKILTFRIPYYVGPLARGNSRFAWMTRKSEETITPWNFEEVVDKGASAQSFIERMTNFDKNLPNEKVLPKHSLLYEYFTVYNELTKVKYVTEGMRKPAFLSGEQKKAIVDLLFKTNRKVTVKQLKEDYFKKIECFDSVEISGVEDRFNASLGTYHDLLKIIKDKDFLDNEENEDILEDIVLTLTLFEDREMIEERLKTYAHLFDDKVMKQLKRRRYTGWGRLSRKLINGIRDKQSGKTILDFLKSDGFANRNFMQLIHDDSLTFKEDIQKAQVSGQGDSLHEHIANLAGSPAIKKGILQTVKVVDELVKVMGRHKPENIVIEMARENQTTQKGQKNSRERMKRIEEGIKELGSQILKEHPVENTQLQNEKLYLYYLQNGRDMYVDQELDINRLSDYDVDHIVPQSFLKDDSIDNKVLTRSDKARGKSDNVPSEEVVKKMKNYWRQLLNAKLITQRKFDNLTKAERGGLSELDKAGFIKRQLVETRQITKHVAQILDSRMNTKYDENDKLIREVKVITLKSKLVSDFRKDFQFYKVREINNYHHAHDAYLNAVVGTALIKKYPKLESEFVYGDYKVYDVRKMIAKSEQEIGKATAKYFFYSNIMNFFKTEITLANGEIRKRPLIETNGETGEIVWDKGRDFATVRKVLSMPQVNIVKKTEVQTGGFSKESILPKRNSDKLIARKKDWDPKKYGGFDSPTVAYSVLVVAKVEKGKSKKLKSVKELLGITIMERSSFEKNPIDFLEAKGYKEVKKDLIIKLPKYSLFELENGRKRMLASAGELQKGNELALPSKYVNFLYLASHYEKLKGSPEDNEQKQLFVEQHKHYLDEIIEQISEFSKRVILADANLDKVLSAYNKHRDKPIREQAENIIHLFTLTNLGAPAAFKYFDTTIDRKRYTSTKEVLDATLIHQSITGLYETRIDLSQLGGDGGPAPGSSEAAAKGGLDDEYRLYSPLVKPDQNIQFWLEQFPQAWAETAGMGLAKQVPPQVIQLKASATPVSVRQYPLSKEAQEGIRPHVQRLIQQGILVPVQSPWNTPLLPVRKPGTNDYRPVQDLREVNKRVQDIHPTVPNPYNLLCALPPQRSWYTVLDLKDAFFCLRLHPTSQPLFAFEWRDPGTGRTGQLTWTRLPQGFKNSPTIFNEALHRDLANFRIQHPQVTLLQYVDDLLLAGATKQDCLEGTKALLLELSDLGYRASAKKAQICRREVTYLGYSLRDGQRWLTEARKKTVVQIPAPTTAKQVREFLGKAGFCRLFIPGFATLAAPLYPLTKPKGEFSWAPEHQKAFDAIKKALLSAPALALPDVTKPFTLYVDERKGVARGVLTQTLGPWRRPVAYLSKKLDPVASGWPVCLKAIAAVAILVKDADKLTLGQNITVIAPHALENIVRQPPDRWMTNARMTHYQSLLLTERVTFAPPAALNPATLLPEETDEPVTHDCHQLLIEETGVRKDLTDIPLTGEVLTWFTDGSSYVVEGKRMAGAAVVDGTRTIWASSLPEGTSAQKAELMALTQALRLAEGKSINIYTDSRYAFATAHVHGAIYKQRGWLTSAGREIKNKEEILSLLEALHLPKRLAIIHCPGHQKAKDPISRGNQMADRVAKQAAQGVNLLPAGKRTADGSEFEKRTADGSEFESPKKKAKVE

SEQ ID NO: 226-227 - skipped (2 entries)

SEQ ID NO: 228 - protein, 2089 aa, synthetic construct; identical to SEQ ID NO: 41

SEQ ID NO: 229 - protein, 2088 aa, synthetic construct; identical to SEQ ID NO: 65

SEQ ID NO: 230-231 - skipped (2 entries)

SEQ ID NO: 232 - protein, 2102 aa, synthetic construct; identical to SEQ ID NO: 39

SEQ ID NO: 233-234 - skipped (2 entries)

SEQ ID NO: 235 - protein, 2083 aa, synthetic construct
MPAAKRVKLDGGDKKYSIGLDIGTNSVGWAVITDEYKVPSKKFKVLGNTDRHSIKKNLIGALLFDSGETAEATRLKRTARRRYTRRKNRICYLQEIFSNEMAKVDDSFFHRLEESFLVEEDKKHERHPIFGNIVDEVAYHEKYPTIYHLRKKLVDSTDKADLRLIYLALAHMIKFRGHFLIEGDLNPDNSDVDKLFIQLVQTYNQLFEENPINASGVDAKAILSARLSKSRRLENLIAQLPGEKKNGLFGNLIALSLGLTPNFKSNFDLAEDAKLQLSKDTYDDDLDNLLAQIGDQYADLFLAAKNLSDAILLSDILRVNTEITKAPLSASMIKRYDEHHQDLTLLKALVRQQLPEKYKEIFFDQSKNGYAGYIDGGASQEEFYKFIKPILEKMDGTEELLVKLNREDLLRKQRTFDNGSIPHQIHLGELHAILRRQEDFYPFLKDNREKIEKILTFRIPYYVGPLARGNSRFAWMTRKSEETITPWNFEEVVDKGASAQSFIERMTNFDKNLPNEKVLPKHSLLYEYFTVYNELTKVKYVTEGMRKPAFLSGEQKKAIVDLLFKTNRKVTVKQLKEDYFKKIECFDSVEISGVEDRFNASLGTYHDLLKIIKDKDFLDNEENEDILEDIVLTLTLFEDREMIEERLKTYAHLFDDKVMKQLKRRRYTGWGRLSRKLINGIRDKQSGKTILDFLKSDGFANRNFMQLIHDDSLTFKEDIQKAQVSGQGDSLHEHIANLAGSPAIKKGILQTVKVVDELVKVMGRHKPENIVIEMARENQTTQKGQKNSRERMKRIEEGIKELGSQILKEHPVENTQLQNEKLYLYYLQNGRDMYVDQELDINRLSDYDVDHIVPQSFLKDDSIDNKVLTRSDKARGKSDNVPSEEVVKKMKNYWRQLLNAKLITQRKFDNLTKAERGGLSELDKAGFIKRQLVETRQITKHVAQILDSRMNTKYDENDKLIREVKVITLKSKLVSDFRKDFQFYKVREINNYHHAHDAYLNAVVGTALIKKYPKLESEFVYGDYKVYDVRKMIAKSEQEIGKATAKYFFYSNIMNFFKTEITLANGEIRKRPLIETNGETGEIVWDKGRDFATVRKVLSMPQVNIVKKTEVQTGGFSKESILPKRNSDKLIARKKDWDPKKYGGFDSPTVAYSVLVVAKVEKGKSKKLKSVKELLGITIMERSSFEKNPIDFLEAKGYKEVKKDLIIKLPKYSLFELENGRKRMLASAGELQKGNELALPSKYVNFLYLASHYEKLKGSPEDNEQKQLFVEQHKHYLDEIIEQISEFSKRVILADANLDKVLSAYNKHRDKPIREQAENIIHLFTLTNLGAPAAFKYFDTTIDRKRYTSTKEVLDATLIHQSITGLYETRIDLSQLGGDGGGSSGSSGGLDDEYRLYSPLVKPDQNIQFWLEQFPQAWAETAGMGLAKQVPPQVIQLKASATPVSVRQYPLSKEAQEGIRPHVQRLIQQGILVPVQSPWNTPLLPVRKPGTNDYRPVQDLREVNKRVQDIHPTVPNPYNLLCALPPQRSWYTVLDLKDAFFCLRLHPTSQPLFAFEWRDPGTGRTGQLTWTRLPQGFKNSPTIFNEALHRDLANFRIQHPQVTLLQYVDDLLLAGATKQDCLEGTKALLLELSDLGYRASAKKAQICRREVTYLGYSLRDGQRWLTEARKKTVVQIPAPTTAKQVREFLGKAGFCRLFIPGFATLAAPLYPLTKPKGEFSWAPEHQKAFDAIKKALLSAPALALPDVTKPFTLYVDERKGVARGVLTQTLGPWRRPVAYLSKKLDPVASGWPVCLKAIAAVAILVKDADKLTLGQNITVIAPHALENIVRQPPDRWMTNARMTHYQSLLLTERVTFAPPAALNPATLLPEETDEPVTHDCHQLLIEETGVRKDLTDIPLTGEVLTWFTDGSSYVVEGKRMAGAAVVDGTRTIWASSLPEGTSAQKAELMALTQALRLAEGKSINIYTDSRYAFATAHVHGAIYKQRGWLTSAGREIKNKEEILSLLEALHLPKRLAIIHCPGHQKAKDPISRGNQMADRVAKQAAQGVNLLPAGKRTADGSEFEKRTADGSEFESPKKKAKVE

SEQ ID NO: 236-238 - skipped (3 entries)

SEQ ID NO: 239 - protein, 2088 aa, synthetic construct; identical to SEQ ID NO: 49

SEQ ID NO: 240-251 - skipped (12 entries)

SEQ ID NO: 252 - protein, 2083 aa, synthetic construct
MPAAKRVKLDGGDKKYSIGLDIGTNSVGWAVITDEYKVPSKKFKVLGNTDRHSIKKNLIGALLFDSGETAEATRLKRTARRRYTRRKNRICYLQEIFSNEMAKVDDSFFHRLEESFLVEEDKKHERHPIFGNIVDEVAYHEKYPTIYHLRKKLVDSTDKADLRLIYLALAHMIKFRGHFLIEGDLNPDNSDVDKLFIQLVQTYNQLFEENPINASGVDAKAILSARLSKSRRLENLIAQLPGEKKNGLFGNLIALSLGLTPNFKSNFDLAEDAKLQLSKDTYDDDLDNLLAQIGDQYADLFLAAKNLSDAILLSDILRVNTEITKAPLSASMIKRYDEHHQDLTLLKALVRQQLPEKYKEIFFDQSKNGYAGYIDGGASQEEFYKFIKPILEKMDGTEELLVKLNREDLLRKQRTFDNGSIPHQIHLGELHAILRRQEDFYPFLKDNREKIEKILTFRIPYYVGPLARGNSRFAWMTRKSEETITPWNFEEVVDKGASAQSFIERMTNFDKNLPNEKVLPKHSLLYEYFTVYNELTKVKYVTEGMRKPAFLSGEQKKAIVDLLFKTNRKVTVKQLKEDYFKKIECFDSVEISGVEDRFNASLGTYHDLLKIIKDKDFLDNEENEDILEDIVLTLTLFEDREMIEERLKTYAHLFDDKVMKQLKRRRYTGWGRLSRKLINGIRDKQSGKTILDFLKSDGFANRNFMQLIHDDSLTFKEDIQKAQVSGQGDSLHEHIANLAGSPAIKKGILQTVKVVDELVKVMGRHKPENIVIEMARENQTTQKGQKNSRERMKRIEEGIKELGSQILKEHPVENTQLQNEKLYLYYLQNGRDMYVDQELDINRLSDYDVDHIVPQSFLKDDSIDNKVLTRSDKARGKSDNVPSEEVVKKMKNYWRQLLNAKLITQRKFDNLTKAERGGLSELDKAGFIKRQLVETRQITKHVAQILDSRMNTKYDENDKLIREVKVITLKSKLVSDFRKDFQFYKVREINNYHHAHDAYLNAVVGTALIKKYPKLESEFVYGDYKVYDVRKMIAKSEQEIGKATAKYFFYSNIMNFFKTEITLANGEIRKRPLIETNGETGEIVWDKGRDFATVRKVLSMPQVNIVKKTEVQTGGFSKESILPKRNSDKLIARKKDWDPKKYGGFDSPTVAYSVLVVAKVEKGKSKKLKSVKELLGITIMERSSFEKNPIDFLEAKGYKEVKKDLIIKLPKYSLFELENGRKRMLASAGELQKGNELALPSKYVNFLYLASHYEKLKGSPEDNEQKQLFVEQHKHYLDEIIEQISEFSKRVILADANLDKVLSAYNKHRDKPIREQAENIIHLFTLTNLGAPAAFKYFDTTIDRKRYTSTKEVLDATLIHQSITGLYETRIDLSQLGGDGGPAPGGSGGLDDEYRLYSPLVKPDQNIQFWLEQFPQAWAETAGMGLAKQVPPQVIQLKASATPVSVRQYPLSKEAQEGIRPHVQRLIQQGILVPVQSPWNTPLLPVRKPGTNDYRPVQDLREVNKRVQDIHPTVPNPYNLLCALPPQRSWYTVLDLKDAFFCLRLHPTSQPLFAFEWRDPGTGRTGQLTWTRLPQGFKNSPTIFNEALHRDLANFRIQHPQVTLLQYVDDLLLAGATKQDCLEGTKALLLELSDLGYRASAKKAQICRREVTYLGYSLRDGQRWLTEARKKTVVQIPAPTTAKQVREFLGKAGFCRLFIPGFATLAAPLYPLTKPKGEFSWAPEHQKAFDAIKKALLSAPALALPDVTKPFTLYVDERKGVARGVLTQTLGPWRRPVAYLSKKLDPVASGWPVCLKAIAAVAILVKDADKLTLGQNITVIAPHALENIVRQPPDRWMTNARMTHYQSLLLTERVTFAPPAALNPATLLPEETDEPVTHDCHQLLIEETGVRKDLTDIPLTGEVLTWFTDGSSYVVEGKRMAGAAVVDGTRTIWASSLPEGTSAQKAELMALTQALRLAEGKSINIYTDSRYAFATAHVHGAIYKQRGWLTSAGREIKNKEEILSLLEALHLPKRLAIIHCPGHQKAKDPISRGNQMADRVAKQAAQGVNLLPAGKRTADGSEFEKRTADGSEFESPKKKAKVE

SEQ ID NO: 253-257 - skipped (5 entries)

SEQ ID NO: 258 - protein, 2088 aa, synthetic construct
MPAAKRVKLDGGDKKYSIGLDIGTNSVGWAVITDEYKVPSKKFKVLGNTDRHSIKKNLIGALLFDSGETAEATRLKRTARRRYTRRKNRICYLQEIFSNEMAKVDDSFFHRLEESFLVEEDKKHERHPIFGNIVDEVAYHEKYPTIYHLRKKLVDSTDKADLRLIYLALAHMIKFRGHFLIEGDLNPDNSDVDKLFIQLVQTYNQLFEENPINASGVDAKAILSARLSKSRRLENLIAQLPGEKKNGLFGNLIALSLGLTPNFKSNFDLAEDAKLQLSKDTYDDDLDNLLAQIGDQYADLFLAAKNLSDAILLSDILRVNTEITKAPLSASMIKRYDEHHQDLTLLKALVRQQLPEKYKEIFFDQSKNGYAGYIDGGASQEEFYKFIKPILEKMDGTEELLVKLNREDLLRKQRTFDNGSIPHQIHLGELHAILRRQEDFYPFLKDNREKIEKILTFRIPYYVGPLARGNSRFAWMTRKSEETITPWNFEEVVDKGASAQSFIERMTNFDKNLPNEKVLPKHSLLYEYFTVYNELTKVKYVTEGMRKPAFLSGEQKKAIVDLLFKTNRKVTVKQLKEDYFKKIECFDSVEISGVEDRFNASLGTYHDLLKIIKDKDFLDNEENEDILEDIVLTLTLFEDREMIEERLKTYAHLFDDKVMKQLKRRRYTGWGRLSRKLINGIRDKQSGKTILDFLKSDGFANRNFMQLIHDDSLTFKEDIQKAQVSGQGDSLHEHIANLAGSPAIKKGILQTVKVVDELVKVMGRHKPENIVIEMARENQTTQKGQKNSRERMKRIEEGIKELGSQILKEHPVENTQLQNEKLYLYYLQNGRDMYVDQELDINRLSDYDVDHIVPQSFLKDDSIDNKVLTRSDKARGKSDNVPSEEVVKKMKNYWRQLLNAKLITQRKFDNLTKAERGGLSELDKAGFIKRQLVETRQITKHVAQILDSRMNTKYDENDKLIREVKVITLKSKLVSDFRKDFQFYKVREINNYHHAHDAYLNAVVGTALIKKYPKLESEFVYGDYKVYDVRKMIAKSEQEIGKATAKYFFYSNIMNFFKTEITLANGEIRKRPLIETNGETGEIVWDKGRDFATVRKVLSMPQVNIVKKTEVQTGGFSKESILPKRNSDKLIARKKDWDPKKYGGFDSPTVAYSVLVVAKVEKGKSKKLKSVKELLGITIMERSSFEKNPIDFLEAKGYKEVKKDLIIKLPKYSLFELENGRKRMLASAGELQKGNELALPSKYVNFLYLASHYEKLKGSPEDNEQKQLFVEQHKHYLDEIIEQISEFSKRVILADANLDKVLSAYNKHRDKPIREQAENIIHLFTLTNLGAPAAFKYFDTTIDRKRYTSTKEVLDATLIHQSITGLYETRIDLSQLGGDGGGSSEAAAKGGSGGLDDEYRLYSPLVKPDQNIQFWLEQFPQAWAETAGMGLAKQVPPQVIQLKASATPVSVRQYPLSKEAQEGIRPHVQRLIQQGILVPVQSPWNTPLLPVRKPGTNDYRPVQDLREVNKRVQDIHPTVPNPYNLLCALPPQRSWYTVLDLKDAFFCLRLHPTSQPLFAFEWRDPGTGRTGQLTWTRLPQGFKNSPTIFNEALHRDLANFRIQHPQVTLLQYVDDLLLAGATKQDCLEGTKALLLELSDLGYRASAKKAQICRREVTYLGYSLRDGQRWLTEARKKTVVQIPAPTTAKQVREFLGKAGFCRLFIPGFATLAAPLYPLTKPKGEFSWAPEHQKAFDAIKKALLSAPALALPDVTKPFTLYVDERKGVARGVLTQTLGPWRRPVAYLSKKLDPVASGWPVCLKAIAAVAILVKDADKLTLGQNITVIAPHALENIVRQPPDRWMTNARMTHYQSLLLTERVTFAPPAALNPATLLPEETDEPVTHDCHQLLIEETGVRKDLTDIPLTGEVLTWFTDGSSYVVEGKRMAGAAVVDGTRTIWASSLPEGTSAQKAELMALTQALRLAEGKSINIYTDSRYAFATAHVHGAIYKQRGWLTSAGREIKNKEEILSLLEALHLPKRLAIIHCPGHQKAKDPISRGNQMADRVAKQAAQGVNLLPAGKRTADGSEFEKRTADGSEFESPKKKAKVE

SEQ ID NO: 259-267 - skipped (9 entries)

SEQ ID NO: 268 - protein, 2086 aa, synthetic construct; identical to SEQ ID NO: 38

SEQ ID NO: 269-277 - skipped (9 entries)

SEQ ID NO: 278 - protein, 2090 aa, synthetic construct; identical to SEQ ID NO: 112

SEQ ID NO: 279 - protein, 2094 aa, synthetic construct
MPAAKRVKLDGGDKKYSIGLDIGTNSVGWAVITDEYKVPSKKFKVLGNTDRHSIKKNLIGALLFDSGETAEATRLKRTARRRYTRRKNRICYLQEIFSNEMAKVDDSFFHRLEESFLVEEDKKHERHPIFGNIVDEVAYHEKYPTIYHLRKKLVDSTDKADLRLIYLALAHMIKFRGHFLIEGDLNPDNSDVDKLFIQLVQTYNQLFEENPINASGVDAKAILSARLSKSRRLENLIAQLPGEKKNGLFGNLIALSLGLTPNFKSNFDLAEDAKLQLSKDTYDDDLDNLLAQIGDQYADLFLAAKNLSDAILLSDILRVNTEITKAPLSASMIKRYDEHHQDLTLLKALVRQQLPEKYKEIFFDQSKNGYAGYIDGGASQEEFYKFIKPILEKMDGTEELLVKLNREDLLRKQRTFDNGSIPHQIHLGELHAILRRQEDFYPFLKDNREKIEKILTFRIPYYVGPLARGNSRFAWMTRKSEETITPWNFEEVVDKGASAQSFIERMTNFDKNLPNEKVLPKHSLLYEYFTVYNELTKVKYVTEGMRKPAFLSGEQKKAIVDLLFKTNRKVTVKQLKEDYFKKIECFDSVEISGVEDRFNASLGTYHDLLKIIKDKDFLDNEENEDILEDIVLTLTLFEDREMIEERLKTYAHLFDDKVMKQLKRRRYTGWGRLSRKLINGIRDKQSGKTILDFLKSDGFANRNFMQLIHDDSLTFKEDIQKAQVSGQGDSLHEHIANLAGSPAIKKGILQTVKVVDELVKVMGRHKPENIVIEMARENQTTQKGQKNSRERMKRIEEGIKELGSQILKEHPVENTQLQNEKLYLYYLQNGRDMYVDQELDINRLSDYDVDHIVPQSFLKDDSIDNKVLTRSDKARGKSDNVPSEEVVKKMKNYWRQLLNAKLITQRKFDNLTKAERGGLSELDKAGFIKRQLVETRQITKHVAQILDSRMNTKYDENDKLIREVKVITLKSKLVSDFRKDFQFYKVREINNYHHAHDAYLNAVVGTALIKKYPKLESEFVYGDYKVYDVRKMIAKSEQEIGKATAKYFFYSNIMNFFKTEITLANGEIRKRPLIETNGETGEIVWDKGRDFATVRKVLSMPQVNIVKKTEVQTGGFSKESILPKRNSDKLIARKKDWDPKKYGGFDSPTVAYSVLVVAKVEKGKSKKLKSVKELLGITIMERSSFEKNPIDFLEAKGYKEVKKDLIIKLPKYSLFELENGRKRMLASAGELQKGNELALPSKYVNFLYLASHYEKLKGSPEDNEQKQLFVEQHKHYLDEIIEQISEFSKRVILADANLDKVLSAYNKHRDKPIREQAENIIHLFTLTNLGAPAAFKYFDTTIDRKRYTSTKEVLDATLIHQSITGLYETRIDLSQLGGDGGEAAAKEAAAKEAAAKGGTLQLDDEYRLYSPLVKPDQNIQFWLEQFPQAWAETAGMGLAKQVPPQVIQLKASATPVSVRQYPLSKEAQEGIRPHVQRLIQQGILVPVQSPWNTPLLPVRKPGTNDYRPVQDLREVNKRVQDIHPTVPNPYNLLCALPPQRSWYTVLDLKDAFFCLRLHPTSQPLFAFEWRDPGTGRTGQLTWTRLPQGFKNSPTIFDEALHRDLANFRIQHPQVTLLQYVDDLLLAGATKQDCLEGTKALLLELSDLGYRASAKKAQICRREVTYLGYSLRDGQRWLTEARKKTVVQIPAPTTAKQVREFLGTAGFCRLWIPGFATLAAPLYPLTKEKGEFSWAPEHQKAFDAIKKALLSAPALALPDVTKPFTLYVDERKGVARGVLTQTLGPWRRPVAYLSKKLDPVASGWPVCLKAIAAVAILVKDADKLTLGQNITVIAPHALENIVRQPPDRWMTNARMTHYQSLLLTERVTFAPPAALNPATLLPEETDEPVTHDCHQLLIEETGVRKDLTDIPLTGEVLTWFTDGSSYVVEGKRMAGAAVVDGTRTIWASSLPEGTSAQKAELMALTQALRLAEGKSINIYTDSRYAFATAHVHGAIYKQRGLLTSAGREIKNKEEILSLLEALHLPKRLAIIHCPGHQKAKDPISRGNQMADRVAKQAAQGVNLLAGKRTADGSEFEKRTADGSEFESPKKKAKVE

SEQ ID NO: 280 - protein, 2109 aa, synthetic construct
MPAAKRVKLDGGDKKYSIGLDIGTNSVGWAVITDEYKVPSKKFKVLGNTDRHSIKKNLIGALLFDSGETAEATRLKRTARRRYTRRKNRICYLQEIFSNEMAKVDDSFFHRLEESFLVEEDKKHERHPIFGNIVDEVAYHEKYPTIYHLRKKLVDSTDKADLRLIYLALAHMIKFRGHFLIEGDLNPDNSDVDKLFIQLVQTYNQLFEENPINASGVDAKAILSARLSKSRRLENLIAQLPGEKKNGLFGNLIALSLGLTPNFKSNFDLAEDAKLQLSKDTYDDDLDNLLAQIGDQYADLFLAAKNLSDAILLSDILRVNTEITKAPLSASMIKRYDEHHQDLTLLKALVRQQLPEKYKEIFFDQSKNGYAGYIDGGASQEEFYKFIKPILEKMDGTEELLVKLNREDLLRKQRTFDNGSIPHQIHLGELHAILRRQEDFYPFLKDNREKIEKILTFRIPYYVGPLARGNSRFAWMTRKSEETITPWNFEEVVDKGASAQSFIERMTNFDKNLPNEKVLPKHSLLYEYFTVYNELTKVKYVTEGMRKPAFLSGEQKKAIVDLLFKTNRKVTVKQLKEDYFKKIECFDSVEISGVEDRFNASLGTYHDLLKIIKDKDFLDNEENEDILEDIVLTLTLFEDREMIEERLKTYAHLFDDKVMKQLKRRRYTGWGRLSRKLINGIRDKQSGKTILDFLKSDGFANRNFMQLIHDDSLTFKEDIQKAQVSGQGDSLHEHIANLAGSPAIKKGILQTVKVVDELVKVMGRHKPENIVIEMARENQTTQKGQKNSRERMKRIEEGIKELGSQILKEHPVENTQLQNEKLYLYYLQNGRDMYVDQELDINRLSDYDVDHIVPQSFLKDDSIDNKVLTRSDKARGKSDNVPSEEVVKKMKNYWRQLLNAKLITQRKFDNLTKAERGGLSELDKAGFIKRQLVETRQITKHVAQILDSRMNTKYDENDKLIREVKVITLKSKLVSDFRKDFQFYKVREINNYHHAHDAYLNAVVGTALIKKYPKLESEFVYGDYKVYDVRKMIAKSEQEIGKATAKYFFYSNIMNFFKTEITLANGEIRKRPLIETNGETGEIVWDKGRDFATVRKVLSMPQVNIVKKTEVQTGGFSKESILPKRNSDKLIARKKDWDPKKYGGFDSPTVAYSVLVVAKVEKGKSKKLKSVKELLGITIMERSSFEKNPIDFLEAKGYKEVKKDLIIKLPKYSLFELENGRKRMLASAGELQKGNELALPSKYVNFLYLASHYEKLKGSPEDNEQKQLFVEQHKHYLDEIIEQISEFSKRVILADANLDKVLSAYNKHRDKPIREQAENIIHLFTLTNLGAPAAFKYFDTTIDRKRYTSTKEVLDATLIHQSITGLYETRIDLSQLGGDGGEAAAKEAAAKEAAAKEAAAKEAAAKEAAAKGGTLQLDDEYRLYSPLVKPDQNIQFWLEQFPQAWAETAGMGLAKQVPPQVIQLKASATPVSVRQYPLSKEAQEGIRPHVQRLIQQGILVPVQSPWNTPLLPVRKPGTNDYRPVQDLREVNKRVQDIHPTVPNPYNLLCALPPQRSWYTVLDLKDAFFCLRLHPTSQPLFAFEWRDPGTGRTGQLTWTRLPQGFKNSPTIFDEALHRDLANFRIQHPQVTLLQYVDDLLLAGATKQDCLEGTKALLLELSDLGYRASAKKAQICRREVTYLGYSLRDGQRWLTEARKKTVVQIPAPTTAKQVREFLGTAGFCRLWIPGFATLAAPLYPLTKEKGEFSWAPEHQKAFDAIKKALLSAPALALPDVTKPFTLYVDERKGVARGVLTQTLGPWRRPVAYLSKKLDPVASGWPVCLKAIAAVAILVKDADKLTLGQNITVIAPHALENIVRQPPDRWMTNARMTHYQSLLLTERVTFAPPAALNPATLLPEETDEPVTHDCHQLLIEETGVRKDLTDIPLTGEVLTWFTDGSSYVVEGKRMAGAAVVDGTRTIWASSLPEGTSAQKAELMALTQALRLAEGKSINIYTDSRYAFATAHVHGAIYKQRGLLTSAGREIKNKEEILSLLEALHLPKRLAIIHCPGHQKAKDPISRGNQMADRVAKQAAQGVNLLAGKRTADGSEFEKRTADGSEFESPKKKAKVE

SEQ ID NO: 281-297 - skipped (17 entries)

SEQ ID NO: 298 - protein, 2094 aa, synthetic construct
MPAAKRVKLDGGDKKYSIGLDIGTNSVGWAVITDEYKVPSKKFKVLGNTDRHSIKKNLIGALLFDSGETAEATRLKRTARRRYTRRKNRICYLQEIFSNEMAKVDDSFFHRLEESFLVEEDKKHERHPIFGNIVDEVAYHEKYPTIYHLRKKLVDSTDKADLRLIYLALAHMIKFRGHFLIEGDLNPDNSDVDKLFIQLVQTYNQLFEENPINASGVDAKAILSARLSKSRRLENLIAQLPGEKKNGLFGNLIALSLGLTPNFKSNFDLAEDAKLQLSKDTYDDDLDNLLAQIGDQYADLFLAAKNLSDAILLSDILRVNTEITKAPLSASMIKRYDEHHQDLTLLKALVRQQLPEKYKEIFFDQSKNGYAGYIDGGASQEEFYKFIKPILEKMDGTEELLVKLNREDLLRKQRTFDNGSIPHQIHLGELHAILRRQEDFYPFLKDNREKIEKILTFRIPYYVGPLARGNSRFAWMTRKSEETITPWNFEEVVDKGASAQSFIERMTNFDKNLPNEKVLPKHSLLYEYFTVYNELTKVKYVTEGMRKPAFLSGEQKKAIVDLLFKTNRKVTVKQLKEDYFKKIECFDSVEISGVEDRFNASLGTYHDLLKIIKDKDFLDNEENEDILEDIVLTLTLFEDREMIEERLKTYAHLFDDKVMKQLKRRRYTGWGRLSRKLINGIRDKQSGKTILDFLKSDGFANRNFMQLIHDDSLTFKEDIQKAQVSGQGDSLHEHIANLAGSPAIKKGILQTVKVVDELVKVMGRHKPENIVIEMARENQTTQKGQKNSRERMKRIEEGIKELGSQILKEHPVENTQLQNEKLYLYYLQNGRDMYVDQELDINRLSDYDVDHIVPQSFLKDDSIDNKVLTRSDKARGKSDNVPSEEVVKKMKNYWRQLLNAKLITQRKFDNLTKAERGGLSELDKAGFIKRQLVETRQITKHVAQILDSRMNTKYDENDKLIREVKVITLKSKLVSDFRKDFQFYKVREINNYHHAHDAYLNAVVGTALIKKYPKLESEFVYGDYKVYDVRKMIAKSEQEIGKATAKYFFYSNIMNFFKTEITLANGEIRKRPLIETNGETGEIVWDKGRDFATVRKVLSMPQVNIVKKTEVQTGGFSKESILPKRNSDKLIARKKDWDPKKYGGFDSPTVAYSVLVVAKVEKGKSKKLKSVKELLGITIMERSSFEKNPIDFLEAKGYKEVKKDLIIKLPKYSLFELENGRKRMLASAGELQKGNELALPSKYVNFLYLASHYEKLKGSPEDNEQKQLFVEQHKHYLDEIIEQISEFSKRVILADANLDKVLSAYNKHRDKPIREQAENIIHLFTLTNLGAPAAFKYFDTTIDRKRYTSTKEVLDATLIHQSITGLYETRIDLSQLGGDGGEAAAKEAAAKEAAAKGGTLQLDDEYRLYSPLVKPDQNIQFWLEQFPQAWAETAGMGLAKQVPPQVIQLKASATPVSVRQYPLSKEAQEGIRPHVQRLIQQGILVPVQSPWNTPLLPVRKPGTNDYRPVQDLREVNKRVQDIHPTVPNPYNLLCALPPQRSWYTVLDLKDAFFCLRLHPTSQPLFAFEWRDPGTGRTGQLTWTRLPQGFKNSPTIFNEALHRDLANFRIQHPQVTLLQYVDDLLLAGATKQDCLEGTKALLLELSDLGYRASAKKAQICRREVTYLGYSLRDGQRWLTEARKKTVVQIPAPTTAKQVREFLGTAGFCRLWIPGFATLAAPLYPLTKPKGEFSWAPEHQKAFDAIKKALLSAPALALPDVTKPFTLYVDERKGVARGVLTQTLGPWRRPVAYLSKKLDPVASGWPVCLKAIAAVAILVKDADKLTLGQNITVIAPHALENIVRQPPDRWMTNARMTHYQSLLLTERVTFAPPAALNPATLLPEETDEPVTHDCHQLLIEETGVRKDLTDIPLTGEVLTWFTDGSSYVVEGKRMAGAAVVDGTRTIWASSLPEGTSAQKAELMALTQALRLAEGKSINIYTDSRYAFATAHVHGAIYKQRGWLTSAGREIKNKEEILSLLEALHLPKRLAIIHCPGHQKAKDPISRGNQMADRVAKQAAQGVNLLAGKRTADGSEFEKRTADGSEFESPKKKAKVE

SEQ ID NO: 299 - protein, 2090 aa, synthetic construct
MPAAKRVKLDGGDKKYSIGLDIGTNSVGWAVITDEYKVPSKKFKVLGNTDRHSIKKNLIGALLFDSGETAEATRLKRTARRRYTRRKNRICYLQEIFSNEMAKVDDSFFHRLEESFLVEEDKKHERHPIFGNIVDEVAYHEKYPTIYHLRKKLVDSTDKADLRLIYLALAHMIKFRGHFLIEGDLNPDNSDVDKLFIQLVQTYNQLFEENPINASGVDAKAILSARLSKSRRLENLIAQLPGEKKNGLFGNLIALSLGLTPNFKSNFDLAEDAKLQLSKDTYDDDLDNLLAQIGDQYADLFLAAKNLSDAILLSDILRVNTEITKAPLSASMIKRYDEHHQDLTLLKALVRQQLPEKYKEIFFDQSKNGYAGYIDGGASQEEFYKFIKPILEKMDGTEELLVKLNREDLLRKQRTFDNGSIPHQIHLGELHAILRRQEDFYPFLKDNREKIEKILTFRIPYYVGPLARGNSRFAWMTRKSEETITPWNFEEVVDKGASAQSFIERMTNFDKNLPNEKVLPKHSLLYEYFTVYNELTKVKYVTEGMRKPAFLSGEQKKAIVDLLFKTNRKVTVKQLKEDYFKKIECFDSVEISGVEDRFNASLGTYHDLLKIIKDKDFLDNEENEDILEDIVLTLTLFEDREMIEERLKTYAHLFDDKVMKQLKRRRYTGWGRLSRKLINGIRDKQSGKTILDFLKSDGFANRNFMQLIHDDSLTFKEDIQKAQVSGQGDSLHEHIANLAGSPAIKKGILQTVKVVDELVKVMGRHKPENIVIEMARENQTTQKGQKNSRERMKRIEEGIKELGSQILKEHPVENTQLQNEKLYLYYLQNGRDMYVDQELDINRLSDYDVDHIVPQSFLKDDSIDNKVLTRSDKARGKSDNVPSEEVVKKMKNYWRQLLNAKLITQRKFDNLTKAERGGLSELDKAGFIKRQLVETRQITKHVAQILDSRMNTKYDENDKLIREVKVITLKSKLVSDFRKDFQFYKVREINNYHHAHDAYLNAVVGTALIKKYPKLESEFVYGDYKVYDVRKMIAKSEQEIGKATAKYFFYSNIMNFFKTEITLANGEIRKRPLIETNGETGEIVWDKGRDFATVRKVLSMPQVNIVKKTEVQTGGFSKESILPKRNSDKLIARKKDWDPKKYGGFDSPTVAYSVLVVAKVEKGKSKKLKSVKELLGITIMERSSFEKNPIDFLEAKGYKEVKKDLIIKLPKYSLFELENGRKRMLASAGELQKGNELALPSKYVNFLYLASHYEKLKGSPEDNEQKQLFVEQHKHYLDEIIEQISEFSKRVILADANLDKVLSAYNKHRDKPIREQAENIIHLFTLTNLGAPAAFKYFDTTIDRKRYTSTKEVLDATLIHQSITGLYETRIDLSQLGGDGGEAAAKGGSGGGGGTLQLDDEYRLYSPLVKPDQNIQFWLEQFPQAWAETAGMGLAKQVPPQVIQLKASATPVSVRQYPLSKEAQEGIRPHVQRLIQQGILVPVQSPWNTPLLPVRKPGTNDYRPVQDLREVNKRVQDIHPTVPNPYNLLCALPPQRSWYTVLDLKDAFFCLRLHPTSQPLFAFEWRDPGTGRTGQLTWTRLPQGFKNSPTIFNEALHRDLANFRIQHPQVTLLQYVDDLLLAGATKQDCLEGTKALLLELSDLGYRASAKKAQICRREVTYLGYSLRDGQRWLTEARKKTVVQIPAPTTAKQVREFLGTAGFCRLWIPGFATLAAPLYPLTKPKGEFSWAPEHQKAFDAIKKALLSAPALALPDVTKPFTLYVDERKGVARGVLTQTLGPWRRPVAYLSKKLDPVASGWPVCLKAIAAVAILVKDADKLTLGQNITVIAPHALENIVRQPPDRWMTNARMTHYQSLLLTERVTFAPPAALNPATLLPEETDEPVTHDCHQLLIEETGVRKDLTDIPLTGEVLTWFTDGSSYVVEGKRMAGAAVVDGTRTIWASSLPEGTSAQKAELMALTQALRLAEGKSINIYTDSRYAFATAHVHGAIYKQRGWLTSAGREIKNKEEILSLLEALHLPKRLAIIHCPGHQKAKDPISRGNQMADRVAKQAAQGVNLLAGKRTADGSEFEKRTADGSEFESPKKKAKVE

SEQ ID NO: 300 - protein, 2125 aa, synthetic construct; identical to SEQ ID NO: 156

SEQ ID NO: 301 - skipped

SEQ ID NO: 302 - protein, 2090 aa, synthetic construct; identical to SEQ ID NO: 164

SEQ ID NO: 303 - protein, 2112 aa, synthetic construct; identical to SEQ ID NO: 140

SEQ ID NO: 304 - protein, 2090 aa, synthetic construct
MPAAKRVKLDGGDKKYSIGLDIGTNSVGWAVITDEYKVPSKKFKVLGNTDRHSIKKNLIGALLFDSGETAEATRLKRTARRRYTRRKNRICYLQEIFSNEMAKVDDSFFHRLEESFLVEEDKKHERHPIFGNIVDEVAYHEKYPTIYHLRKKLVDSTDKADLRLIYLALAHMIKFRGHFLIEGDLNPDNSDVDKLFIQLVQTYNQLFEENPINASGVDAKAILSARLSKSRRLENLIAQLPGEKKNGLFGNLIALSLGLTPNFKSNFDLAEDAKLQLSKDTYDDDLDNLLAQIGDQYADLFLAAKNLSDAILLSDILRVNTEITKAPLSASMIKRYDEHHQDLTLLKALVRQQLPEKYKEIFFDQSKNGYAGYIDGGASQEEFYKFIKPILEKMDGTEELLVKLNREDLLRKQRTFDNGSIPHQIHLGELHAILRRQEDFYPFLKDNREKIEKILTFRIPYYVGPLARGNSRFAWMTRKSEETITPWNFEEVVDKGASAQSFIERMTNFDKNLPNEKVLPKHSLLYEYFTVYNELTKVKYVTEGMRKPAFLSGEQKKAIVDLLFKTNRKVTVKQLKEDYFKKIECFDSVEISGVEDRFNASLGTYHDLLKIIKDKDFLDNEENEDILEDIVLTLTLFEDREMIEERLKTYAHLFDDKVMKQLKRRRYTGWGRLSRKLINGIRDKQSGKTILDFLKSDGFANRNFMQLIHDDSLTFKEDIQKAQVSGQGDSLHEHIANLAGSPAIKKGILQTVKVVDELVKVMGRHKPENIVIEMARENQTTQKGQKNSRERMKRIEEGIKELGSQILKEHPVENTQLQNEKLYLYYLQNGRDMYVDQELDINRLSDYDVDHIVPQSFLKDDSIDNKVLTRSDKARGKSDNVPSEEVVKKMKNYWRQLLNAKLITQRKFDNLTKAERGGLSELDKAGFIKRQLVETRQITKHVAQILDSRMNTKYDENDKLIREVKVITLKSKLVSDFRKDFQFYKVREINNYHHAHDAYLNAVVGTALIKKYPKLESEFVYGDYKVYDVRKMIAKSEQEIGKATAKYFFYSNIMNFFKTEITLANGEIRKRPLIETNGETGEIVWDKGRDFATVRKVLSMPQVNIVKKTEVQTGGFSKESILPKRNSDKLIARKKDWDPKKYGGFDSPTVAYSVLVVAKVEKGKSKKLKSVKELLGITIMERSSFEKNPIDFLEAKGYKEVKKDLIIKLPKYSLFELENGRKRMLASAGELQKGNELALPSKYVNFLYLASHYEKLKGSPEDNEQKQLFVEQHKHYLDEIIEQISEFSKRVILADANLDKVLSAYNKHRDKPIREQAENIIHLFTLTNLGAPAAFKYFDTTIDRKRYTSTKEVLDATLIHQSITGLYETRIDLSQLGGDGGEAAAKPAPGSSGGTLQLDDEYRLYSPLVKPDQNIQFWLEQFPQAWAETAGMGLAKQVPPQVIQLKASATPVSVRQYPLSKEAQEGIRPHVQRLIQQGILVPVQSPWNTPLLPVRKPGTNDYRPVQDLREVNKRVQDIHPTVPNPYNLLCALPPQRSWYTVLDLKDAFFCLRLHPTSQPLFAFEWRDPGTGRTGQLTWTRLPQGFKNSPTIFNEALHRDLANFRIQHPQVTLLQYVDDLLLAGATKQDCLEGTKALLLELSDLGYRASAKKAQICRREVTYLGYSLRDGQRWLTEARKKTVVQIPAPTTAKQVREFLGTAGFCRLWIPGFATLAAPLYPLTKPKGEFSWAPEHQKAFDAIKKALLSAPALALPDVTKPFTLYVDERKGVARGVLTQTLGPWRRPVAYLSKKLDPVASGWPVCLKAIAAVAILVKDADKLTLGQNITVIAPHALENIVRQPPDRWMTNARMTHYQSLLLTERVTFAPPAALNPATLLPEETDEPVTHDCHQLLIEETGVRKDLTDIPLTGEVLTWFTDGSSYVVEGKRMAGAAVVDGTRTIWASSLPEGTSAQKAELMALTQALRLAEGKSINIYTDSRYAFATAHVHGAIYKQRGWLTSAGREIKNKEEILSLLEALHLPKRLAIIHCPGHQKAKDPISRGNQMADRVAKQAAQGVNLLAGKRTADGSEFEKRTADGSEFESPKKKAKVE

SEQ ID NO: 305 - protein, 2090 aa, synthetic construct; identical to SEQ ID NO: 127

SEQ ID NO: 306 - protein, 2087 aa, synthetic construct; identical to SEQ ID NO: 126

SEQ ID NO: 307 - protein, 2088 aa, synthetic construct
MPAAKRVKLDGGDKKYSIGLDIGTNSVGWAVITDEYKVPSKKFKVLGNTDRHSIKKNLIGALLFDSGETAEATRLKRTARRRYTRRKNRICYLQEIFSNEMAKVDDSFFHRLEESFLVEEDKKHERHPIFGNIVDEVAYHEKYPTIYHLRKKLVDSTDKADLRLIYLALAHMIKFRGHFLIEGDLNPDNSDVDKLFIQLVQTYNQLFEENPINASGVDAKAILSARLSKSRRLENLIAQLPGEKKNGLFGNLIALSLGLTPNFKSNFDLAEDAKLQLSKDTYDDDLDNLLAQIGDQYADLFLAAKNLSDAILLSDILRVNTEITKAPLSASMIKRYDEHHQDLTLLKALVRQQLPEKYKEIFFDQSKNGYAGYIDGGASQEEFYKFIKPILEKMDGTEELLVKLNREDLLRKQRTFDNGSIPHQIHLGELHAILRRQEDFYPFLKDNREKIEKILTFRIPYYVGPLARGNSRFAWMTRKSEETITPWNFEEVVDKGASAQSFIERMTNFDKNLPNEKVLPKHSLLYEYFTVYNELTKVKYVTEGMRKPAFLSGEQKKAIVDLLFKTNRKVTVKQLKEDYFKKIECFDSVEISGVEDRFNASLGTYHDLLKIIKDKDFLDNEENEDILEDIVLTLTLFEDREMIEERLKTYAHLFDDKVMKQLKRRRYTGWGRLSRKLINGIRDKQSGKTILDFLKSDGFANRNFMQLIHDDSLTFKEDIQKAQVSGQGDSLHEHIANLAGSPAIKKGILQTVKVVDELVKVMGRHKPENIVIEMARENQTTQKGQKNSRERMKRIEEGIKELGSQILKEHPVENTQLQNEKLYLYYLQNGRDMYVDQELDINRLSDYDVDHIVPQSFLKDDSIDNKVLTRSDKARGKSDNVPSEEVVKKMKNYWRQLLNAKLITQRKFDNLTKAERGGLSELDKAGFIKRQLVETRQITKHVAQILDSRMNTKYDENDKLIREVKVITLKSKLVSDFRKDFQFYKVREINNYHHAHDAYLNAVVGTALIKKYPKLESEFVYGDYKVYDVRKMIAKSEQEIGKATAKYFFYSNIMNFFKTEITLANGEIRKRPLIETNGETGEIVWDKGRDFATVRKVLSMPQVNIVKKTEVQTGGFSKESILPKRNSDKLIARKKDWDPKKYGGFDSPTVAYSVLVVAKVEKGKSKKLKSVKELLGITIMERSSFEKNPIDFLEAKGYKEVKKDLIIKLPKYSLFELENGRKRMLASAGELQKGNELALPSKYVNFLYLASHYEKLKGSPEDNEQKQLFVEQHKHYLDEIIEQISEFSKRVILADANLDKVLSAYNKHRDKPIREQAENIIHLFTLTNLGAPAAFKYFDTTIDRKRYTSTKEVLDATLIHQSITGLYETRIDLSQLGGDGGGGGGSSPAPGGTLQLDDEYRLYSPLVKPDQNIQFWLEQFPQAWAETAGMGLAKQVPPQVIQLKASATPVSVRQYPLSKEAQEGIRPHVQRLIQQGILVPVQSPWNTPLLPVRKPGTNDYRPVQDLREVNKRVQDIHPTVPNPYNLLCALPPQRSWYTVLDLKDAFFCLRLHPTSQPLFAFEWRDPGTGRTGQLTWTRLPQGFKNSPTIFNEALHRDLANFRIQHPQVTLLQYVDDLLLAGATKQDCLEGTKALLLELSDLGYRASAKKAQICRREVTYLGYSLRDGQRWLTEARKKTVVQIPAPTTAKQVREFLGTAGFCRLWIPGFATLAAPLYPLTKPKGEFSWAPEHQKAFDAIKKALLSAPALALPDVTKPFTLYVDERKGVARGVLTQTLGPWRRPVAYLSKKLDPVASGWPVCLKAIAAVAILVKDADKLTLGQNITVIAPHALENIVRQPPDRWMTNARMTHYQSLLLTERVTFAPPAALNPATLLPEETDEPVTHDCHQLLIEETGVRKDLTDIPLTGEVLTWFTDGSSYVVEGKRMAGAAVVDGTRTIWASSLPEGTSAQKAELMALTQALRLAEGKSINIYTDSRYAFATAHVHGAIYKQRGWLTSAGREIKNKEEILSLLEALHLPKRLAIIHCPGHQKAKDPISRGNQMADRVAKQAAQGVNLLAGKRTADGSEFEKRTADGSEFESPKKKAKVE

SEQ ID NO: 308 - protein, 2084 aa, synthetic construct; identical to SEQ ID NO: 151

SEQ ID NO: 309 - protein, 2092 aa, synthetic construct; identical to SEQ ID NO: 157

SEQ ID NO: 310 - skipped

SEQ ID NO: 311 - protein, 2090 aa, synthetic construct
MPAAKRVKLDGGDKKYSIGLDIGTNSVGWAVITDEYKVPSKKFKVLGNTDRHSIKKNLIGALLFDSGETAEATRLKRTARRRYTRRKNRICYLQEIFSNEMAKVDDSFFHRLEESFLVEEDKKHERHPIFGNIVDEVAYHEKYPTIYHLRKKLVDSTDKADLRLIYLALAHMIKFRGHFLIEGDLNPDNSDVDKLFIQLVQTYNQLFEENPINASGVDAKAILSARLSKSRRLENLIAQLPGEKKNGLFGNLIALSLGLTPNFKSNFDLAEDAKLQLSKDTYDDDLDNLLAQIGDQYADLFLAAKNLSDAILLSDILRVNTEITKAPLSASMIKRYDEHHQDLTLLKALVRQQLPEKYKEIFFDQSKNGYAGYIDGGASQEEFYKFIKPILEKMDGTEELLVKLNREDLLRKQRTFDNGSIPHQIHLGELHAILRRQEDFYPFLKDNREKIEKILTFRIPYYVGPLARGNSRFAWMTRKSEETITPWNFEEVVDKGASAQSFIERMTNFDKNLPNEKVLPKHSLLYEYFTVYNELTKVKYVTEGMRKPAFLSGEQKKAIVDLLFKTNRKVTVKQLKEDYFKKIECFDSVEISGVEDRFNASLGTYHDLLKIIKDKDFLDNEENEDILEDIVLTLTLFEDREMIEERLKTYAHLFDDKVMKQLKRRRYTGWGRLSRKLINGIRDKQSGKTILDFLKSDGFANRNFMQLIHDDSLTFKEDIQKAQVSGQGDSLHEHIANLAGSPAIKKGILQTVKVVDELVKVMGRHKPENIVIEMARENQTTQKGQKNSRERMKRIEEGIKELGSQILKEHPVENTQLQNEKLYLYYLQNGRDMYVDQELDINRLSDYDVDHIVPQSFLKDDSIDNKVLTRSDKARGKSDNVPSEEVVKKMKNYWRQLLNAKLITQRKFDNLTKAERGGLSELDKAGFIKRQLVETRQITKHVAQILDSRMNTKYDENDKLIREVKVITLKSKLVSDFRKDFQFYKVREINNYHHAHDAYLNAVVGTALIKKYPKLESEFVYGDYKVYDVRKMIAKSEQEIGKATAKYFFYSNIMNFFKTEITLANGEIRKRPLIETNGETGEIVWDKGRDFATVRKVLSMPQVNIVKKTEVQTGGFSKESILPKRNSDKLIARKKDWDPKKYGGFDSPTVAYSVLVVAKVEKGKSKKLKSVKELLGITIMERSSFEKNPIDFLEAKGYKEVKKDLIIKLPKYSLFELENGRKRMLASAGELQKGNELALPSKYVNFLYLASHYEKLKGSPEDNEQKQLFVEQHKHYLDEIIEQISEFSKRVILADANLDKVLSAYNKHRDKPIREQAENIIHLFTLTNLGAPAAFKYFDTTIDRKRYTSTKEVLDATLIHQSITGLYETRIDLSQLGGDGGGGGGGSEAAAKGGTLQLDDEYRLYSPLVKPDQNIQFWLEQFPQAWAETAGMGLAKQVPPQVIQLKASATPVSVRQYPLSKEAQEGIRPHVQRLIQQGILVPVQSPWNTPLLPVRKPGTNDYRPVQDLREVNKRVQDIHPTVPNPYNLLCALPPQRSWYTVLDLKDAFFCLRLHPTSQPLFAFEWRDPGTGRTGQLTWTRLPQGFKNSPTIFNEALHRDLANFRIQHPQVTLLQYVDDLLLAGATKQDCLEGTKALLLELSDLGYRASAKKAQICRREVTYLGYSLRDGQRWLTEARKKTVVQIPAPTTAKQVREFLGTAGFCRLWIPGFATLAAPLYPLTKPKGEFSWAPEHQKAFDAIKKALLSAPALALPDVTKPFTLYVDERKGVARGVLTQTLGPWRRPVAYLSKKLDPVASGWPVCLKAIAAVAILVKDADKLTLGQNITVIAPHALENIVRQPPDRWMTNARMTHYQSLLLTERVTFAPPAALNPATLLPEETDEPVTHDCHQLLIEETGVRKDLTDIPLTGEVLTWFTDGSSYVVEGKRMAGAAVVDGTRTIWASSLPEGTSAQKAELMALTQALRLAEGKSINIYTDSRYAFATAHVHGAIYKQRGWLTSAGREIKNKEEILSLLEALHLPKRLAIIHCPGHQKAKDPISRGNQMADRVAKQAAQGVNLLAGKRTADGSEFEKRTADGSEFESPKKKAKVE

SEQ ID NO: 312 - skipped

SEQ ID NO: 313 - protein, 2109 aa, synthetic construct; identical to SEQ ID NO: 117

SEQ ID NO: 314 - protein, 2088 aa, synthetic construct
MPAAKRVKLDGGDKKYSIGLDIGTNSVGWAVITDEYKVPSKKFKVLGNTDRHSIKKNLIGALLFDSGETAEATRLKRTARRRYTRRKNRICYLQEIFSNEMAKVDDSFFHRLEESFLVEEDKKHERHPIFGNIVDEVAYHEKYPTIYHLRKKLVDSTDKADLRLIYLALAHMIKFRGHFLIEGDLNPDNSDVDKLFIQLVQTYNQLFEENPINASGVDAKAILSARLSKSRRLENLIAQLPGEKKNGLFGNLIALSLGLTPNFKSNFDLAEDAKLQLSKDTYDDDLDNLLAQIGDQYADLFLAAKNLSDAILLSDILRVNTEITKAPLSASMIKRYDEHHQDLTLLKALVRQQLPEKYKEIFFDQSKNGYAGYIDGGASQEEFYKFIKPILEKMDGTEELLVKLNREDLLRKQRTFDNGSIPHQIHLGELHAILRRQEDFYPFLKDNREKIEKILTFRIPYYVGPLARGNSRFAWMTRKSEETITPWNFEEVVDKGASAQSFIERMTNFDKNLPNEKVLPKHSLLYEYFTVYNELTKVKYVTEGMRKPAFLSGEQKKAIVDLLFKTNRKVTVKQLKEDYFKKIECFDSVEISGVEDRFNASLGTYHDLLKIIKDKDFLDNEENEDILEDIVLTLTLFEDREMIEERLKTYAHLFDDKVMKQLKRRRYTGWGRLSRKLINGIRDKQSGKTILDFLKSDGFANRNFMQLIHDDSLTFKEDIQKAQVSGQGDSLHEHIANLAGSPAIKKGILQTVKVVDELVKVMGRHKPENIVIEMARENQTTQKGQKNSRERMKRIEEGIKELGSQILKEHPVENTQLQNEKLYLYYLQNGRDMYVDQELDINRLSDYDVDHIVPQSFLKDDSIDNKVLTRSDKARGKSDNVPSEEVVKKMKNYWRQLLNAKLITQRKFDNLTKAERGGLSELDKAGFIKRQLVETRQITKHVAQILDSRMNTKYDENDKLIREVKVITLKSKLVSDFRKDFQFYKVREINNYHHAHDAYLNAVVGTALIKKYPKLESEFVYGDYKVYDVRKMIAKSEQEIGKATAKYFFYSNIMNFFKTEITLANGEIRKRPLIETNGETGEIVWDKGRDFATVRKVLSMPQVNIVKKTEVQTGGFSKESILPKRNSDKLIARKKDWDPKKYGGFDSPTVAYSVLVVAKVEKGKSKKLKSVKELLGITIMERSSFEKNPIDFLEAKGYKEVKKDLIIKLPKYSLFELENGRKRMLASAGELQKGNELALPSKYVNFLYLASHYEKLKGSPEDNEQKQLFVEQHKHYLDEIIEQISEFSKRVILADANLDKVLSAYNKHRDKPIREQAENIIHLFTLTNLGAPAAFKYFDTTIDRKRYTSTKEVLDATLIHQSITGLYETRIDLSQLGGDGGGGGPAPGSSGGTLQLDDEYRLYSPLVKPDQNIQFWLEQFPQAWAETAGMGLAKQVPPQVIQLKASATPVSVRQYPLSKEAQEGIRPHVQRLIQQGILVPVQSPWNTPLLPVRKPGTNDYRPVQDLREVNKRVQDIHPTVPNPYNLLCALPPQRSWYTVLDLKDAFFCLRLHPTSQPLFAFEWRDPGTGRTGQLTWTRLPQGFKNSPTIFNEALHRDLANFRIQHPQVTLLQYVDDLLLAGATKQDCLEGTKALLLELSDLGYRASAKKAQICRREVTYLGYSLRDGQRWLTEARKKTVVQIPAPTTAKQVREFLGTAGFCRLWIPGFATLAAPLYPLTKPKGEFSWAPEHQKAFDAIKKALLSAPALALPDVTKPFTLYVDERKGVARGVLTQTLGPWRRPVAYLSKKLDPVASGWPVCLKAIAAVAILVKDADKLTLGQNITVIAPHALENIVRQPPDRWMTNARMTHYQSLLLTERVTFAPPAALNPATLLPEETDEPVTHDCHQLLIEETGVRKDLTDIPLTGEVLTWFTDGSSYVVEGKRMAGAAVVDGTRTIWASSLPEGTSAQKAELMALTQALRLAEGKSINIYTDSRYAFATAHVHGAIYKQRGWLTSAGREIKNKEEILSLLEALHLPKRLAIIHCPGHQKAKDPISRGNQMADRVAKQAAQGVNLLAGKRTADGSEFEKRTADGSEFESPKKKAKVE

SEQ ID NO: 315 - skipped

SEQ ID NO: 316 - protein, 2097 aa, synthetic construct; identical to SEQ ID NO: 142

SEQ ID NO: 317 - protein, 2090 aa, synthetic construct
MPAAKRVKLDGGDKKYSIGLDIGTNSVGWAVITDEYKVPSKKFKVLGNTDRHSIKKNLIGALLFDSGETAEATRLKRTARRRYTRRKNRICYLQEIFSNEMAKVDDSFFHRLEESFLVEEDKKHERHPIFGNIVDEVAYHEKYPTIYHLRKKLVDSTDKADLRLIYLALAHMIKFRGHFLIEGDLNPDNSDVDKLFIQLVQTYNQLFEENPINASGVDAKAILSARLSKSRRLENLIAQLPGEKKNGLFGNLIALSLGLTPNFKSNFDLAEDAKLQLSKDTYDDDLDNLLAQIGDQYADLFLAAKNLSDAILLSDILRVNTEITKAPLSASMIKRYDEHHQDLTLLKALVRQQLPEKYKEIFFDQSKNGYAGYIDGGASQEEFYKFIKPILEKMDGTEELLVKLNREDLLRKQRTFDNGSIPHQIHLGELHAILRRQEDFYPFLKDNREKIEKILTFRIPYYVGPLARGNSRFAWMTRKSEETITPWNFEEVVDKGASAQSFIERMTNFDKNLPNEKVLPKHSLLYEYFTVYNELTKVKYVTEGMRKPAFLSGEQKKAIVDLLFKTNRKVTVKQLKEDYFKKIECFDSVEISGVEDRFNASLGTYHDLLKIIKDKDFLDNEENEDILEDIVLTLTLFEDREMIEERLKTYAHLFDDKVMKQLKRRRYTGWGRLSRKLINGIRDKQSGKTILDFLKSDGFANRNFMQLIHDDSLTFKEDIQKAQVSGQGDSLHEHIANLAGSPAIKKGILQTVKVVDELVKVMGRHKPENIVIEMARENQTTQKGQKNSRERMKRIEEGIKELGSQILKEHPVENTQLQNEKLYLYYLQNGRDMYVDQELDINRLSDYDVDHIVPQSFLKDDSIDNKVLTRSDKARGKSDNVPSEEVVKKMKNYWRQLLNAKLITQRKFDNLTKAERGGLSELDKAGFIKRQLVETRQITKHVAQILDSRMNTKYDENDKLIREVKVITLKSKLVSDFRKDFQFYKVREINNYHHAHDAYLNAVVGTALIKKYPKLESEFVYGDYKVYDVRKMIAKSEQEIGKATAKYFFYSNIMNFFKTEITLANGEIRKRPLIETNGETGEIVWDKGRDFATVRKVLSMPQVNIVKKTEVQTGGFSKESILPKRNSDKLIARKKDWDPKKYGGFDSPTVAYSVLVVAKVEKGKSKKLKSVKELLGITIMERSSFEKNPIDFLEAKGYKEVKKDLIIKLPKYSLFELENGRKRMLASAGELQKGNELALPSKYVNFLYLASHYEKLKGSPEDNEQKQLFVEQHKHYLDEIIEQISEFSKRVILADANLDKVLSAYNKHRDKPIREQAENIIHLFTLTNLGAPAAFKYFDTTIDRKRYTSTKEVLDATLIHQSITGLYETRIDLSQLGGDGGGSSGGGEAAAKGGTLQLDDEYRLYSPLVKPDQNIQFWLEQFPQAWAETAGMGLAKQVPPQVIQLKASATPVSVRQYPLSKEAQEGIRPHVQRLIQQGILVPVQSPWNTPLLPVRKPGTNDYRPVQDLREVNKRVQDIHPTVPNPYNLLCALPPQRSWYTVLDLKDAFFCLRLHPTSQPLFAFEWRDPGTGRTGQLTWTRLPQGFKNSPTIFNEALHRDLANFRIQHPQVTLLQYVDDLLLAGATKQDCLEGTKALLLELSDLGYRASAKKAQICRREVTYLGYSLRDGQRWLTEARKKTVVQIPAPTTAKQVREFLGTAGFCRLWIPGFATLAAPLYPLTKPKGEFSWAPEHQKAFDAIKKALLSAPALALPDVTKPFTLYVDERKGVARGVLTQTLGPWRRPVAYLSKKLDPVASGWPVCLKAIAAVAILVKDADKLTLGQNITVIAPHALENIVRQPPDRWMTNARMTHYQSLLLTERVTFAPPAALNPATLLPEETDEPVTHDCHQLLIEETGVRKDLTDIPLTGEVLTWFTDGSSYVVEGKRMAGAAVVDGTRTIWASSLPEGTSAQKAELMALTQALRLAEGKSINIYTDSRYAFATAHVHGAIYKQRGWLTSAGREIKNKEEILSLLEALHLPKRLAIIHCPGHQKAKDPISRGNQMADRVAKQAAQGVNLLAGKRTADGSEFEKRTADGSEFESPKKKAKVE

SEQ ID NO: 318 - protein, 2090 aa, synthetic construct; identical to SEQ ID NO: 121

SEQ ID NO: 319 - protein, 2090 aa, synthetic construct; identical to SEQ ID NO: 124

SEQ ID NO: 320 - protein, 2088 aa, synthetic construct
MPAAKRVKLDGGDKKYSIGLDIGTNSVGWAVITDEYKVPSKKFKVLGNTDRHSIKKNLIGALLFDSGETAEATRLKRTARRRYTRRKNRICYLQEIFSNEMAKVDDSFFHRLEESFLVEEDKKHERHPIFGNIVDEVAYHEKYPTIYHLRKKLVDSTDKADLRLIYLALAHMIKFRGHFLIEGDLNPDNSDVDKLFIQLVQTYNQLFEENPINASGVDAKAILSARLSKSRRLENLIAQLPGEKKNGLFGNLIALSLGLTPNFKSNFDLAEDAKLQLSKDTYDDDLDNLLAQIGDQYADLFLAAKNLSDAILLSDILRVNTEITKAPLSASMIKRYDEHHQDLTLLKALVRQQLPEKYKEIFFDQSKNGYAGYIDGGASQEEFYKFIKPILEKMDGTEELLVKLNREDLLRKQRTFDNGSIPHQIHLGELHAILRRQEDFYPFLKDNREKIEKILTFRIPYYVGPLARGNSRFAWMTRKSEETITPWNFEEVVDKGASAQSFIERMTNFDKNLPNEKVLPKHSLLYEYFTVYNELTKVKYVTEGMRKPAFLSGEQKKAIVDLLFKTNRKVTVKQLKEDYFKKIECFDSVEISGVEDRFNASLGTYHDLLKIIKDKDFLDNEENEDILEDIVLTLTLFEDREMIEERLKTYAHLFDDKVMKQLKRRRYTGWGRLSRKLINGIRDKQSGKTILDFLKSDGFANRNFMQLIHDDSLTFKEDIQKAQVSGQGDSLHEHIANLAGSPAIKKGILQTVKVVDELVKVMGRHKPENIVIEMARENQTTQKGQKNSRERMKRIEEGIKELGSQILKEHPVENTQLQNEKLYLYYLQNGRDMYVDQELDINRLSDYDVDHIVPQSFLKDDSIDNKVLTRSDKARGKSDNVPSEEVVKKMKNYWRQLLNAKLITQRKFDNLTKAERGGLSELDKAGFIKRQLVETRQITKHVAQILDSRMNTKYDENDKLIREVKVITLKSKLVSDFRKDFQFYKVREINNYHHAHDAYLNAVVGTALIKKYPKLESEFVYGDYKVYDVRKMIAKSEQEIGKATAKYFFYSNIMNFFKTEITLANGEIRKRPLIETNGETGEIVWDKGRDFATVRKVLSMPQVNIVKKTEVQTGGFSKESILPKRNSDKLIARKKDWDPKKYGGFDSPTVAYSVLVVAKVEKGKSKKLKSVKELLGITIMERSSFEKNPIDFLEAKGYKEVKKDLIIKLPKYSLFELENGRKRMLASAGELQKGNELALPSKYVNFLYLASHYEKLKGSPEDNEQKQLFVEQHKHYLDEIIEQISEFSKRVILADANLDKVLSAYNKHRDKPIREQAENIIHLFTLTNLGAPAAFKYFDTTIDRKRYTSTKEVLDATLIHQSITGLYETRIDLSQLGGDGGGGGGGSGSSGGTLQLDDEYRLYSPLVKPDQNIQFWLEQFPQAWAETAGMGLAKQVPPQVIQLKASATPVSVRQYPLSKEAQEGIRPHVQRLIQQGILVPVQSPWNTPLLPVRKPGTNDYRPVQDLREVNKRVQDIHPTVPNPYNLLCALPPQRSWYTVLDLKDAFFCLRLHPTSQPLFAFEWRDPGTGRTGQLTWTRLPQGFKNSPTIFNEALHRDLANFRIQHPQVTLLQYVDDLLLAGATKQDCLEGTKALLLELSDLGYRASAKKAQICRREVTYLGYSLRDGQRWLTEARKKTVVQIPAPTTAKQVREFLGTAGFCRLWIPGFATLAAPLYPLTKPKGEFSWAPEHQKAFDAIKKALLSAPALALPDVTKPFTLYVDERKGVARGVLTQTLGPWRRPVAYLSKKLDPVASGWPVCLKAIAAVAILVKDADKLTLGQNITVIAPHALENIVRQPPDRWMTNARMTHYQSLLLTERVTFAPPAALNPATLLPEETDEPVTHDCHQLLIEETGVRKDLTDIPLTGEVLTWFTDGSSYVVEGKRMAGAAVVDGTRTIWASSLPEGTSAQKAELMALTQALRLAEGKSINIYTDSRYAFATAHVHGAIYKQRGWLTSAGREIKNKEEILSLLEALHLPKRLAIIHCPGHQKAKDPISRGNQMADRVAKQAAQGVNLLAGKRTADGSEFEKRTADGSEFESPKKKAKVE

SEQ ID NO: 321 - protein, 2090 aa, synthetic construct; identical to SEQ ID NO: 138

SEQ ID NO: 322 - protein, 2090 aa, synthetic construct
MPAAKRVKLDGGDKKYSIGLDIGTNSVGWAVITDEYKVPSKKFKVLGNTDRHSIKKNLIGALLFDSGETAEATRLKRTARRRYTRRKNRICYLQEIFSNEMAKVDDSFFHRLEESFLVEEDKKHERHPIFGNIVDEVAYHEKYPTIYHLRKKLVDSTDKADLRLIYLALAHMIKFRGHFLIEGDLNPDNSDVDKLFIQLVQTYNQLFEENPINASGVDAKAILSARLSKSRRLENLIAQLPGEKKNGLFGNLIALSLGLTPNFKSNFDLAEDAKLQLSKDTYDDDLDNLLAQIGDQYADLFLAAKNLSDAILLSDILRVNTEITKAPLSASMIKRYDEHHQDLTLLKALVRQQLPEKYKEIFFDQSKNGYAGYIDGGASQEEFYKFIKPILEKMDGTEELLVKLNREDLLRKQRTFDNGSIPHQIHLGELHAILRRQEDFYPFLKDNREKIEKILTFRIPYYVGPLARGNSRFAWMTRKSEETITPWNFEEVVDKGASAQSFIERMTNFDKNLPNEKVLPKHSLLYEYFTVYNELTKVKYVTEGMRKPAFLSGEQKKAIVDLLFKTNRKVTVKQLKEDYFKKIECFDSVEISGVEDRFNASLGTYHDLLKIIKDKDFLDNEENEDILEDIVLTLTLFEDREMIEERLKTYAHLFDDKVMKQLKRRRYTGWGRLSRKLINGIRDKQSGKTILDFLKSDGFANRNFMQLIHDDSLTFKEDIQKAQVSGQGDSLHEHIANLAGSPAIKKGILQTVKVVDELVKVMGRHKPENIVIEMARENQTTQKGQKNSRERMKRIEEGIKELGSQILKEHPVENTQLQNEKLYLYYLQNGRDMYVDQELDINRLSDYDVDHIVPQSFLKDDSIDNKVLTRSDKARGKSDNVPSEEVVKKMKNYWRQLLNAKLITQRKFDNLTKAERGGLSELDKAGFIKRQLVETRQITKHVAQILDSRMNTKYDENDKLIREVKVITLKSKLVSDFRKDFQFYKVREINNYHHAHDAYLNAVVGTALIKKYPKLESEFVYGDYKVYDVRKMIAKSEQEIGKATAKYFFYSNIMNFFKTEITLANGEIRKRPLIETNGETGEIVWDKGRDFATVRKVLSMPQVNIVKKTEVQTGGFSKESILPKRNSDKLIARKKDWDPKKYGGFDSPTVAYSVLVVAKVEKGKSKKLKSVKELLGITIMERSSFEKNPIDFLEAKGYKEVKKDLIIKLPKYSLFELENGRKRMLASAGELQKGNELALPSKYVNFLYLASHYEKLKGSPEDNEQKQLFVEQHKHYLDEIIEQISEFSKRVILADANLDKVLSAYNKHRDKPIREQAENIIHLFTLTNLGAPAAFKYFDTTIDRKRYTSTKEVLDATLIHQSITGLYETRIDLSQLGGDGGGGGEAAAKGGSGGTLQLDDEYRLYSPLVKPDQNIQFWLEQFPQAWAETAGMGLAKQVPPQVIQLKASATPVSVRQYPLSKEAQEGIRPHVQRLIQQGILVPVQSPWNTPLLPVRKPGTNDYRPVQDLREVNKRVQDIHPTVPNPYNLLCALPPQRSWYTVLDLKDAFFCLRLHPTSQPLFAFEWRDPGTGRTGQLTWTRLPQGFKNSPTIFNEALHRDLANFRIQHPQVTLLQYVDDLLLAGATKQDCLEGTKALLLELSDLGYRASAKKAQICRREVTYLGYSLRDGQRWLTEARKKTVVQIPAPTTAKQVREFLGTAGFCRLWIPGFATLAAPLYPLTKPKGEFSWAPEHQKAFDAIKKALLSAPALALPDVTKPFTLYVDERKGVARGVLTQTLGPWRRPVAYLSKKLDPVASGWPVCLKAIAAVAILVKDADKLTLGQNITVIAPHALENIVRQPPDRWMTNARMTHYQSLLLTERVTFAPPAALNPATLLPEETDEPVTHDCHQLLIEETGVRKDLTDIPLTGEVLTWFTDGSSYVVEGKRMAGAAVVDGTRTIWASSLPEGTSAQKAELMALTQALRLAEGKSINIYTDSRYAFATAHVHGAIYKQRGWLTSAGREIKNKEEILSLLEALHLPKRLAIIHCPGHQKAKDPISRGNQMADRVAKQAAQGVNLLAGKRTADGSEFEKRTADGSEFESPKKKAKVE

SEQ ID NO: 323 - skipped

SEQ ID NO: 324 - protein, 2090 aa, synthetic construct
MPAAKRVKLDGGDKKYSIGLDIGTNSVGWAVITDEYKVPSKKFKVLGNTDRHSIKKNLIGALLFDSGETAEATRLKRTARRRYTRRKNRICYLQEIFSNEMAKVDDSFFHRLEESFLVEEDKKHERHPIFGNIVDEVAYHEKYPTIYHLRKKLVDSTDKADLRLIYLALAHMIKFRGHFLIEGDLNPDNSDVDKLFIQLVQTYNQLFEENPINASGVDAKAILSARLSKSRRLENLIAQLPGEKKNGLFGNLIALSLGLTPNFKSNFDLAEDAKLQLSKDTYDDDLDNLLAQIGDQYADLFLAAKNLSDAILLSDILRVNTEITKAPLSASMIKRYDEHHQDLTLLKALVRQQLPEKYKEIFFDQSKNGYAGYIDGGASQEEFYKFIKPILEKMDGTEELLVKLNREDLLRKQRTFDNGSIPHQIHLGELHAILRRQEDFYPFLKDNREKIEKILTFRIPYYVGPLARGNSRFAWMTRKSEETITPWNFEEVVDKGASAQSFIERMTNFDKNLPNEKVLPKHSLLYEYFTVYNELTKVKYVTEGMRKPAFLSGEQKKAIVDLLFKTNRKVTVKQLKEDYFKKIECFDSVEISGVEDRFNASLGTYHDLLKIIKDKDFLDNEENEDILEDIVLTLTLFEDREMIEERLKTYAHLFDDKVMKQLKRRRYTGWGRLSRKLINGIRDKQSGKTILDFLKSDGFANRNFMQLIHDDSLTFKEDIQKAQVSGQGDSLHEHIANLAGSPAIKKGILQTVKVVDELVKVMGRHKPENIVIEMARENQTTQKGQKNSRERMKRIEEGIKELGSQILKEHPVENTQLQNEKLYLYYLQNGRDMYVDQELDINRLSDYDVDHIVPQSFLKDDSIDNKVLTRSDKARGKSDNVPSEEVVKKMKNYWRQLLNAKLITQRKFDNLTKAERGGLSELDKAGFIKRQLVETRQITKHVAQILDSRMNTKYDENDKLIREVKVITLKSKLVSDFRKDFQFYKVREINNYHHAHDAYLNAVVGTALIKKYPKLESEFVYGDYKVYDVRKMIAKSEQEIGKATAKYFFYSNIMNFFKTEITLANGEIRKRPLIETNGETGEIVWDKGRDFATVRKVLSMPQVNIVKKTEVQTGGFSKESILPKRNSDKLIARKKDWDPKKYGGFDSPTVAYSVLVVAKVEKGKSKKLKSVKELLGITIMERSSFEKNPIDFLEAKGYKEVKKDLIIKLPKYSLFELENGRKRMLASAGELQKGNELALPSKYVNFLYLASHYEKLKGSPEDNEQKQLFVEQHKHYLDEIIEQISEFSKRVILADANLDKVLSAYNKHRDKPIREQAENIIHLFTLTNLGAPAAFKYFDTTIDRKRYTSTKEVLDATLIHQSITGLYETRIDLSQLGGDGGGGGEAAAKPAPGGTLQLDDEYRLYSPLVKPDQNIQFWLEQFPQAWAETAGMGLAKQVPPQVIQLKASATPVSVRQYPLSKEAQEGIRPHVQRLIQQGILVPVQSPWNTPLLPVRKPGTNDYRPVQDLREVNKRVQDIHPTVPNPYNLLCALPPQRSWYTVLDLKDAFFCLRLHPTSQPLFAFEWRDPGTGRTGQLTWTRLPQGFKNSPTIFNEALHRDLANFRIQHPQVTLLQYVDDLLLAGATKQDCLEGTKALLLELSDLGYRASAKKAQICRREVTYLGYSLRDGQRWLTEARKKTVVQIPAPTTAKQVREFLGTAGFCRLWIPGFATLAAPLYPLTKPKGEFSWAPEHQKAFDAIKKALLSAPALALPDVTKPFTLYVDERKGVARGVLTQTLGPWRRPVAYLSKKLDPVASGWPVCLKAIAAVAILVKDADKLTLGQNITVIAPHALENIVRQPPDRWMTNARMTHYQSLLLTERVTFAPPAALNPATLLPEETDEPVTHDCHQLLIEETGVRKDLTDIPLTGEVLTWFTDGSSYVVEGKRMAGAAVVDGTRTIWASSLPEGTSAQKAELMALTQALRLAEGKSINIYTDSRYAFATAHVHGAIYKQRGWLTSAGREIKNKEEILSLLEALHLPKRLAIIHCPGHQKAKDPISRGNQMADRVAKQAAQGVNLLAGKRTADGSEFEKRTADGSEFESPKKKAKVE

SEQ ID NO: 325-327 - skipped (3 entries)

SEQ ID NO: 328 - protein, 2095 aa, synthetic construct; identical to SEQ ID NO: 122

SEQ ID NO: 329-331 - skipped (3 entries)

SEQ ID NO: 332 - protein, 2085 aa, synthetic construct
MPAAKRVKLDGGDKKYSIGLDIGTNSVGWAVITDEYKVPSKKFKVLGNTDRHSIKKNLIGALLFDSGETAEATRLKRTARRRYTRRKNRICYLQEIFSNEMAKVDDSFFHRLEESFLVEEDKKHERHPIFGNIVDEVAYHEKYPTIYHLRKKLVDSTDKADLRLIYLALAHMIKFRGHFLIEGDLNPDNSDVDKLFIQLVQTYNQLFEENPINASGVDAKAILSARLSKSRRLENLIAQLPGEKKNGLFGNLIALSLGLTPNFKSNFDLAEDAKLQLSKDTYDDDLDNLLAQIGDQYADLFLAAKNLSDAILLSDILRVNTEITKAPLSASMIKRYDEHHQDLTLLKALVRQQLPEKYKEIFFDQSKNGYAGYIDGGASQEEFYKFIKPILEKMDGTEELLVKLNREDLLRKQRTFDNGSIPHQIHLGELHAILRRQEDFYPFLKDNREKIEKILTFRIPYYVGPLARGNSRFAWMTRKSEETITPWNFEEVVDKGASAQSFIERMTNFDKNLPNEKVLPKHSLLYEYFTVYNELTKVKYVTEGMRKPAFLSGEQKKAIVDLLFKTNRKVTVKQLKEDYFKKIECFDSVEISGVEDRFNASLGTYHDLLKIIKDKDFLDNEENEDILEDIVLTLTLFEDREMIEERLKTYAHLFDDKVMKQLKRRRYTGWGRLSRKLINGIRDKQSGKTILDFLKSDGFANRNFMQLIHDDSLTFKEDIQKAQVSGQGDSLHEHIANLAGSPAIKKGILQTVKVVDELVKVMGRHKPENIVIEMARENQTTQKGQKNSRERMKRIEEGIKELGSQILKEHPVENTQLQNEKLYLYYLQNGRDMYVDQELDINRLSDYDVDHIVPQSFLKDDSIDNKVLTRSDKARGKSDNVPSEEVVKKMKNYWRQLLNAKLITQRKFDNLTKAERGGLSELDKAGFIKRQLVETRQITKHVAQILDSRMNTKYDENDKLIREVKVITLKSKLVSDFRKDFQFYKVREINNYHHAHDAYLNAVVGTALIKKYPKLESEFVYGDYKVYDVRKMIAKSEQEIGKATAKYFFYSNIMNFFKTEITLANGEIRKRPLIETNGETGEIVWDKGRDFATVRKVLSMPQVNIVKKTEVQTGGFSKESILPKRNSDKLIARKKDWDPKKYGGFDSPTVAYSVLVVAKVEKGKSKKLKSVKELLGITIMERSSFEKNPIDFLEAKGYKEVKKDLIIKLPKYSLFELENGRKRMLASAGELQKGNELALPSKYVNFLYLASHYEKLKGSPEDNEQKQLFVEQHKHYLDEIIEQISEFSKRVILADANLDKVLSAYNKHRDKPIREQAENIIHLFTLTNLGAPAAFKYFDTTIDRKRYTSTKEVLDATLIHQSITGLYETRIDLSQLGGDGGPAPGGGGGTLQLDDEYRLYSPLVKPDQNIQFWLEQFPQAWAETAGMGLAKQVPPQVIQLKASATPVSVRQYPLSKEAQEGIRPHVQRLIQQGILVPVQSPWNTPLLPVRKPGTNDYRPVQDLREVNKRVQDIHPTVPNPYNLLCALPPQRSWYTVLDLKDAFFCLRLHPTSQPLFAFEWRDPGTGRTGQLTWTRLPQGFKNSPTIFNEALHRDLANFRIQHPQVTLLQYVDDLLLAGATKQDCLEGTKALLLELSDLGYRASAKKAQICRREVTYLGYSLRDGQRWLTEARKKTVVQIPAPTTAKQVREFLGTAGFCRLWIPGFATLAAPLYPLTKPKGEFSWAPEHQKAFDAIKKALLSAPALALPDVTKPFTLYVDERKGVARGVLTQTLGPWRRPVAYLSKKLDPVASGWPVCLKAIAAVAILVKDADKLTLGQNITVIAPHALENIVRQPPDRWMTNARMTHYQSLLLTERVTFAPPAALNPATLLPEETDEPVTHDCHQLLIEETGVRKDLTDIPLTGEVLTWFTDGSSYVVEGKRMAGAAVVDGTRTIWASSLPEGTSAQKAELMALTQALRLAEGKSINIYTDSRYAFATAHVHGAIYKQRGWLTSAGREIKNKEEILSLLEALHLPKRLAIIHCPGHQKAKDPISRGNQMADRVAKQAAQGVNLLAGKRTADGSEFEKRTADGSEFESPKKKAKVE

SEQ ID NO: 333-339 - skipped (7 entries)

SEQ ID NO: 340 - protein, 2088 aa, synthetic construct; identical to SEQ ID NO: 173

SEQ ID NO: 341 - protein, 2090 aa, synthetic construct; identical to SEQ ID NO: 141

SEQ ID NO: 342-345 - skipped (4 entries)

SEQ ID NO: 346 - protein, 2090 aa, synthetic construct
MPAAKRVKLDGGDKKYSIGLDIGTNSVGWAVITDEYKVPSKKFKVLGNTDRHSIKKNLIGALLFDSGETAEATRLKRTARRRYTRRKNRICYLQEIFSNEMAKVDDSFFHRLEESFLVEEDKKHERHPIFGNIVDEVAYHEKYPTIYHLRKKLVDSTDKADLRLIYLALAHMIKFRGHFLIEGDLNPDNSDVDKLFIQLVQTYNQLFEENPINASGVDAKAILSARLSKSRRLENLIAQLPGEKKNGLFGNLIALSLGLTPNFKSNFDLAEDAKLQLSKDTYDDDLDNLLAQIGDQYADLFLAAKNLSDAILLSDILRVNTEITKAPLSASMIKRYDEHHQDLTLLKALVRQQLPEKYKEIFFDQSKNGYAGYIDGGASQEEFYKFIKPILEKMDGTEELLVKLNREDLLRKQRTFDNGSIPHQIHLGELHAILRRQEDFYPFLKDNREKIEKILTFRIPYYVGPLARGNSRFAWMTRKSEETITPWNFEEVVDKGASAQSFIERMTNFDKNLPNEKVLPKHSLLYEYFTVYNELTKVKYVTEGMRKPAFLSGEQKKAIVDLLFKTNRKVTVKQLKEDYFKKIECFDSVEISGVEDRFNASLGTYHDLLKIIKDKDFLDNEENEDILEDIVLTLTLFEDREMIEERLKTYAHLFDDKVMKQLKRRRYTGWGRLSRKLINGIRDKQSGKTILDFLKSDGFANRNFMQLIHDDSLTFKEDIQKAQVSGQGDSLHEHIANLAGSPAIKKGILQTVKVVDELVKVMGRHKPENIVIEMARENQTTQKGQKNSRERMKRIEEGIKELGSQILKEHPVENTQLQNEKLYLYYLQNGRDMYVDQELDINRLSDYDVDHIVPQSFLKDDSIDNKVLTRSDKARGKSDNVPSEEVVKKMKNYWRQLLNAKLITQRKFDNLTKAERGGLSELDKAGFIKRQLVETRQITKHVAQILDSRMNTKYDENDKLIREVKVITLKSKLVSDFRKDFQFYKVREINNYHHAHDAYLNAVVGTALIKKYPKLESEFVYGDYKVYDVRKMIAKSEQEIGKATAKYFFYSNIMNFFKTEITLANGEIRKRPLIETNGETGEIVWDKGRDFATVRKVLSMPQVNIVKKTEVQTGGFSKESILPKRNSDKLIARKKDWDPKKYGGFDSPTVAYSVLVVAKVEKGKSKKLKSVKELLGITIMERSSFEKNPIDFLEAKGYKEVKKDLIIKLPKYSLFELENGRKRMLASAGELQKGNELALPSKYVNFLYLASHYEKLKGSPEDNEQKQLFVEQHKHYLDEIIEQISEFSKRVILADANLDKVLSAYNKHRDKPIREQAENIIHLFTLTNLGAPAAFKYFDTTIDRKRYTSTKEVLDATLIHQSITGLYETRIDLSQLGGDGGGGGPAPEAAAKGGTLQLDDEYRLYSPLVKPDQNIQFWLEQFPQAWAETAGMGLAKQVPPQVIQLKASATPVSVRQYPLSKEAQEGIRPHVQRLIQQGILVPVQSPWNTPLLPVRKPGTNDYRPVQDLREVNKRVQDIHPTVPNPYNLLCALPPQRSWYTVLDLKDAFFCLRLHPTSQPLFAFEWRDPGTGRTGQLTWTRLPQGFKNSPTIFNEALHRDLANFRIQHPQVTLLQYVDDLLLAGATKQDCLEGTKALLLELSDLGYRASAKKAQICRREVTYLGYSLRDGQRWLTEARKKTVVQIPAPTTAKQVREFLGTAGFCRLWIPGFATLAAPLYPLTKPKGEFSWAPEHQKAFDAIKKALLSAPALALPDVTKPFTLYVDERKGVARGVLTQTLGPWRRPVAYLSKKLDPVASGWPVCLKAIAAVAILVKDADKLTLGQNITVIAPHALENIVRQPPDRWMTNARMTHYQSLLLTERVTFAPPAALNPATLLPEETDEPVTHDCHQLLIEETGVRKDLTDIPLTGEVLTWFTDGSSYVVEGKRMAGAAVVDGTRTIWASSLPEGTSAQKAELMALTQALRLAEGKSINIYTDSRYAFATAHVHGAIYKQRGWLTSAGREIKNKEEILSLLEALHLPKRLAIIHCPGHQKAKDPISRGNQMADRVAKQAAQGVNLLAGKRTADGSEFEKRTADGSEFESPKKKAKVE

SEQ ID NO: 347-351 - skipped (5 entries)

SEQ ID NO: 352 - protein, 2090 aa, synthetic construct
MPAAKRVKLDGGDKKYSIGLDIGTNSVGWAVITDEYKVPSKKFKVLGNTDRHSIKKNLIGALLFDSGETAEATRLKRTARRRYTRRKNRICYLQEIFSNEMAKVDDSFFHRLEESFLVEEDKKHERHPIFGNIVDEVAYHEKYPTIYHLRKKLVDSTDKADLRLIYLALAHMIKFRGHFLIEGDLNPDNSDVDKLFIQLVQTYNQLFEENPINASGVDAKAILSARLSKSRRLENLIAQLPGEKKNGLFGNLIALSLGLTPNFKSNFDLAEDAKLQLSKDTYDDDLDNLLAQIGDQYADLFLAAKNLSDAILLSDILRVNTEITKAPLSASMIKRYDEHHQDLTLLKALVRQQLPEKYKEIFFDQSKNGYAGYIDGGASQEEFYKFIKPILEKMDGTEELLVKLNREDLLRKQRTFDNGSIPHQIHLGELHAILRRQEDFYPFLKDNREKIEKILTFRIPYYVGPLARGNSRFAWMTRKSEETITPWNFEEVVDKGASAQSFIERMTNFDKNLPNEKVLPKHSLLYEYFTVYNELTKVKYVTEGMRKPAFLSGEQKKAIVDLLFKTNRKVTVKQLKEDYFKKIECFDSVEISGVEDRFNASLGTYHDLLKIIKDKDFLDNEENEDILEDIVLTLTLFEDREMIEERLKTYAHLFDDKVMKQLKRRRYTGWGRLSRKLINGIRDKQSGKTILDFLKSDGFANRNFMQLIHDDSLTFKEDIQKAQVSGQGDSLHEHIANLAGSPAIKKGILQTVKVVDELVKVMGRHKPENIVIEMARENQTTQKGQKNSRERMKRIEEGIKELGSQILKEHPVENTQLQNEKLYLYYLQNGRDMYVDQELDINRLSDYDVDHIVPQSFLKDDSIDNKVLTRSDKARGKSDNVPSEEVVKKMKNYWRQLLNAKLITQRKFDNLTKAERGGLSELDKAGFIKRQLVETRQITKHVAQILDSRMNTKYDENDKLIREVKVITLKSKLVSDFRKDFQFYKVREINNYHHAHDAYLNAVVGTALIKKYPKLESEFVYGDYKVYDVRKMIAKSEQEIGKATAKYFFYSNIMNFFKTEITLANGEIRKRPLIETNGETGEIVWDKGRDFATVRKVLSMPQVNIVKKTEVQTGGFSKESILPKRNSDKLIARKKDWDPKKYGGFDSPTVAYSVLVVAKVEKGKSKKLKSVKELLGITIMERSSFEKNPIDFLEAKGYKEVKKDLIIKLPKYSLFELENGRKRMLASAGELQKGNELALPSKYVNFLYLASHYEKLKGSPEDNEQKQLFVEQHKHYLDEIIEQISEFSKRVILADANLDKVLSAYNKHRDKPIREQAENIIHLFTLTNLGAPAAFKYFDTTIDRKRYTSTKEVLDATLIHQSITGLYETRIDLSQLGGDGGGGSEAAAKGGGGGTLQLDDEYRLYSPLVKPDQNIQFWLEQFPQAWAETAGMGLAKQVPPQVIQLKASATPVSVRQYPLSKEAQEGIRPHVQRLIQQGILVPVQSPWNTPLLPVRKPGTNDYRPVQDLREVNKRVQDIHPTVPNPYNLLCALPPQRSWYTVLDLKDAFFCLRLHPTSQPLFAFEWRDPGTGRTGQLTWTRLPQGFKNSPTIFNEALHRDLANFRIQHPQVTLLQYVDDLLLAGATKQDCLEGTKALLLELSDLGYRASAKKAQICRREVTYLGYSLRDGQRWLTEARKKTVVQIPAPTTAKQVREFLGTAGFCRLWIPGFATLAAPLYPLTKPKGEFSWAPEHQKAFDAIKKALLSAPALALPDVTKPFTLYVDERKGVARGVLTQTLGPWRRPVAYLSKKLDPVASGWPVCLKAIAAVAILVKDADKLTLGQNITVIAPHALENIVRQPPDRWMTNARMTHYQSLLLTERVTFAPPAALNPATLLPEETDEPVTHDCHQLLIEETGVRKDLTDIPLTGEVLTWFTDGSSYVVEGKRMAGAAVVDGTRTIWASSLPEGTSAQKAELMALTQALRLAEGKSINIYTDSRYAFATAHVHGAIYKQRGWLTSAGREIKNKEEILSLLEALHLPKRLAIIHCPGHQKAKDPISRGNQMADRVAKQAAQGVNLLAGKRTADGSEFEKRTADGSEFESPKKKAKVE

SEQ ID NO: 353-357 - skipped (5 entries)

SEQ ID NO: 358 - protein, 2090 aa, synthetic construct
MPAAKRVKLDGGDKKYSIGLDIGTNSVGWAVITDEYKVPSKKFKVLGNTDRHSIKKNLIGALLFDSGETAEATRLKRTARRRYTRRKNRICYLQEIFSNEMAKVDDSFFHRLEESFLVEEDKKHERHPIFGNIVDEVAYHEKYPTIYHLRKKLVDSTDKADLRLIYLALAHMIKFRGHFLIEGDLNPDNSDVDKLFIQLVQTYNQLFEENPINASGVDAKAILSARLSKSRRLENLIAQLPGEKKNGLFGNLIALSLGLTPNFKSNFDLAEDAKLQLSKDTYDDDLDNLLAQIGDQYADLFLAAKNLSDAILLSDILRVNTEITKAPLSASMIKRYDEHHQDLTLLKALVRQQLPEKYKEIFFDQSKNGYAGYIDGGASQEEFYKFIKPILEKMDGTEELLVKLNREDLLRKQRTFDNGSIPHQIHLGELHAILRRQEDFYPFLKDNREKIEKILTFRIPYYVGPLARGNSRFAWMTRKSEETITPWNFEEVVDKGASAQSFIERMTNFDKNLPNEKVLPKHSLLYEYFTVYNELTKVKYVTEGMRKPAFLSGEQKKAIVDLLFKTNRKVTVKQLKEDYFKKIECFDSVEISGVEDRFNASLGTYHDLLKIIKDKDFLDNEENEDILEDIVLTLTLFEDREMIEERLKTYAHLFDDKVMKQLKRRRYTGWGRLSRKLINGIRDKQSGKTILDFLKSDGFANRNFMQLIHDDSLTFKEDIQKAQVSGQGDSLHEHIANLAGSPAIKKGILQTVKVVDELVKVMGRHKPENIVIEMARENQTTQKGQKNSRERMKRIEEGIKELGSQILKEHPVENTQLQNEKLYLYYLQNGRDMYVDQELDINRLSDYDVDHIVPQSFLKDDSIDNKVLTRSDKARGKSDNVPSEEVVKKMKNYWRQLLNAKLITQRKFDNLTKAERGGLSELDKAGFIKRQLVETRQITKHVAQILDSRMNTKYDENDKLIREVKVITLKSKLVSDFRKDFQFYKVREINNYHHAHDAYLNAVVGTALIKKYPKLESEFVYGDYKVYDVRKMIAKSEQEIGKATAKYFFYSNIMNFFKTEITLANGEIRKRPLIETNGETGEIVWDKGRDFATVRKVLSMPQVNIVKKTEVQTGGFSKESILPKRNSDKLIARKKDWDPKKYGGFDSPTVAYSVLVVAKVEKGKSKKLKSVKELLGITIMERSSFEKNPIDFLEAKGYKEVKKDLIIKLPKYSLFELENGRKRMLASAGELQKGNELALPSKYVNFLYLASHYEKLKGSPEDNEQKQLFVEQHKHYLDEIIEQISEFSKRVILADANLDKVLSAYNKHRDKPIREQAENIIHLFTLTNLGAPAAFKYFDTTIDRKRYTSTKEVLDATLIHQSITGLYETRIDLSQLGGDGGEAAAKPAPGGGGGTLQLDDEYRLYSPLVKPDQNIQFWLEQFPQAWAETAGMGLAKQVPPQVIQLKASATPVSVRQYPLSKEAQEGIRPHVQRLIQQGILVPVQSPWNTPLLPVRKPGTNDYRPVQDLREVNKRVQDIHPTVPNPYNLLCALPPQRSWYTVLDLKDAFFCLRLHPTSQPLFAFEWRDPGTGRTGQLTWTRLPQGFKNSPTIFNEALHRDLANFRIQHPQVTLLQYVDDLLLAGATKQDCLEGTKALLLELSDLGYRASAKKAQICRREVTYLGYSLRDGQRWLTEARKKTVVQIPAPTTAKQVREFLGTAGFCRLWIPGFATLAAPLYPLTKPKGEFSWAPEHQKAFDAIKKALLSAPALALPDVTKPFTLYVDERKGVARGVLTQTLGPWRRPVAYLSKKLDPVASGWPVCLKAIAAVAILVKDADKLTLGQNITVIAPHALENIVRQPPDRWMTNARMTHYQSLLLTERVTFAPPAALNPATLLPEETDEPVTHDCHQLLIEETGVRKDLTDIPLTGEVLTWFTDGSSYVVEGKRMAGAAVVDGTRTIWASSLPEGTSAQKAELMALTQALRLAEGKSINIYTDSRYAFATAHVHGAIYKQRGWLTSAGREIKNKEEILSLLEALHLPKRLAIIHCPGHQKAKDPISRGNQMADRVAKQAAQGVNLLAGKRTADGSEFEKRTADGSEFESPKKKAKVE

SEQ ID NO: 359-362 - skipped (4 entries)

SEQ ID NO: 363 - protein, 2090 aa, synthetic construct; identical to SEQ ID NO: 139

SEQ ID NO: 364 - skipped

SEQ ID NO: 365 - protein, 2090 aa, synthetic construct; identical to SEQ ID NO: 133

SEQ ID NO: 366-383 - skipped (18 entries)

SEQ ID NO: 384 - protein, 2088 aa, synthetic construct; identical to SEQ ID NO: 144

SEQ ID NO: 385 - skipped

SEQ ID NO: 386 - protein, 2085 aa, synthetic construct; identical to SEQ ID NO: 123

SEQ ID NO: 387-391 - skipped (5 entries)

SEQ ID NO: 392 - protein, 2084 aa, synthetic construct; identical to SEQ ID NO: 147

SEQ ID NO: 393-395 - skipped (3 entries)

SEQ ID NO: 396 - protein, 2097 aa, synthetic construct; identical to SEQ ID NO: 113

SEQ ID NO: 397-399 - skipped (3 entries)

SEQ ID NO: 400 - protein, 965 aa, synthetic construct
MCFLIPVVTNTRKTREVRCRRNPHNLRSIHVSTISQLSLSVGLWNCQSAVNKADFITSIATYSDYNLMALTETWLRPEDTATHATLSANFSFSHTPRQTGRGGGTGLLISKEWKFTLIPSLPTISSFEFHAVTIIHPFYINVVVIYRPPGKLGHFLDELDVLLSSFSNFATPLLVLGDFNIYVDKPQAADFQTLLASFDLKRAPTSATHKSGNQLDLIYTRHCFTDQTIVTPLQISDHFLLSLNIHITPEPPHTPTLVTFRRNLRSLSPNRLSTIVSDSLPPSRKLTALDSNSATNTLCSTLASCLDRLCPLASRPARASPPAPWLSDALREHRSKLRAAERIWRKTKNPAHLLTYQTLLSSFSAEVTSAKQTYYRLKINNATNPRLLFKTFSSLLYPPPPPASSTLTTDDFATFFCTKTAKISAQFAAPTTNTQDTTPTPHTLTSFSQLSESEVSKLVLSSHATTCPLDPIPSHLLQAISPAVIPTLTHIINTSLDSGLFPTTFKQARVTPLLKKPNLDHTLLENYRPVSLLPFMAKILEKVVFNQVLDFLTQNNLMDNKQSGFKKGHSTETALLSVVEDLRLAKADSKSSVLILLDLSAAFDTVNHQILLSTLESLGVAGTVIQWFRSYLSDRSFRVSWRGEVSNLQHLNTGVPQGSVLGPLLFSIYTSSLGPVIQRHGFSYHCYADDTQLYLSFHPDDPSVPARISACLLDISHWMKDHHLQLNLAKTEMLVVSANPTLHHNFSIQMDGATITASKMVKSLGVTIDDQLNFSDHISRTARSCRFALYNIRKIRPFLSEHAAQLLVQALVLSKLDYCNSLLAGLPANSIKPLQLLQNAAARVVFNEPKRAHVTPLLVRLHWLPVAARIKFKTLMFAYKVTSGLAPSYLHSLLQIYVPSRNLRSVNERRLVVPSQRGKKSLSRTLTLNLPSWWNELPNCIRTAESLAIFKKRLKTQLFSLHFTS

SEQ ID NO: 401 - protein, 965 aa, synthetic construct
MCFLIPVVTNTRKTREVRCRRNPHNLRSIHVSTISQLSLSVGLWNCQSAVNKADFITSIATYSDYNLMALTETWLRPEDTATHATLSANFSFSHTPRQTGRGGGTGLLISKEWKFTLIPSLPTISSFEFHAVTIIHPFYINVVVIYRPPGKLGHFLDELDVLLSSFSNFATPLLVLGDFNIYVDKPQAADFQTLLASFDLKRAPTSATHKSGNQLDLIYTRHCFTDQTIVTPLQISDHFLLSLNIHITPEPPHTPTLVTFRRNLRSLSPNRLSTIVSDSLPPSRKLTALDSNSATNTLCSTLASCLDRLCPLASRPARASPPAPWLSDALREHRSKLRAAERIWRKTKNPAHLLTYQTLLSSFSAEVTSAKQTYYRLKINNATNPRLLFKTFSSLLYPPPPPASSTLTTDDFATFFCTKTAKISAQFAAPTTNTQDTTPTPHTLTSFSQLSESEVSKLVLSSHATTCPLDPIPSHLLQAISPAVIPTLTHIINTSLDSGLFPTTFKQARVTPLLKKPNLDHTLLENYRPVSLLPFMAKILEKVVFNQVLDFLTQNNLMDNKQSGFKKGHSTETALLSVVEDLRLAKADSKSSVLILLDLSAAFDTVNHQILLSTLESLGVAGTVIQWFRSYLSDRSFRVSWRGEVSNLQHLNTGVPQGSVLGPLLFSIYTSSLGPVIQRHGFSYHCYADDTQLYLSFHPDDPSVPARISACLLDISHWMKDHHLQLNLAKTEMLVVSANPTLHHNFSIQMDGATITASKMVKSLGVTIDDQLNFSDHISRTARSCRFALYNIRKIRPFLSEHAAQLLVQALVLSKLDYCNSLLAGLPANSIKPLQLLQNAAARVVFNEPKRAHVTPLLVRLHWLPVAARIKFKALMFAYKVTSGLAPSYLLSLLQIYVPSRNLRSVNERRLVVPSQRGKKSLSRTLTLNLPSWWNELPNCIRTAESLAIFKKRLKTQLFSLHFTS

SEQ ID NO: 402 - protein, 1110 aa, synthetic construct
MDSTAHPNQGRGLEKVSQTLPALQTPGQHTAAGGSSPLSGRNQRKNTKKLLLGAWNIRTLLDRENTPRPERRTALIGKELARYNIDIAALSETRLPEEGSLSEPTTGYTFFWKGRASNEDRIHGVGLAIKTSLLKQLPDLPVGISERLMKIRLPLSKDRYATIISAYAPTLTSTEETIEQFYSDLSAVLHSVPTNDKLILLGDFNARVGQDHERWKGVLGKHGVGKMNNNGLLLLSKCSEFELTITNTVFRMANKYKTTWMHPRSKQWHLIDYIIVRRRDIQDVKITRAMRGAECWTDHRLVRATLQMRIAPRHPKRAQTVRAFYNVSRLRDPSYLQTFQSCLDDKLSAKGPLTGSSTEKWNQFRDAVKETSKAVLGPKQRNHQDWFDENNTAIEDLLSKKNKAFMEWQNNPNSAPKKDRFKSLQATAQREIRKMQDRWWEKKAEEIQRFADMKNYKQFFSALKTVYGPLKPTTTPLLSSDGDTLIKDKKGISNRWKEHFSQLLNRPSSVDQSALDQIPQNRTIEQLDVPPSIEEVQKAIKQMSAGKAPGKDGIPTEVYKALNGKALQAFHIVLTSIWEEEDMPPELRDASIVALYKNKGSRAACDNYRGISLLSTAGKILARVILNRLLSSVSEQNLPESQCGFRPDRSTIDMVFTVRQMQEKCLEQNLSLYIVFIDLTKAFDTVNRDALWVILSKLGCPAKFVKLIQLFHVDMTGEVLSGGETSDRFNISNGVKQGCVLAPVLFNLFFTQVLRHAVMDLDLGVYIKYRLDGSLFDLRRLTAKTKTTERLILEALFADDCALMAHQENHLQTIVDRFSTATKLFGLTISLSKTEVLFQPAPGRPTNQPCITIDGTQLSNVNTFKYLGSTIANDGSLDHEINARIQKASQALGRLRCKVLQHRGVSTATKLKVYNAVVLSSLLYGCETWTLYRKHMKQLEQFHQRSLRSIMRIRWQDRITNQEVLDRANSTSIEVMVLKTQLRWSGHVIRMDPQRIPRQVFYGELSAGLRKQGRPKKRFKDQLKSNLKWAGITPKQLELAASDRSSWRTHINHAATTFEDERRRRLAAARERRHQATTAPPVTTGVPCPMCHKLCASAFGLQSHMRVHRR

SEQ ID NO: 403 - protein, 1110 aa, synthetic construct
MDSTAHPNQGRGLEKVSQTLPALQTPGQHTAAGGSSPLSGRNQRKNTKKLLLGAWNIRTLLDRENTPRPERRTALIGKELARYNIDIAALSETRLPEEGSLSEPTTGYTFFWKGRASNEDRIHGVGLAIKTSLLKQLPDLPVGISERLMKIRLPLSKDRYATIISAYAPTLTSTEETIEQFYSDLSAVLHSVPTNDKLILLGDFNARVGQDHERWKGVLGKHGVGKMNNNGLLLLSKCSEFELTITNTVFRMANKYKTTWMHPRSKQWHLIDYIIVRRRDIQDVKITRAMRGAECWTDHRLVRATLQMRIAPRHPKRAQTVRAFYNVSRLRDPSYLQTFQSCLDNKLSAKGPLTGSSTEKWNQFRDAVKETSKAVLGPKQRNHQDWFDENNTAIEDLLSKKNKAFMEWQNNPNSAPKKDRFKSLQATAQREIRKMQDRWWEKKAEEIQRFADMKNYKQFFSALKTVYGPLKPTTTPLLSSDGDTLIKDKKGISNRWKEHFSQLLNRPSSVDQSALDQIPQNRSIEQLDVPPSIEEVQKAIKQMSAGKAPGKDGIPTEVYKALNGKALQAFHIVLTSIWEEEDMPPELRDASIVALYKNKGSRAACDNYRGISLLSTAGKILARVILNRLLSSVSEQNLPESQCGFRPDRSTIDMVFTVRQMQEKCLEQNLSLYIVFIDLTKAFDTVNRDALWVILSKLGCPAKFVKLIQLFHVDMTGEVLSGGETSDRFNISNGVKQGCVLAPVLFNLFFTQVLRHAVMDLDLGVYIKYRLDGSLFDLRRLTAKTKTTERLILEALFADDCALMAHQENHLQTIVDRFSTATKLFGLTISLSKTEVLFQPAPGRPTNQPCITIDGTQLSNVNTFKYLGSTIANDGSLDHEINARIQKASQALGRLRCKVLQHRGVSTATKLKVYNAVVLSSLLYGCETWTLYRKHMKQLEQFHQRSLRSIMRIRWQDRITNQEVLDRANSTSIEVMVLKTQLRWSGHVIRMDPQRIPRQVFYGELSAGLRKQGRPKKRFKDQLKSNLKWAGITPKQLELAASDRSSWRTHINHAATTFEDERRRRLAAARERRHQATTAPPVTTGVPCPMCHKLCASAFGLQSHMRVHRR

SEQ ID NO: 404 - protein, 982 aa, synthetic construct
MDEYQRSLSRPLLTIMSINIEGLSLAKEELLAKMSEDISCDILCIQETHRDITMRRPKILGMQLAVERPHRQYGSAIFVRSGVAISATSLTEVNNIEILSVELDSCTVSSLYKPPGADFYFTPPTSCHNHEAHFVVGDFNSHSCVWGYDEDDRNGEAVLTWADNSRMSLLHDSKLPPSFNSGRWKRGYNPDLIFVKESISHQCTKRVLNPIPNTQHRPICCVAYAAVRPKSVPFRRRYNFNKANWTKFTETLEAAISDIEPSIENYDLFVEAVKRSSRLSIPRGCRTSYLPGLNEESLNQLQEYLRLFQENPYSDGTIAAGQKLSTALANAKKDRWIELLENLDMSKSSRKAWQLLRRLDSDPLVNPGHANVTPDQIAHQLIQNGKTNCSRIKMKINRVPELETHQLSSPLNLKELREAIKRCKTGKAPGLDDLMMEQIKHLGPKAENWLLKFYNQCLAHKQIPRAWRKTKIIAILKPGKDASNARNYRPISLLCHLYKVYERMLLNRLGPVIEPKLIAQQAGFRPGKNCTGQILHLTEHIEEGYEKGCITGTVFVDLTAAYDTVQHRKMLHKVYHITRDFDFTKTVQTLLENRSFYVEFQGQKSRWRRQKNGLPQGSVLAPTLFNIFTNDQPQPPLTKSFIYADDLGLTTQAKDFETVEKQLTNALKDLSSYYKENHLKPNPAKTQVCAFHLRNREANRKLKVTWEGQELEHCFHPKYLGVTLDRTLTYRKHCMNTKHKVAARNNILRKLTGSAWGADPQVIRTSALALSFSTAEYACPVWHKSAHAKQVDIALNETCRIITGCLKPTPVDKLYKLAGIAPPDVRREVAANGERKKVEHCESHPLHDYHPPPTRLKSRKGFMRTTTPLDVPPATARVSLWAAKPGNSNWMAPQEGLPPGANQEWATWKSLNRLRSGVGRSKDNLARWHYLEESSTLCDCGAEQTTQHMYACPQCPASCTEEELFKATDNAVAVARFWSKTI

SEQ ID NO: 405 - protein, 982 aa, synthetic construct
MDEYQRSLSRPLLTIMSINIEGLSLAKEELLAKMSEDISCDILCIQETHRDITMRRPKILGMQLAVERPHRQYGSAIFVRSGVAISATSLTEVNNIEILSVELDSCTVSSLYKPPGADFYFTPPTSCHNHEAHFVVGDFNSHSCVWGYDEDDRNGEAVLTWADNSRMSLLHDSKLPPSFNSGRWKRGYNPDLIFVKESISHQCTKRVLNPIPNTQHRPICCVAYAAVRPKSVPFRRRYNFNKANWTKFTETLEAAISDIEPSIENYDLFVEAVKRSSRLSIPRGCRTSYLPGLNEESLNQLQEYLRLFQENPYSDGTIAAGQKLSTALANAKKDRWIELLENLDMSKSSRKAWQLLRRLDSDPLVNPGHANVTPDQIAHQLIQNGKTNCSRIKMKINRVPELETHQLSSPLNLKELREAIKRCKTGKAPGLDDLMMEQIKHLGAKAENWLLKFYNQCLAHKQIPRAWRKTKIIAILKPGKDASNARNYRPISLLCHLYKVYERMLLNRLGPVIEPKLIAQQAGFRPGKNCTGQILHLTEHIEEGYEKGCITGTVFVDLTAAYDTVQHRKMLHKVYHITRDFDFTKTVQTLLENRSFYVEFQGQKSRWRRQKNGLPQGSVLAPTLFNIFTNDQPQPPLTKSFIYADDLGLTTQAKDFETVEKQLTNALKDLSSYYKENHLKPNPAKTQVCAFHLRNREANRKLKVTWEGQELEHCFHPKYLGVTLDRTLTYRKHCMNTKHKVAARNNILRKLTGSAWGADPQVIRTSALALSFSTAEYACPVWHKSAHAKQVDIALNETCRIITGCLKPTPVDKLYKLAGIAPPDVRREVAANGERKKVEHCESHPLHGYHPPPTRLKSRKGFMRTTTPLDVPPAAARVSLWAAKPGNSNWMAPQEGLPPGANQEWATWKSLNRLRSGVGRSKDNLARWHYLEESSTLCDCGAEQTTQHMYACPQCPASCTEEELFKATDNAVAVARFWSKTI

SEQ ID NO: 406 - protein, 979 aa, synthetic construct
MLYTIFLVYGILCFFFVYFCIYLYITVYLCFLFFLFLLLCGDVESNPGPGRARGCRLLYCNIRGLHANLAELDFVSRGVDVVCCSETLVAGRRHDAELALAGFQSPFRRLCGSGPGFRGMAVYVRSGFCAYRQSVHECACHEIIVVRVCGRLNNYYLFSLYRSPATDDSLYDCLLTAMASIQSTDPKAAFVFVGDVNAHHRDWLGSASPTDCHGVAALDFCTLSSCVQLVRGSTHIAGNCLDLVMTDVPDLMTVTVGSPIGSSDHSHLVVSLDLNQVVPVVDTRRVVFVKSRANWVAITRAVRTLPWRQIIHSEDPVSELNDLTVSILERFVPKRTILVRSRDKPWFDDQCRLAFEAKQAAYRAWRRSRDRTLWQTYVDRRAEAKRVYEEAQRRLRQRSRESLLSIDHPHRWWSELKGSVFGAEPSLPPLVGPGGGIITDPLARAELLSAHFDGKQSRDVIALPHGCHPEPRLTSLAFRSGAIKVLLEGLDPYGGVDPVGMFPLFYKQLADVLAPKLAVIFRRLIRLGNFPRCWRTGNITPIPKGPVSPYVANYRPITLTPILSKVFEKLIAGKLGRFAEVTGLLPAGQFAYRIGLGCCDALLSVSHHLQSALDCRSEARLVQLDFSAAFDRVNHRGLLYKLESFGVGGRVLSIIRDFVSERTQSVSVDGVLSASVGVVSGVPQGSVLGPLLFVLYTSDMFSSLENTLINYADDSTLMAVIPAPRLRDAVAQSLNRDLSRISAWCSAWSMKLNASKTKSMIISRSRTLVPQHPQLEIDDTLLQESSSLEILGVVFDEKLTFEPHIRRLVSRASTKIGLLRKVNSVFGDSQVARRCFYAFLLPVLEYCSPVWASAADTHLRLLDRLVSSASRLCADNDLVNLSHRRRVAELCMFYKVYNNERHWLYSSLPALKVFGRETRAACGAHSFTLEAVRCRTNQFCRCFVPWSAKVWNLLPASAFGRIGLQAFKSAVNGFLLDFL

SEQ ID NO: 407 - protein, 1037 aa, synthetic construct
MWEKATSNVHLQSGTWITQNAYSVKINPGLSGVRLIGRSTTCTERTERTLNLLVCATLLLAGDVSPNPGPDTGGLPVWRKGIVYAFYNVVSLPRHLDEIQQLLLRNTRIHVLGLNETRLSDSIPDSSVDINGYTLYRTDRDRQGGGVGVYVKQTIASQRRCELEQEDLEVCCVEIKPEKARKTLLTCVYRPPTSGPDWRNSAESLVHKLNQTAEKENADVAIMGDFNSDLLTSTQAMSSVEFLMGLYQLVPVIREPTRITEKTESCIDNIFVSNPDRYKSSASVAWGPSDHNLILTCAKAGSEAGAAHRCEYRSYKLYTQQSFIDSLKSVRWDTVFDCTDVSEAWNAFKDIFLNVADEHAPLRTKTARENNRPAPWMTDTVKNMMGRRDAARRKAIRTKDVQDWDTYRSLRNQTTSIIRKEKKSHFATAVSEAKGDQSLMWKIINSFTGKSKSTKRVQKLLRADNTSMSDPGEMAQEFNDYFTSCASRLTDGMPDSEEDPLRHIPDSTTKFSFDCVEETEVLNELQKLKTKKATGLDKIPAKLLKDSAPVVAKPLAHIFNLSLASGEVPSDWKEAQITPVHKSGSCADVGNYRPVSVLSVTSKVMEKLVCNQVTRYLTRCKLLTTHQSGFRRHHSTATAVQKVVEDITSGYNCSKVTVALFLDLRKAFDSVNHEIMLSKLKKFGFDSDAMKWFTSYLSERLQCTCLQGQYSSKTRVSCGVPQGSVLGPLLFCLYVNDLPNVIQKCSIHMYADDTVLYYSAVSVKVCEETVSMDMKRVVKWLSENRLLLHPDKTKSMLFGLPQKLKHAGTTVNITDGVNVYEQVDSFTYLGITLDPALRWAAHVQKITKKLLSGLGAMGRARAFVTNEVLKTMYQTLLLAHLEYCATAWLPSLAQGNKTLMLQLDRLVNRAARLITGHKLRDHVTVDNLRAEAGIDSVRKRTEITTLVTVFKTIRGKAPAYLASLFKWEAPPTMSVRPTRSEVKRLRDYDPHLLWCPPARVIAFRNSLQSYGPFLWNSLPLKQRQLLSLRTFKKFIEN

SEQ ID NO: 408 - protein, 986 aa, synthetic construct
MRRLLLLFLIMCLTPSPVPVRISSRRYYRPRARSALYRNLSSLSYPTRSTHVQHLVTGGLWNCQSATRKADFISGFAIQQSLDFLALTETWITPENTSTPAALSSAFSFSHTPRPTGRGGGTGLLISPKWSFSLYPLPPSTPLSFEFHAVTITHPVQLTIIVLYRPPGSLGHFLEELDILLSNFPENGPPLILLGDFNIQTEKSSDLLHLLSSFALSLSPSPPTHKAGNHLDYIFTRNCSTTNLSVTPLHVSDHFFISYSLPLSITNKPPSLTNSIPARRNIRSLSPSSLASSVLSALPSTDSFSLLHPNAAAETLLSTLSSSLDSLCPLTTRRTGKSPPAPWLSQPVRAMRATMRASERRWRKYKRPDDLLEFQSLLSSFSASISAAKSSFYQSKIESSFSNPKKLFSIFSNLLEPPTPPPPSTLLPGDFVNYFTKKIADIRSSFSNPPPTSRVPPTSPLSPSLSSFTALSPNQILTLVTSARPTTCPLDPIPSHLLQSIAPDLLPFLTCLINNALSSGCFPNSLKEARVNPLLKKPTLNPSEENNYRPVSLLPFLSKTLERAIFNQLSSYLHCNNLLDPHQSGFKAGHSTETALLAVSEQLHTARAASLSSVLILLDLSAAFDTVNHQILISSLQELGVTGSALSLLSSYLDGRTYRVTWRGSVSEPCPLTTGVPQGSVLGPLLFSLYTNSLGAVIRSHGFSYHSYADDTQLILSFPHSDTQVAARISACLTDISQWMSAHHLKINPDKTELLLFPGKDSLTQDLTVNFGNSVLTPTSTAKNLGVTLDSQLSLTPNITATTRSCRYTLYNIRRIRPLLTQKAAQVLIQALVISRLDYCNSLLAGLPATAIRPLQLIQNAAARLVFNLPKFSHTTPLLRSLHWLPVAARIQFKTLVLTYHAVNGSGPAYIQDMVKPYIPTRTLRSASAKLLVPPSLRAKHSTRSRLFAVLAPKWWNELSEDTRTAESLHIFRRKLKTHLFRLYLD

SEQ ID NO: 409 - protein, 1129 aa, synthetic construct
MSGTPRVAFDSGKDLRNPIGQSPPALSRAAPGQLGTDPSRSACFIGCLELRVLLDKWIVCRAPDKQESKEKRRQKTQPIRIGSWNVRTMRTGLSDDLTVIEDIRKTAAIDRELYRLNIDIVALQETRLPDSGSLKEDSYTFFWQGKGMEETREHGVGFAVRNTLLHMIEPPTGGTERIITLRLSTHEGPVNLLCVYAPTLQATSEVKDQFYGQLDSAIKKIPVSEHIFILGDFNARVGTDQESWQTVLGHHGIGKMNENGQRLLELCCYHNLCVTNTFFQNKAIHKASWRHPRSQRWHQLDLVITRRTSLNSVCNTRAYHSADCDTDHSLIAARIKLRPKKLHHMKKKGQPKIDVSKTMLPDRNQKFLECLEGTLNNIQPQDAEHRWETLSKTIYSAAAQSYGKKERKNTDWFEAYISELEPVMDTKRKALVSYKQNPSSQNLQALKAARQEAQRASRRCANNYWLLLSERIQLASATGDIRRMYEGIKQATGKPIKKSAPLKAKSGEIITDKDKQMARWVEHYLDIYSTENSVSQDALDNIEDFSVLAELDADPTIEELSKAIDSMSNGKAPGEDNIPAEIIKSGKSVLLEPLHELLRLCWKEGKVPQSMRNSKIVTLYKNKGDRTDCNSYRGISLLSIVGKVFAKVVLTRLQVLADRVYPESQCGFRAERSTTDMIFSVRQLQEKCREQQRPLYIAFIDLTKAFDLVSRRGLFQLLRKIGCPPQLLDIIISFHEDMKGVVSFDGETSEPFAIRSGVKQGCVLAPTLFGIFFSLLLKSAFGHSTQGVHLHTRSDGKLFNLARLRAKTKVRSVLIRDMLFADDAALVAHVEDELQQLLNQFAHACSEFALTISIKKTVVMGQDVPQPPVVTIGSEVLEVTDHFTYLGSTVTSNLSLDKEIDRRIARAAGVMTKLGTRVWNNSHLTLNTKLEVYRSCVLSTLLYGSETWTTYAKQENRLESFHLRCLRRILGISWRDRVPNTTVLERSCSLSIHLLLCQRRLRWLGHVSRMKDGRIPKDILFGELATGKRPVGRPALRFRDVCKRDLKLTDIDPASWEQIAADRNRWRHTVKDGLAKGQERRTEHLESRRRKRKEKPQQGNPSAFICPNCGRDCHARIGLQSHSRRCQPP

SEQ ID NO: 410 - protein, 965 aa, synthetic construct
MPRKNWNCGRRTGDEKRKMMFGCWNVQGISTKIDLLPAELDMFNIDVVVLSETKRKGKGEEELDNYVHIWSGVSKAVRAKAGVSIMIQKKWKKRITNWTFINERIITVEMTLFAREVVIIGVYAPTNDTKDKEKDAFWDTLRETIEKIPRRKELIIMGDMNGRVGIRESCKIVGKHGEAEYNDNGERLIDICAQFDLKITNTFFKHKDIHKYTWQQNTKELRSIIDYIIIRQTSSFKAADVRSYRGAQCGSDHYLVKMKSFWPWKNATNDTSNINKMNCSEKVQNVHFNIDSLQDESIRTFFKARMERTLDESFEGSTEEIYEYIKTKVKNVASEVLGIKENNPKRAAEWWSEEIETSVKEKRNAFVQWLNDKSEGTRSKYKEKKNEVEKKIRLAKNEAWERTCANVNSKLGFGRAKEAWSVLKALRQDTKGKSNLQLVTQKEWEEYFKKLLNEDRDEYLEEGTVEENEHHDDEILISESEVLQVLRTGKNGKSPGPGNINMEFLKYGGDKIVKLILQLFNKMLHGDSVPKEMKLGYISTIFKKGDRKICSNYRGICVTNTLMRIFGKIIKNKLEKNFRTQQEQCGFTAGRSCVDHIFTLRQILEKHREKSKNVGLIFIDLEKAYDTVPRKLLWRALHRANINTSLIKIIEQMYKDNICQVKIGNTLSQKFRTSKGLLQGCPMSPTLFKIYIDICLRTWSQKCNSMGLEIRDGVYLHHLLFADDQVVIAQDGEDANYMCNQLAIAYKNWGLKINYQKTEYLTNDPHELRIEGKKIKKVNTFCYLGSILETEGKSDSEINKRISSGRKVIGMLNSVLWSRNVMNRTKKIIYKSIFESAVLYGAETWTINQKHTKKLQALEMDFWRRSARISRKEKRRNTEVIKRMEIIERIDEVMDRKKLRWYGHVRRMEDTRIPKLVLEWQPEGRRRRGRPVTTWIKNVQLTMNRLGAEEEDTQDRHTWRNIVNN

SEQ ID NO: 411-479 - skipped (69 entries)

SEQ ID NO: 480 - protein, 2211 aa, synthetic construct
MPAAKRVKLDGGDKKYSIGLDIGTNSVGWAVITDEYKVPSKKFKVLGNTDRHSIKKNLIGALLFDSGETAEATRLKRTARRRYTRRKNRICYLQEIFSNEMAKVDDSFFHRLEESFLVEEDKKHERHPIFGNIVDEVAYHEKYPTIYHLRKKLVDSTDKADLRLIYLALAHMIKFRGHFLIEGDLNPDNSDVDKLFIQLVQTYNQLFEENPINASGVDAKAILSARLSKSRRLENLIAQLPGEKKNGLFGNLIALSLGLTPNFKSNFDLAEDAKLQLSKDTYDDDLDNLLAQIGDQYADLFLAAKNLSDAILLSDILRVNTEITKAPLSASMIKRYDEHHQDLTLLKALVRQQLPEKYKEIFFDQSKNGYAGYIDGGASQEEFYKFIKPILEKMDGTEELLVKLNREDLLRKQRTFDNGSIPHQIHLGELHAILRRQEDFYPFLKDNREKIEKILTFRIPYYVGPLARGNSRFAWMTRKSEETITPWNFEEVVDKGASAQSFIERMTNFDKNLPNEKVLPKHSLLYEYFTVYNELTKVKYVTEGMRKPAFLSGEQKKAIVDLLFKTNRKVTVKQLKEDYFKKIECFDSVEISGVEDRFNASLGTYHDLLKIIKDKDFLDNEENEDILEDIVLTLTLFEDREMIEERLKTYAHLFDDKVMKQLKRRRYTGWGRLSRKLINGIRDKQSGKTILDFLKSDGFANRNFMQLIHDDSLTFKEDIQKAQVSGQGDSLHEHIANLAGSPAIKKGILQTVKVVDELVKVMGRHKPENIVIEMARENQTTQKGQKNSRERMKRIEEGIKELGSQILKEHPVENTQLQNEKLYLYYLQNGRDMYVDQELDINRLSDYDVDHIVPQSFLKDDSIDNKVLTRSDKARGKSDNVPSEEVVKKMKNYWRQLLNAKLITQRKFDNLTKAERGGLSELDKAGFIKRQLVETRQITKHVAQILDSRMNTKYDENDKLIREVKVITLKSKLVSDFRKDFQFYKVREINNYHHAHDAYLNAVVGTALIKKYPKLESEFVYGDYKVYDVRKMIAKSEQEIGKATAKYFFYSNIMNFFKTEITLANGEIRKRPLIETNGETGEIVWDKGRDFATVRKVLSMPQVNIVKKTEVQTGGFSKESILPKRNSDKLIARKKDWDPKKYGGFDSPTVAYSVLVVAKVEKGKSKKLKSVKELLGITIMERSSFEKNPIDFLEAKGYKEVKKDLIIKLPKYSLFELENGRKRMLASAGELQKGNELALPSKYVNFLYLASHYEKLKGSPEDNEQKQLFVEQHKHYLDEIIEQISEFSKRVILADANLDKVLSAYNKHRDKPIREQAENIIHLFTLTNLGAPAAFKYFDTTIDRKRYTSTKEVLDATLIHQSITGLYETRIDLSQLGGDGGAEAAAKEAAAKEAAAKEAAAKALEAEAAAKEAAAKEAAAKEAAAKAGGMDPLQLLQPLEAEIKGTKLKAHWNSGATITCVPEAFLEDERPIQTMLIKTIHGEKQQDVYYLTFKVQGRKVEAEVLASPYDYILLNPSDVPWLMKKPLQLTVLVPLHEYQERLLQQTALPKEQKELLQKLFLKYDALWQHWENQVGHRRIKPHNIATGTLAPRPQKQYPINPKAKPSIQIVIDDLLKQGVLIQQNSTMNTPVYPVPKPDGKWRMVLDYREVNKTIPLIAAQNQHSAGILSSIYRGKYKTTLDLTNGFWAHPITPESYWLTAFTWQGKQYCWTRLPQGFLNSPALFNADVVDLLKEIPNVQAYVDDIYISHDDPQEHLEQLEKIFSILLNAGYVVSLKKSEIAQREVEFLGFNITKEGRGLTDTFKQKLLNITPPKDLKQLQSILGKLNFARNFIPNYSELVKPLYTIVAPANGKFISWTEDNSNQLQHIISVLNQADNLEERNPETRLIIKVNSSPSAGYIRYYNEGSKRPIMYVNYIFSKAEAKFTQTEKLLTTMHKGLIKAMDLAMGQEILVYSPIVSMTKIQRTPLPERKALPVRWITWMTYLEDPRIQFHYDKSLPELQQIPNVTEDVIAKTKHPSEFAMVFYTDGSAIKHPDVNKSHSAGMGIAQVQFIPEYKIVHQWSIPLGDHTAQLAEIAAVEFACKKALKISGPVLIVTDSFYVAESANKELPYWKSNGFLNNKKKPLRHVSKWKSIAECLQLKPDIIIMHEKGHQQPMTTLHTEGNNLADKLATQGSYVVHAGKRTADGSEFEKRTADGSEFESPKKKAKVE

SEQ ID NO: 481-499 - skipped (19 entries)

SEQ ID NO: 500 - DNA, 100 bp, Homo sapiens
  source 1..100: mol_type = genomic DNA
gtttcgcgtcgtccgcctcagtttcggcccttgttttgactcgggaggcgtgtccaaacgccaggtaaccactatatagtgagcacggtagcattagtcg

SEQ ID NO: 501-549 - skipped (49 entries)

SEQ ID NO: 550 - protein, 2106 aa, synthetic construct
MPAAKRVKLDGGDKKYSIGLDIGTNSVGWAVITDEYKVPSKKFKVLGNTDRHSIKKNLIGALLFDSGETAEATRLKRTARRRYTRRKNRICYLQEIFSNEMAKVDDSFFHRLEESFLVEEDKKHERHPIFGNIVDEVAYHEKYPTIYHLRKKLVDSTDKADLRLIYLALAHMIKFRGHFLIEGDLNPDNSDVDKLFIQLVQTYNQLFEENPINASGVDAKAILSARLSKSRRLENLIAQLPGEKKNGLFGNLIALSLGLTPNFKSNFDLAEDAKLQLSKDTYDDDLDNLLAQIGDQYADLFLAAKNLSDAILLSDILRVNTEITKAPLSASMIKRYDEHHQDLTLLKALVRQQLPEKYKEIFFDQSKNGYAGYIDGGASQEEFYKFIKPILEKMDGTEELLVKLNREDLLRKQRTFDNGSIPHQIHLGELHAILRRQEDFYPFLKDNREKIEKILTFRIPYYVGPLARGNSRFAWMTRKSEETITPWNFEEVVDKGASAQSFIERMTNFDKNLPNEKVLPKHSLLYEYFTVYNELTKVKYVTEGMRKPAFLSGEQKKAIVDLLFKTNRKVTVKQLKEDYFKKIECFDSVEISGVEDRFNASLGTYHDLLKIIKDKDFLDNEENEDILEDIVLTLTLFEDREMIEERLKTYAHLFDDKVMKQLKRRRYTGWGRLSRKLINGIRDKQSGKTILDFLKSDGFANRNFMQLIHDDSLTFKEDIQKAQVSGQGDSLHEHIANLAGSPAIKKGILQTVKVVDELVKVMGRHKPENIVIEMARENQTTQKGQKNSRERMKRIEEGIKELGSQILKEHPVENTQLQNEKLYLYYLQNGRDMYVDQELDINRLSDYDVDHIVPQSFLKDDSIDNKVLTRSDKARGKSDNVPSEEVVKKMKNYWRQLLNAKLITQRKFDNLTKAERGGLSELDKAGFIKRQLVETRQITKHVAQILDSRMNTKYDENDKLIREVKVITLKSKLVSDFRKDFQFYKVREINNYHHAHDAYLNAVVGTALIKKYPKLESEFVYGDYKVYDVRKMIAKSEQEIGKATAKYFFYSNIMNFFKTEITLANGEIRKRPLIETNGETGEIVWDKGRDFATVRKVLSMPQVNIVKKTEVQTGGFSKESILPKRNSDKLIARKKDWDPKKYGGFDSPTVAYSVLVVAKVEKGKSKKLKSVKELLGITIMERSSFEKNPIDFLEAKGYKEVKKDLIIKLPKYSLFELENGRKRMLASAGELQKGNELALPSKYVNFLYLASHYEKLKGSPEDNEQKQLFVEQHKHYLDEIIEQISEFSKRVILADANLDKVLSAYNKHRDKPIREQAENIIHLFTLTNLGAPAAFKYFDTTIDRKRYTSTKEVLDATLIHQSITGLYETRIDLSQLGGDGGEAAAKEAAAKEAAAKEAAAKEAAAKEAAAKGGIPWLMKKPLQLTTLVPLQEYEERLLKQTMLTGSYKEKLQSLFLKYDALWQHWENQVGHRRIKPHHIATGTVNPRPQKQYPINPKAKASIQTVINDLLKQGVLIQQNSIMNTPVYPVPKPDGKWRMVLDYREVNKTIPLIAAQNQHSAGILSSIFRGKYKTTLDLSNGFWAHSITPESYWLTAFTWLGQQYCWTRLPQGFLNSPALFNADVVDLLKEVPNVQVYVDDIYISHDDPREHLEQLEKVFSLLLNAGYVVSLKKSEIAQHEVEFLGFNITKEGRGLTETFKQKLLNITPPRDLKQLQSILGKLNFARNFIPNFSELVKPLYNIIATAPGKYITWTTDNSQQLQNIISMLNSAENLEERNPEVRLIMKVNTSPSAGYIRFYNEFAKRPIMYLNYVYTKAEVKFTNTEKLLTTIHKGLIKALDLGMGQEILVYSPIVSMTKIQKTPLPERKALPIRWITWMSYLEDPRIQFHYDKTLPELQQVPTVTDDIIAKIKHPSEFSMVFYTDGSAIKHPNVNKSHNAGMGIAQVQFKPEFTVINTWSIPLGDHTAQLAEVAAVEFACKKALKIDGPVLIVTDSFYVAESVNKELPYWQSNGFFNNKKKPLKHVSKWKSIADCIQLKPDIIIIHEKGHQPTASTFHTEGNNLADKLATQGSYVVNAGKRTADGSEFEKRTADGSEFESPKKKAKVE

SEQ ID NO: 551-589 - skipped (39 entries)

SEQ ID NO: 590 - protein, 2195 aa, synthetic construct
MPAAKRVKLDGGDKKYSIGLDIGTNSVGWAVITDEYKVPSKKFKVLGNTDRHSIKKNLIGALLFDSGETAEATRLKRTARRRYTRRKNRICYLQEIFSNEMAKVDDSFFHRLEESFLVEEDKKHERHPIFGNIVDEVAYHEKYPTIYHLRKKLVDSTDKADLRLIYLALAHMIKFRGHFLIEGDLNPDNSDVDKLFIQLVQTYNQLFEENPINASGVDAKAILSARLSKSRRLENLIAQLPGEKKNGLFGNLIALSLGLTPNFKSNFDLAEDAKLQLSKDTYDDDLDNLLAQIGDQYADLFLAAKNLSDAILLSDILRVNTEITKAPLSASMIKRYDEHHQDLTLLKALVRQQLPEKYKEIFFDQSKNGYAGYIDGGASQEEFYKFIKPILEKMDGTEELLVKLNREDLLRKQRTFDNGSIPHQIHLGELHAILRRQEDFYPFLKDNREKIEKILTFRIPYYVGPLARGNSRFAWMTRKSEETITPWNFEEVVDKGASAQSFIERMTNFDKNLPNEKVLPKHSLLYEYFTVYNELTKVKYVTEGMRKPAFLSGEQKKAIVDLLFKTNRKVTVKQLKEDYFKKIECFDSVEISGVEDRFNASLGTYHDLLKIIKDKDFLDNEENEDILEDIVLTLTLFEDREMIEERLKTYAHLFDDKVMKQLKRRRYTGWGRLSRKLINGIRDKQSGKTILDFLKSDGFANRNFMQLIHDDSLTFKEDIQKAQVSGQGDSLHEHIANLAGSPAIKKGILQTVKVVDELVKVMGRHKPENIVIEMARENQTTQKGQKNSRERMKRIEEGIKELGSQILKEHPVENTQLQNEKLYLYYLQNGRDMYVDQELDINRLSDYDVDHIVPQSFLKDDSIDNKVLTRSDKARGKSDNVPSEEVVKKMKNYWRQLLNAKLITQRKFDNLTKAERGGLSELDKAGFIKRQLVETRQITKHVAQILDSRMNTKYDENDKLIREVKVITLKSKLVSDFRKDFQFYKVREINNYHHAHDAYLNAVVGTALIKKYPKLESEFVYGDYKVYDVRKMIAKSEQEIGKATAKYFFYSNIMNFFKTEITLANGEIRKRPLIETNGETGEIVWDKGRDFATVRKVLSMPQVNIVKKTEVQTGGFSKESILPKRNSDKLIARKKDWDPKKYGGFDSPTVAYSVLVVAKVEKGKSKKLKSVKELLGITIMERSSFEKNPIDFLEAKGYKEVKKDLIIKLPKYSLFELENGRKRMLASAGELQKGNELALPSKYVNFLYLASHYEKLKGSPEDNEQKQLFVEQHKHYLDEIIEQISEFSKRVILADANLDKVLSAYNKHRDKPIREQAENIIHLFTLTNLGAPAAFKYFDTTIDRKRYTSTKEVLDATLIHQSITGLYETRIDLSQLGGDGGEAAAKEAAAKEAAAKEAAAKEAAAKEAAAKGGMDPLQLLQPLEAEIKGTKLKAHWNSGATITCVPQAFLEEEVPIKNIWIKTIHGEKEQPVYYLTFKIQGRKVEAEVISSPYDYILVSPSDIPWLMKKPLQLTTLVPLQEYEERLLKQTMLTGSYKEKLQSLFLKYDALWQHWENQVGHRRIKPHHIATGTVNPRPQKQYPINPKAKASIQTVINDLLKQGVLIQQNSIMNTPVYPVPKPDGKWRMVLDYREVNKTIPLIAAQNQHSAGILSSIFRGKYKTTLDLSNGFWAHSITPESYWLTAFTWLGQQYCWTRLPQGFLNSPALFNADVVDLLKEVPNVQVYVDDIYISHDDPREHLEQLEKVFSLLLNAGYVVSLKKSEIAQHEVEFLGFNITKEGRGLTETFKQKLLNITPPRDLKQLQSILGLLNFARNFIPNFSELVKPLYNIIATAPGKYITWTTDNSQQLQNIISMLNSAENLEERNPEVRLIMKVNTSPSAGYIRFYNEFAKRPIMYLNYVYTKAEVKFTNTEKLLTTIHKGLIKALDLGMGQEILVYSPIVSMTKIQKTPLPERKALPIRWITWMSYLEDPRIQFHYDKTLPELQQVPTVTDDIIAKIKHPSEFSMVFYTDGSAIKHPNVNKSHNAGMGIAQVQFKPEFTVINTWSIPLGDHTAQLAEVAAVEFACKKALKIDGPVLIVTDSFYVAESVNKELPYWQSNGFFNNKKKPLKHVSKWKSIADCIQLKPDIIIIHEKGHQPTASTFHTEGNNLADKLATQGSYVVNAGKRTADGSEFEKRTADGSEFESPKKKAKVE

SEQ ID NO: 591 - protein, 2211 aa, synthetic construct
MPAAKRVKLDGGDKKYSIGLDIGTNSVGWAVITDEYKVPSKKFKVLGNTDRHSIKKNLIGALLFDSGETAEATRLKRTARRRYTRRKNRICYLQEIFSNEMAKVDDSFFHRLEESFLVEEDKKHERHPIFGNIVDEVAYHEKYPTIYHLRKKLVDSTDKADLRLIYLALAHMIKFRGHFLIEGDLNPDNSDVDKLFIQLVQTYNQLFEENPINASGVDAKAILSARLSKSRRLENLIAQLPGEKKNGLFGNLIALSLGLTPNFKSNFDLAEDAKLQLSKDTYDDDLDNLLAQIGDQYADLFLAAKNLSDAILLSDILRVNTEITKAPLSASMIKRYDEHHQDLTLLKALVRQQLPEKYKEIFFDQSKNGYAGYIDGGASQEEFYKFIKPILEKMDGTEELLVKLNREDLLRKQRTFDNGSIPHQIHLGELHAILRRQEDFYPFLKDNREKIEKILTFRIPYYVGPLARGNSRFAWMTRKSEETITPWNFEEVVDKGASAQSFIERMTNFDKNLPNEKVLPKHSLLYEYFTVYNELTKVKYVTEGMRKPAFLSGEQKKAIVDLLFKTNRKVTVKQLKEDYFKKIECFDSVEISGVEDRFNASLGTYHDLLKIIKDKDFLDNEENEDILEDIVLTLTLFEDREMIEERLKTYAHLFDDKVMKQLKRRRYTGWGRLSRKLINGIRDKQSGKTILDFLKSDGFANRNFMQLIHDDSLTFKEDIQKAQVSGQGDSLHEHIANLAGSPAIKKGILQTVKVVDELVKVMGRHKPENIVIEMARENQTTQKGQKNSRERMKRIEEGIKELGSQILKEHPVENTQLQNEKLYLYYLQNGRDMYVDQELDINRLSDYDVDHIVPQSFLKDDSIDNKVLTRSDKARGKSDNVPSEEVVKKMKNYWRQLLNAKLITQRKFDNLTKAERGGLSELDKAGFIKRQLVETRQITKHVAQILDSRMNTKYDENDKLIREVKVITLKSKLVSDFRKDFQFYKVREINNYHHAHDAYLNAVVGTALIKKYPKLESEFVYGDYKVYDVRKMIAKSEQEIGKATAKYFFYSNIMNFFKTEITLANGEIRKRPLIETNGETGEIVWDKGRDFATVRKVLSMPQVNIVKKTEVQTGGFSKESILPKRNSDKLIARKKDWDPKKYGGFDSPTVAYSVLVVAKVEKGKSKKLKSVKELLGITIMERSSFEKNPIDFLEAKGYKEVKKDLIIKLPKYSLFELENGRKRMLASAGELQKGNELALPSKYVNFLYLASHYEKLKGSPEDNEQKQLFVEQHKHYLDEIIEQISEFSKRVILADANLDKVLSAYNKHRDKPIREQAENIIHLFTLTNLGAPAAFKYFDTTIDRKRYTSTKEVLDATLIHQSITGLYETRIDLSQLGGDGGAEAAAKEAAAKEAAAKEAAAKALEAEAAAKEAAAKEAAAKEAAAKAGGMDPLQLLQPLEAEIKGTKLKAHWNSGATITCVPQAFLEEEVPIKNIWIKTIHGEKEQPVYYLTFKIQGRKVEAEVISSPYDYILVSPSDIPWLMKKPLQLTTLVPLQEYEERLLKQTMLTGSYKEKLQSLFLKYDALWQHWENQVGHRRIKPHHIATGTVNPRPQKQYPINPKAKASIQTVINDLLKQGVLIQQNSIMNTPVYPVPKPDGKWRMVLDYREVNKTIPLIAAQNQHSAGILSSIFRGKYKTTLDLSNGFWAHSITPESYWLTAFTWLGQQYCWTRLPQGFLNSPALFNADVVDLLKEVPNVQVYVDDIYISHDDPREHLEQLEKVFSLLLNAGYVVSLKKSEIAQHEVEFLGFNITKEGRGLTETFKQKLLNITPPRDLKQLQSILGLLNFARNFIPNFSELVKPLYNIIATAPGKYITWTTDNSQQLQNIISMLNSAENLEERNPEVRLIMKVNTSPSAGYIRFYNEFAKRPIMYLNYVYTKAEVKFTNTEKLLTTIHKGLIKALDLGMGQEILVYSPIVSMTKIQKTPLPERKALPIRWITWMSYLEDPRIQFHYDKTLPELQQVPTVTDDIIAKIKHPSEFSMVFYTDGSAIKHPNVNKSHNAGMGIAQVQFKPEFTVINTWSIPLGDHTAQLAEVAAVEFACKKALKIDGPVLIVTDSFYVAESVNKELPYWQSNGFFNNKKKPLKHVSKWKSIADCIQLKPDIIIIHEKGHQPTASTFHTEGNNLADKLATQGSYVVNAGKRTADGSEFEKRTADGSEFESPKKKAKVE

SEQ ID NO: 592-646 - skipped (55 entries)

SEQ ID NO: 647 - protein, 2211 aa, synthetic construct
MPAAKRVKLDGGDKKYSIGLDIGTNSVGWAVITDEYKVPSKKFKVLGNTDRHSIKKNLIGALLFDSGETAEATRLKRTARRRYTRRKNRICYLQEIFSNEMAKVDDSFFHRLEESFLVEEDKKHERHPIFGNIVDEVAYHEKYPTIYHLRKKLVDSTDKADLRLIYLALAHMIKFRGHFLIEGDLNPDNSDVDKLFIQLVQTYNQLFEENPINASGVDAKAILSARLSKSRRLENLIAQLPGEKKNGLFGNLIALSLGLTPNFKSNFDLAEDAKLQLSKDTYDDDLDNLLAQIGDQYADLFLAAKNLSDAILLSDILRVNTEITKAPLSASMIKRYDEHHQDLTLLKALVRQQLPEKYKEIFFDQSKNGYAGYIDGGASQEEFYKFIKPILEKMDGTEELLVKLNREDLLRKQRTFDNGSIPHQIHLGELHAILRRQEDFYPFLKDNREKIEKILTFRIPYYVGPLARGNSRFAWMTRKSEETITPWNFEEVVDKGASAQSFIERMTNFDKNLPNEKVLPKHSLLYEYFTVYNELTKVKYVTEGMRKPAFLSGEQKKAIVDLLFKTNRKVTVKQLKEDYFKKIECFDSVEISGVEDRFNASLGTYHDLLKIIKDKDFLDNEENEDILEDIVLTLTLFEDREMIEERLKTYAHLFDDKVMKQLKRRRYTGWGRLSRKLINGIRDKQSGKTILDFLKSDGFANRNFMQLIHDDSLTFKEDIQKAQVSGQGDSLHEHIANLAGSPAIKKGILQTVKVVDELVKVMGRHKPENIVIEMARENQTTQKGQKNSRERMKRIEEGIKELGSQILKEHPVENTQLQNEKLYLYYLQNGRDMYVDQELDINRLSDYDVDHIVPQSFLKDDSIDNKVLTRSDKARGKSDNVPSEEVVKKMKNYWRQLLNAKLITQRKFDNLTKAERGGLSELDKAGFIKRQLVETRQITKHVAQILDSRMNTKYDENDKLIREVKVITLKSKLVSDFRKDFQFYKVREINNYHHAHDAYLNAVVGTALIKKYPKLESEFVYGDYKVYDVRKMIAKSEQEIGKATAKYFFYSNIMNFFKTEITLANGEIRKRPLIETNGETGEIVWDKGRDFATVRKVLSMPQVNIVKKTEVQTGGFSKESILPKRNSDKLIARKKDWDPKKYGGFDSPTVAYSVLVVAKVEKGKSKKLKSVKELLGITIMERSSFEKNPIDFLEAKGYKEVKKDLIIKLPKYSLFELENGRKRMLASAGELQKGNELALPSKYVNFLYLASHYEKLKGSPEDNEQKQLFVEQHKHYLDEIIEQISEFSKRVILADANLDKVLSAYNKHRDKPIREQAENIIHLFTLTNLGAPAAFKYFDTTIDRKRYTSTKEVLDATLIHQSITGLYETRIDLSQLGGDGGAEAAAKEAAAKEAAAKEAAAKALEAEAAAKEAAAKEAAAKEAAAKAGGMDPLQLLQPLEAEIKGTKLKAHWNSGATITCVPQAFLEEEVPIKNIWIKTIHGEKEQPVYYLTFKIQGRKVEAEVISSPYDYILVSPSDIPWLMKKPLQLTTLVPLQEYEERLLKQTMLTGSYKEKLQSLFLKYDALWQHWENQVGHRRIKPHHIATGTVNPRPQKQYPINPKAKASIQTVINDLLKQGVLIQQNSIMNTPVYPVPKPDGKWRMVLDYREVNKTIPLIAAQNQHSAGILSSIFRGKYKTTLDLSNGFWAHSITPESYWLTAFTWLGQQYCWTRLPQGFLNSPALFNADVVDLLKEVPNVQVYVDDIYISHDDPREHLEQLEKVFSLLLNAGYVVSLKKSEIAQHEVEFLGFNITKEGRGLTETFKQKLLNITPPRDLKQLQSILGKLNFARNFIPNFSELVKPLYNIIATAPGKYITWTTDNSQQLQNIISMLNSAENLEERNPEVRLIMKVNTSPSAGYIRFYNEFAKRPIMYLNYVYTKAEVKFTNTEKLLTTIHKGLIKALDLGMGQEILVYSPIVSMTKIQKTPLPERKALPIRWITWMSYLEDPRIQFHYDKTLPELQQVPTVTDDIIAKIKHPSEFSMVFYTDGSAIKHPNVNKSHNAGMGIAQVQFKPEFTVINTWSIPLGDHTAQLAEVAAVEFACKKALKIDGPVLIVTDSFYVAESVNKELPYWQSNGFFNNKKKPLKHVSKWKSIADCIQLKPDIIIIHEKGHQPTASTFHTEGNNLADKLATQGSYVVNAGKRTADGSEFEKRTADGSEFESPKKKAKVE

SEQ ID NO: 648-699 - skipped (52 entries)

SEQ ID NO: 700 - DNA, 1110 bp, synthetic construct
  source 1..1110: mol_type = other DNA
gcaggagaagcactttagcagcatctagaacagcagcctgtaagtacatttaagatttgtttcagttgttgtgtatggtttgaggacttgtttccagctgtttgtgtaaagttgtaggacatttaaacttgctttcagttgtgtataatactagaagttgtttagccactgtttccttggttactataagagcttgtgtagcgaacgcagacgcggttcgcgtcgtccgcctcagtttcggcccttgttttgactcgggaggcgtgtccaaacgccaggtaaccactatatagtgagcacggtagcattagtcggcaggagaagcactttagcagcatctagaacagcagcctgtaagtacatttaagatttgtttcagttgttgtgtatggtttgaggacttgtttccagctgtttgtgtaaagttgtaggacatttaaacttgctttcagttgtgtataatactagaagttgtttagccactgtttccttggttactataagagcttgtgtagcgaacgcagacgcggttcgcgtcgtccgcctcagtttcggcccttgttttgactcgggaggcgtgtccaaacgccaggtaaccactatatagtgagcacggtagcattagtcggcaggagaagcactttagcagcatctagaacagcagcctgtaagtacatttaagatttgtttcagttgttgtgtatggtttgaggacttgtttccagctgtttgtgtaaagttgtaggacatttaaacttgctttcagttgtgtataatactagaagttgtttagccactgtttccttggttactataagagcttgtgtagcgaacgcagacgcggttcgcgtcgtccgcctcagtttcggcccttgttttgactctcgaggcgtgtccagctgaattcaatcagctagtgctttggggttatataaacaactagttcaccgcggcagcggtcgcggcagcctcgtgtgaagaccgacgagggtaaagaccatcgactctacctgcgcgactccaccgagcaaagacaccgacaaagcacttgagtactttactgtattgttttactttacacttattttttgttgtcagtgcacttttatt

SEQ ID NO: 701 - DNA, 1110 bp, synthetic construct; identical to SEQ ID NO: 700
  source 1..1110: mol_type = other DNA

SEQ ID NO: 702 - DNA, 710 bp, synthetic construct
  source 1..710: mol_type = other DNA
gggtgtatggggtgctcagggaggggtagtatctctggtatggagggcttgtcgtgccctcctagggcagctctccagcctctgacccccacctgacacccagctctcacttgtggctcccagtagctgctagcatgtggcagcggccacaccccgggcaacggcttcgacaggccggctaaaccttgtgagggtagccatcgggtcatcgacccctggtgaaccagggctttgctcacccagcatgtgaagactgcttcggctgaacagacggaagaaaccaataagaaggttcaacggctgagagggcgacgcagcaaagcactgtggagtgcttagggcgtgttggagcacaaaggacaacacggccatccaatgcagctgaggaagtctccagatgtaacaatttttcgtgccactggacccaggcttccaacgccgagagagtgggactgtctctgtgcatcggcttttccacttaaatctctttcacgcacaagtatctttgtgcacactcatctatcctaaccccgtccaccctcttcaagacctgcggcgatgggggagtggcgacgcaacaggtggaggtgaccactggcagttgtagtcacgatcctgcacgtaggcggcccacggaccagtggtcgctcggccctgtgggcagcagggacgttcggcagcatcctgggcgactgagcagccctctctag

SEQ ID NO: 703 - DNA, 710 bp, synthetic construct; identical to SEQ ID NO: 702
  source 1..710: mol_type = other DNA

SEQ ID NO: 704 - DNA, 109 bp, synthetic construct
  source 1..109: mol_type = other DNA
gggggacacggaaagagcctccccgaagattgagtgaattcagtcgggcgtcccctgggcaacgtttcttgtaagcggccgatctttccaccccaaaagcattggatga

SEQ ID NO: 705 - DNA, 109 bp, synthetic construct; identical to SEQ ID NO: 704
  source 1..109: mol_type = other DNA

SEQ ID NO: 706 - DNA, 383 bp, synthetic construct
  source 1..383: mol_type = other DNA
gcgtggcctgcgcgttatcaggccgcccccattgtccggccaccggacgcctctttgtttgtatgagctggctttgggtttggggctctgggtagcccctgagttggaggaaatgccactctaaaggcggatgagacctcttttggtccaacggcatccctgagaggagatgaacaggctggtgccatagctgggtactcagtcttccgcagtctgctcctctctctcttccatcaggtagtaccacctgatgctcttttcctttcctttctcttcttcttcttttcggccaaagcctgtactggtgatggcagggtctggggcgcgtagatagctggccgctttcgtagctatcgttactgtcgatttgtttttgctttatt

SEQ ID NO: 707 - DNA, 13 bp, synthetic construct
  source 1..13: mol_type = other DNA
agccctagtccct

SEQ ID NO: 708 - DNA, 705 bp, synthetic construct
  source 1..705: mol_type = other DNA
cagtgtgcatctcttctacaaggccaccagacatccaggcgacctgaaatcggactaagtatctctttctttaaaccaagctagtctgctaaatttgctgttgattctagtgtcttaagttaatttgattgctgatttgctttagtttttgtcgtctcacggccagttctctttgtttgaagttatcttggttgctagtttgctcaagctctttcagtcttttagtgccagtttgtgttctagattctactattaagttaactgccagtgtgccctcctaactctgctaggttttgacctgatctaagtctgttttgccttgttttctgaagcaaataagacttgtatccttaaactctcattttgtcaaaacaccacatggtgtttgttcactgattagggtgtcaagctattggtgctttgcattttgaggagtttctgtcgaggccaatcgaccttttgtctcctaaacgacgggggagcggccagcgcagccgcagccgacttccactaacgagggagtatttaactagaaatcgtgggaagcgttagcttatcctcgcagcacgaagacgagcagaacaaagaccagggagtctttcgtggagtcaagacgagagacaaagaccagggagtctttcgtggagtcaagacgagcagaacaaagacaagggagtctttcgtggcagtcttcggggcggctga

SEQ ID NO: 709 - DNA, 764 bp, synthetic construct
  source 1..764: mol_type = other DNA
tctgtaaatggctgtgtgatgcgtctagtgtgtaggcgtagcggtagtgtgcttgccacttctcgctttcagccctcaccgctggctagcggagctgcatgcagcactgcgaaaagagagccgagtgcgtaagtctctcctgccagtacatagcctctccacagcaagtccccattgcagtgcctcctcgtggctacagacggaaactgggcaccgtaaggccccaggctaaactgcagggagctcggaggaggtctggcccccagacgcacggcatgcatggcccaccggcgtgtggacacgccctgatgcctgcgaaccagacccccagctatgggcaaatagcacgggtagacggagctcgtcagccttggatggcagttcgtctaggggaaggaaaaccctgattcaaaaacctccgctgccttgcggctatacccagtcctgggaaaggctacgggagttaacccagagagaaaatccggagtggagtacgtgaggcggttggctgtcaaactctgtcatccttccggcaactcctgcagccaaaccaacgccaagtgtcacgcctcgcgttcccttggaccacgtcggtgaggtcgagaggggggtcctgttgtgtttttgggcagcgcaggtcctccataaacctgcccaggctagcgctctggagaggccactccagtcgcccccatcactgggggtgagaaacaaaccgggagacagcagtttacgggttataagtccttgctaaattgacgtaa

SEQ ID NO: 710 - DNA, 268 bp, synthetic construct
  source 1..268: mol_type = other DNA
cccgtgtggagtttgctggtcttccatcgggcacctccccaggtggcggataggggaatgctcaccagatatggtgggtaccggggaaataaaatacccggggtggaccaaaaccagcaactgctgccttgtagtatgatattggcttatcaaaggctaaaggaagaaaaccttgaatacaaattacctggtcctccaggttgggggttgtgcagtgggccagctcctcactcacataaaaatataaaatgctaaaaaacctaataat

SEQ ID NO: 711-714 - skipped (4 entries)

SEQ ID NO: 715 - protein, 2208 aa, synthetic construct
MPAAKRVKLDGGDKKYSIGLDIGTNSVGWAVITDEYKVPSKKFKVLGNTDRHSIKKNLIGALLFDSGETAEATRLKRTARRRYTRRKNRICYLQEIFSNEMAKVDDSFFHRLEESFLVEEDKKHERHPIFGNIVDEVAYHEKYPTIYHLRKKLVDSTDKADLRLIYLALAHMIKFRGHFLIEGDLNPDNSDVDKLFIQLVQTYNQLFEENPINASGVDAKAILSARLSKSRRLENLIAQLPGEKKNGLFGNLIALSLGLTPNFKSNFDLAEDAKLQLSKDTYDDDLDNLLAQIGDQYADLFLAAKNLSDAILLSDILRVNTEITKAPLSASMIKRYDEHHQDLTLLKALVRQQLPEKYKEIFFDQSKNGYAGYIDGGASQEEFYKFIKPILEKMDGTEELLVKLNREDLLRKQRTFDNGSIPHQIHLGELHAILRRQEDFYPFLKDNREKIEKILTFRIPYYVGPLARGNSRFAWMTRKSEETITPWNFEEVVDKGASAQSFIERMTNFDKNLPNEKVLPKHSLLYEYFTVYNELTKVKYVTEGMRKPAFLSGEQKKAIVDLLFKTNRKVTVKQLKEDYFKKIECFDSVEISGVEDRFNASLGTYHDLLKIIKDKDFLDNEENEDILEDIVLTLTLFEDREMIEERLKTYAHLFDDKVMKQLKRRRYTGWGRLSRKLINGIRDKQSGKTILDFLKSDGFANRNFMQLIHDDSLTFKEDIQKAQVSGQGDSLHEHIANLAGSPAIKKGILQTVKVVDELVKVMGRHKPENIVIEMARENQTTQKGQKNSRERMKRIEEGIKELGSQILKEHPVENTQLQNEKLYLYYLQNGRDMYVDQELDINRLSDYDVDHIVPQSFLKDDSIDNKVLTRSDKARGKSDNVPSEEVVKKMKNYWRQLLNAKLITQRKFDNLTKAERGGLSELDKAGFIKRQLVETRQITKHVAQILDSRMNTKYDENDKLIREVKVITLKSKLVSDFRKDFQFYKVREINNYHHAHDAYLNAVVGTALIKKYPKLESEFVYGDYKVYDVRKMIAKSEQEIGKATAKYFFYSNIMNFFKTEITLANGEIRKRPLIETNGETGEIVWDKGRDFATVRKVLSMPQVNIVKKTEVQTGGFSKESILPKRNSDKLIARKKDWDPKKYGGFDSPTVAYSVLVVAKVEKGKSKKLKSVKELLGITIMERSSFEKNPIDFLEAKGYKEVKKDLIIKLPKYSLFELENGRKRMLASAGELQKGNELALPSKYVNFLYLASHYEKLKGSPEDNEQKQLFVEQHKHYLDEIIEQISEFSKRVILADANLDKVLSAYNKHRDKPIREQAENIIHLFTLTNLGAPAAFKYFDTTIDRKRYTSTKEVLDATLIHQSITGLYETRIDLSQLGGDGGAEAAAKEAAAKEAAAKEAAAKALEAEAAAKEAAAKEAAAKEAAAKAGGMDLLKPLTVERKGVKIKGYWNSQADITCVPKDLLQGEEPVRQQNVTTIHGTQEGDVYYVNLKIDGRRINTEVIGTTLDYAIITPGDVPWILKKPLELTIKLDLEEQQGTLLNNSILSKKGKEELKQLFEKYSALWQSWENQVGHRRIRPHKIATGTVKPTPQKQYHINPKAKPDIQIVINDLLKQGVLIQKESTMNTPVYPVPKPNGRWRMVLDYRAVNKVTPLIAVQNQHSYGILGSLFKGRYKTTIDLSNGFWAHPIVPEDYWITAFTWQGKQYCWTVLPQGFLNSPGLFTGDVVDLLQGIPNVEVYVDDVYISHDSEKEHLEYLDILFNRLKEAGYIISLKKSNIANSIVDFLGFQITNEGRGLTDTFKEKLENITAPTTLKQLQSILGLLNFARNFIPDFTELIAPLYALIPKSTKNYVPWQIEHSTTLETLITKLNGAEYLQGRKGDKTLIMKVNASYTTGYIRYYNEGEKKPISYVSIVFSKTELKFTELEKLLTTVHKGLLKALDLSMGQNIHVYSPIVSMQNIQKTPQTAKKALASRWLSWLSYLEDPRIRFFYDPQMPALKDLPAVDTGKDNKKHPSNFQHIFYTDGSAITSPTKEGHLNAGMGIVYFINKDGNLQKQQEWSISLGNHTAQFAEIAAFEFALKKCLPLGGNILVVTDSNYVAKAYNEELDVWASNGFVNNRKKPLKHISKWKSVADLKRLRPDVVVTHEPGHQKLDSSPHAYGNNLADQLATQASFKVHAGKRTADGSEFEKRTADGSEFESPKKKAKVE

SEQ ID NO: 716-799 - skipped (84 entries)

SEQ ID NO: 800 - DNA, 233 bp, synthetic construct
  source 1..233: mol_type = other DNA
taatctgcaattgcctctctgaatatcacactaactgtacccaaaaaaaaaaaaaaaaaaaaaaaaaataaaaawactactaatacttcccttcttagactttacagacctgaaacttgcctatagcacttattcattgttgctcttagttgtgtaaattgcttccttgtcctcatttgtaagtcgctttggataaaagcgtctgctaaatgactaaatgtaaatgtaaatgt

SEQ ID NO: 801 - DNA, 233 bp, synthetic construct; identical to SEQ ID NO: 800
  source 1..233: mol_type = other DNA

SEQ ID NO: 802 - DNA, 51 bp, synthetic construct
  source 1..51: mol_type = other DNA
tgaaactgcacaaagacaatagtcattctcgatcaccgagagactaccact

SEQ ID NO: 803 - DNA, 51 bp, synthetic construct; identical to SEQ ID NO: 802
  source 1..51: mol_type = other DNA

SEQ ID NO: 804 - protein, 2092 aa, synthetic construct
MPAAKRVKLDGGDKKYSIGLDIGTNSVGWAVITDEYKVPSKKFKVLGNTDRHSIKKNLIGALLFDSGETAEATRLKRTARRRYTRRKNRICYLQEIFSNEMAKVDDSFFHRLEESFLVEEDKKHERHPIFGNIVDEVAYHEKYPTIYHLRKKLVDSTDKADLRLIYLALAHMIKFRGHFLIEGDLNPDNSDVDKLFIQLVQTYNQLFEENPINASGVDAKAILSARLSKSRRLENLIAQLPGEKKNGLFGNLIALSLGLTPNFKSNFDLAEDAKLQLSKDTYDDDLDNLLAQIGDQYADLFLAAKNLSDAILLSDILRVNTEITKAPLSASMIKRYDEHHQDLTLLKALVRQQLPEKYKEIFFDQSKNGYAGYIDGGASQEEFYKFIKPILEKMDGTEELLVKLNREDLLRKQRTFDNGSIPHQIHLGELHAILRRQEDFYPFLKDNREKIEKILTFRIPYYVGPLARGNSRFAWMTRKSEETITPWNFEEVVDKGASAQSFIERMTNFDKNLPNEKVLPKHSLLYEYFTVYNELTKVKYVTEGMRKPAFLSGEQKKAIVDLLFKTNRKVTVKQLKEDYFKKIECFDSVEISGVEDRFNASLGTYHDLLKIIKDKDFLDNEENEDILEDIVLTLTLFEDREMIEERLKTYAHLFDDKVMKQLKRRRYTGWGRLSRKLINGIRDKQSGKTILDFLKSDGFANRNFMQLIHDDSLTFKEDIQKAQVSGQGDSLHEHIANLAGSPAIKKGILQTVKVVDELVKVMGRHKPENIVIEMARENQTTQKGQKNSRERMKRIEEGIKELGSQILKEHPVENTQLQNEKLYLYYLQNGRDMYVDQELDINRLSDYDVDHIVPQSFLKDDSIDNKVLTRSDKARGKSDNVPSEEVVKKMKNYWRQLLNAKLITQRKFDNLTKAERGGLSELDKAGFIKRQLVETRQITKHVAQILDSRMNTKYDENDKLIREVKVITLKSKLVSDFRKDFQFYKVREINNYHHAHDAYLNAVVGTALIKKYPKLESEFVYGDYKVYDVRKMIAKSEQEIGKATAKYFFYSNIMNFFKTEITLANGEIRKRPLIETNGETGEIVWDKGRDFATVRKVLSMPQVNIVKKTEVQTGGFSKESILPKRNSDKLIARKKDWDPKKYGGFDSPTVAYSVLVVAKVEKGKSKKLKSVKELLGITIMERSSFEKNPIDFLEAKGYKEVKKDLIIKLPKYSLFELENGRKRMLASAGELQKGNELALPSKYVNFLYLASHYEKLKGSPEDNEQKQLFVEQHKHYLDEIIEQISEFSKRVILADANLDKVLSAYNKHRDKPIREQAENIIHLFTLTNLGAPAAFKYFDTTIDRKRYTSTKEVLDATLIHQSITGLYETRIDLSQLGGDGGGGGGSSGGSGGVLNLEEEYRLHEKPVPSSIDPSWLQLFPTVWAERAGMGLANQVPPVVVELRSGASPVAVRQYPMSKEAREGIRPHIQRFLDLGVLVPCQSPWNTPLLPVKKPGTNDYRPVQDLREINKRVQDIHPTVPNPYNLLSSLPPSHTWYSVLDLKDAFFCLKLHPNSQPLFAFEWRDPEKGNTGQLTWTRLPQGFKNSPTLFNEALHRDLAPFRALNPQVVLLQYVDDLLVAAPTYRDCKEGTQKLLQELSKLGYRVSAKKAQLCQKEVTYLGYLLKEGKRWLTPARKATVMKIPPPTTPRQVREFLGTAGFCRLWIPGFASLAAPLYPLTKPSIPFIWTEEHQKAFDRIKEALLSAPALALPDLTKPFTLYVDERAGVARGVLTQTLGPWRRPVAYLSKKLDPVASGWPTCLKAVAAVALLLKDADKLTLGQNVTVIASHSLESIVRQPPDRWMTNARMTHYQSLLLNERVSFAPPAVLNPATLLPVESEATPVHRCSEILAEETGTRRDLKDQPLPGVPAWYTDGSSFIAEGKRRAGAAIVDGKRTVWASSLPEGTSAQKAELVALTQALRLAEGKDINIYTDSRYAFATAHIHGAIYKQRGWLTSAGKDIKNKEEILALLEAIHLPKRVAIIHCPGHQKGNDPVATGNRRADEAAKQAALSTRVLAETTKPAGKRTADGSEFEKRTADGSEFESPKKKAKVE

SEQ ID NO: 805 - DNA, 91 bp, synthetic construct
  source 1..91: mol_type = other DNA
tagttgcttgtgatttcttttcttttttattttatttccattatttgaaatgtatttgctgtaccaatgcttttgacacgaaataaataaa

SEQ ID NO: 806 - DNA, 99 bp, synthetic construct
  source 1..99: mol_type = other DNA
tagcagcgttttgggcttcccggtgttgcaagatgcttcatttgggttgtattacctgtccgtgggagctcaagcgtgaagttttaataataataataa

SEQ ID NO: 807 - DNA, 171 bp, synthetic construct
  source 1..171: mol_type = other DNA
aacttgatctggctgatgctccgtagtctggactttgatattggataattttattatgtattgtatatgtgctatgtgtactttgtacttttatgtccaggattacctgaaaagcaggccgatttccggcctgagatgtaattactggtaaaataaataaagtgaagtgaa

SEQ ID NO: 808 - DNA, 203 bp, synthetic construct
  source 1..203: mol_type = other DNA
taaagactaacaaattgtagcacttaaattgtacttgtaacgtcactcatctatagcaaattgtaaattggcttatttgaggaaattgcactttcttgtttcttgttctcctgagtttgtaccctatggttgaatgcacttattgtacgtcgctttggataaaagcgtcagctaaatgacatgtaatgtaatgtaatgtaatg

SEQ ID NO: 809 - DNA, 54 bp, synthetic construct
  source 1..54: mol_type = other DNA
tgacctgatacagagcgctaccatcatctggaaagatggaaggatgcctactac

SEQ ID NO: 810 - DNA, 104 bp, synthetic construct
  source 1..104: mol_type = other DNA
tagtgtaaaaccttatgtactaggtgtattcatttctgggcgtattagtatgttggaggtaaacctctgtaatgaggacaatctcaataataaaataaaataaa

SEQ ID NO: 811-817 - skipped (7 entries)

SEQ ID NO: 818 - protein, 2101 aa, synthetic construct
MPAAKRVKLDGGDKKYSIGLDIGTNSVGWAVITDEYKVPSKKFKVLGNTDRHSIKKNLIGALLFDSGETAEATRLKRTARRRYTRRKNRICYLQEIFSNEMAKVDDSFFHRLEESFLVEEDKKHERHPIFGNIVDEVAYHEKYPTIYHLRKKLVDSTDKADLRLIYLALAHMIKFRGHFLIEGDLNPDNSDVDKLFIQLVQTYNQLFEENPINASGVDAKAILSARLSKSRRLENLIAQLPGEKKNGLFGNLIALSLGLTPNFKSNFDLAEDAKLQLSKDTYDDDLDNLLAQIGDQYADLFLAAKNLSDAILLSDILRVNTEITKAPLSASMIKRYDEHHQDLTLLKALVRQQLPEKYKEIFFDQSKNGYAGYIDGGASQEEFYKFIKPILEKMDGTEELLVKLNREDLLRKQRTFDNGSIPHQIHLGELHAILRRQEDFYPFLKDNREKIEKILTFRIPYYVGPLARGNSRFAWMTRKSEETITPWNFEEVVDKGASAQSFIERMTNFDKNLPNEKVLPKHSLLYEYFTVYNELTKVKYVTEGMRKPAFLSGEQKKAIVDLLFKTNRKVTVKQLKEDYFKKIECFDSVEISGVEDRFNASLGTYHDLLKIIKDKDFLDNEENEDILEDIVLTLTLFEDREMIEERLKTYAHLFDDKVMKQLKRRRYTGWGRLSRKLINGIRDKQSGKTILDFLKSDGFANRNFMQLIHDDSLTFKEDIQKAQVSGQGDSLHEHIANLAGSPAIKKGILQTVKVVDELVKVMGRHKPENIVIEMARENQTTQKGQKNSRERMKRIEEGIKELGSQILKEHPVENTQLQNEKLYLYYLQNGRDMYVDQELDINRLSDYDVDHIVPQSFLKDDSIDNKVLTRSDKARGKSDNVPSEEVVKKMKNYWRQLLNAKLITQRKFDNLTKAERGGLSELDKAGFIKRQLVETRQITKHVAQILDSRMNTKYDENDKLIREVKVITLKSKLVSDFRKDFQFYKVREINNYHHAHDAYLNAVVGTALIKKYPKLESEFVYGDYKVYDVRKMIAKSEQEIGKATAKYFFYSNIMNFFKTEITLANGEIRKRPLIETNGETGEIVWDKGRDFATVRKVLSMPQVNIVKKTEVQTGGFSKESILPKRNSDKLIARKKDWDPKKYGGFDSPTVAYSVLVVAKVEKGKSKKLKSVKELLGITIMERSSFEKNPIDFLEAKGYKEVKKDLIIKLPKYSLFELENGRKRMLASAGELQKGNELALPSKYVNFLYLASHYEKLKGSPEDNEQKQLFVEQHKHYLDEIIEQISEFSKRVILADANLDKVLSAYNKHRDKPIREQAENIIHLFTLTNLGAPAAFKYFDTTIDRKRYTSTKEVLDATLIHQSITGLYETRIDLSQLGGDGGGSSGSSGSSGSSGSSGSSGGVLNLEEEYRLHEKPVPSSIDPSWLQLFPTVWAERAGMGLANQVPPVVVELRSGASPVAVRQYPMSKEAREGIRPHIQRFLDLGVLVPCQSPWNTPLLPVKKPGTNDYRPVQDLREINKRVQDIHPTVPNPYNLLSSLPPSHTWYSVLDLKDAFFCLKLHPNSQPLFAFEWRDPEKGNTGQLTWTRLPQGFKNSPTLFNEALHRDLAPFRALNPQVVLLQYVDDLLVAAPTYRDCKEGTQKLLQELSKLGYRVSAKKAQLCQKEVTYLGYLLKEGKRWLTPARKATVMKIPPPTTPRQVREFLGTAGFCRLWIPGFASLAAPLYPLTKPSIPFIWTEEHQKAFDRIKEALLSAPALALPDLTKPFTLYVDERAGVARGVLTQTLGPWRRPVAYLSKKLDPVASGWPTCLKAVAAVALLLKDADKLTLGQNVTVIASHSLESIVRQPPDRWMTNARMTHYQSLLLNERVSFAPPAVLNPATLLPVESEATPVHRCSEILAEETGTRRDLKDQPLPGVPAWYTDGSSFIAEGKRRAGAAIVDGKRTVWASSLPEGTSAQKAELVALTQALRLAEGKDINIYTDSRYAFATAHIHGAIYKQRGWLTSAGKDIKNKEEILALLEAIHLPKRVAIIHCPGHQKGNDPVATGNRRADEAAKQAALSTRVLAETTKPAGKRTADGSEFEKRTADGSEFESPKKKAKVE

SEQ ID NO: 819 - protein, 2091 aa, synthetic construct
MPAAKRVKLDGGDKKYSIGLDIGTNSVGWAVITDEYKVPSKKFKVLGNTDRHSIKKNLIGALLFDSGETAEATRLKRTARRRYTRRKNRICYLQEIFSNEMAKVDDSFFHRLEESFLVEEDKKHERHPIFGNIVDEVAYHEKYPTIYHLRKKLVDSTDKADLRLIYLALAHMIKFRGHFLIEGDLNPDNSDVDKLFIQLVQTYNQLFEENPINASGVDAKAILSARLSKSRRLENLIAQLPGEKKNGLFGNLIALSLGLTPNFKSNFDLAEDAKLQLSKDTYDDDLDNLLAQIGDQYADLFLAAKNLSDAILLSDILRVNTEITKAPLSASMIKRYDEHHQDLTLLKALVRQQLPEKYKEIFFDQSKNGYAGYIDGGASQEEFYKFIKPILEKMDGTEELLVKLNREDLLRKQRTFDNGSIPHQIHLGELHAILRRQEDFYPFLKDNREKIEKILTFRIPYYVGPLARGNSRFAWMTRKSEETITPWNFEEVVDKGASAQSFIERMTNFDKNLPNEKVLPKHSLLYEYFTVYNELTKVKYVTEGMRKPAFLSGEQKKAIVDLLFKTNRKVTVKQLKEDYFKKIECFDSVEISGVEDRFNASLGTYHDLLKIIKDKDFLDNEENEDILEDIVLTLTLFEDREMIEERLKTYAHLFDDKVMKQLKRRRYTGWGRLSRKLINGIRDKQSGKTILDFLKSDGFANRNFMQLIHDDSLTFKEDIQKAQVSGQGDSLHEHIANLAGSPAIKKGILQTVKVVDELVKVMGRHKPENIVIEMARENQTTQKGQKNSRERMKRIEEGIKELGSQILKEHPVENTQLQNEKLYLYYLQNGRDMYVDQELDINRLSDYDVDHIVPQSFLKDDSIDNKVLTRSDKARGKSDNVPSEEVVKKMKNYWRQLLNAKLITQRKFDNLTKAERGGLSELDKAGFIKRQLVETRQITKHVAQILDSRMNTKYDENDKLIREVKVITLKSKLVSDFRKDFQFYKVREINNYHHAHDAYLNAVVGTALIKKYPKLESEFVYGDYKVYDVRKMIAKSEQEIGKATAKYFFYSNIMNFFKTEITLANGEIRKRPLIETNGETGEIVWDKGRDFATVRKVLSMPQVNIVKKTEVQTGGFSKESILPKRNSDKLIARKKDWDPKKYGGFDSPTVAYSVLVVAKVEKGKSKKLKSVKELLGITIMERSSFEKNPIDFLEAKGYKEVKKDLIIKLPKYSLFELENGRKRMLASAGELQKGNELALPSKYVNFLYLASHYEKLKGSPEDNEQKQLFVEQHKHYLDEIIEQISEFSKRVILADANLDKVLSAYNKHRDKPIREQAENIIHLFTLTNLGAPAAFKYFDTTIDRKRYTSTKEVLDATLIHQSITGLYETRIDLSQLGGDGGPAPEAAAKGGVLNLEEEYRLHEKPVPSSIDPSWLQLFPTVWAERAGMGLANQVPPVVVELRSGASPVAVRQYPMSKEAREGIRPHIQRFLDLGVLVPCQSPWNTPLLPVKKPGTNDYRPVQDLREINKRVQDIHPTVPNPYNLLSSLPPSHTWYSVLDLKDAFFCLKLHPNSQPLFAFEWRDPEKGNTGQLTWTRLPQGFKNSPTLFNEALHRDLAPFRALNPQVVLLQYVDDLLVAAPTYRDCKEGTQKLLQELSKLGYRVSAKKAQLCQKEVTYLGYLLKEGKRWLTPARKATVMKIPPPTTPRQVREFLGTAGFCRLWIPGFASLAAPLYPLTKPSIPFIWTEEHQKAFDRIKEALLSAPALALPDLTKPFTLYVDERAGVARGVLTQTLGPWRRPVAYLSKKLDPVASGWPTCLKAVAAVALLLKDADKLTLGQNVTVIASHSLESIVRQPPDRWMTNARMTHYQSLLLNERVSFAPPAVLNPATLLPVESEATPVHRCSEILAEETGTRRDLKDQPLPGVPAWYTDGSSFIAEGKRRAGAAIVDGKRTVWASSLPEGTSAQKAELVALTQALRLAEGKDINIYTDSRYAFATAHIHGAIYKQRGWLTSAGKDIKNKEEILALLEAIHLPKRVAIIHCPGHQKGNDPVATGNRRADEAAKQAALSTRVLAETTKPAGKRTADGSEFEKRTADGSEFESPKKKAKVE

SEQ ID NO: 820-870 - skipped (51 entries)

SEQ ID NO: 871 - protein, 2129 aa, synthetic construct
MPAAKRVKLDGGDKKYSIGLDIGTNSVGWAVITDEYKVPSKKFKVLGNTDRHSIKKNLIGALLFDSGETAEATRLKRTARRRYTRRKNRICYLQEIFSNEMAKVDDSFFHRLEESFLVEEDKKHERHPIFGNIVDEVAYHEKYPTIYHLRKKLVDSTDKADLRLIYLALAHMIKFRGHFLIEGDLNPDNSDVDKLFIQLVQTYNQLFEENPINASGVDAKAILSARLSKSRRLENLIAQLPGEKKNGLFGNLIALSLGLTPNFKSNFDLAEDAKLQLSKDTYDDDLDNLLAQIGDQYADLFLAAKNLSDAILLSDILRVNTEITKAPLSASMIKRYDEHHQDLTLLKALVRQQLPEKYKEIFFDQSKNGYAGYIDGGASQEEFYKFIKPILEKMDGTEELLVKLNREDLLRKQRTFDNGSIPHQIHLGELHAILRRQEDFYPFLKDNREKIEKILTFRIPYYVGPLARGNSRFAWMTRKSEETITPWNFEEVVDKGASAQSFIERMTNFDKNLPNEKVLPKHSLLYEYFTVYNELTKVKYVTEGMRKPAFLSGEQKKAIVDLLFKTNRKVTVKQLKEDYFKKIECFDSVEISGVEDRFNASLGTYHDLLKIIKDKDFLDNEENEDILEDIVLTLTLFEDREMIEERLKTYAHLFDDKVMKQLKRRRYTGWGRLSRKLINGIRDKQSGKTILDFLKSDGFANRNFMQLIHDDSLTFKEDIQKAQVSGQGDSLHEHIANLAGSPAIKKGILQTVKVVDELVKVMGRHKPENIVIEMARENQTTQKGQKNSRERMKRIEEGIKELGSQILKEHPVENTQLQNEKLYLYYLQNGRDMYVDQELDINRLSDYDVDHIVPQSFLKDDSIDNKVLTRSDKARGKSDNVPSEEVVKKMKNYWRQLLNAKLITQRKFDNLTKAERGGLSELDKAGFIKRQLVETRQITKHVAQILDSRMNTKYDENDKLIREVKVITLKSKLVSDFRKDFQFYKVREINNYHHAHDAYLNAVVGTALIKKYPKLESEFVYGDYKVYDVRKMIAKSEQEIGKATAKYFFYSNIMNFFKTEITLANGEIRKRPLIETNGETGEIVWDKGRDFATVRKVLSMPQVNIVKKTEVQTGGFSKESILPKRNSDKLIARKKDWDPKKYGGFDSPTVAYSVLVVAKVEKGKSKKLKSVKELLGITIMERSSFEKNPIDFLEAKGYKEVKKDLIIKLPKYSLFELENGRKRMLASAGELQKGNELALPSKYVNFLYLASHYEKLKGSPEDNEQKQLFVEQHKHYLDEIIEQISEFSKRVILADANLDKVLSAYNKHRDKPIREQAENIIHLFTLTNLGAPAAFKYFDTTIDRKRYTSTKEVLDATLIHQSITGLYETRIDLSQLGGDGGAEAAAKEAAAKEAAAKEAAAKALEAEAAAKEAAAKEAAAKEAAAKAGGVLNLEEEYRLHEKPVPSSIDPSWLQLFPTVWAERAGMGLANQVPPVVVELRSGASPVAVRQYPMSKEAREGIRPHIQRFLDLGVLVPCQSPWNTPLLPVKKPGTNDYRPVQDLREINKRVQDIHPTVPNPYNLLSSLPPSHTWYSVLDLKDAFFCLKLHPNSQPLFAFEWRDPEKGNTGQLTWTRLPQGFKNSPTLFNEALHRDLAPFRALNPQVVLLQYVDDLLVAAPTYRDCKEGTQKLLQELSKLGYRVSAKKAQLCQKEVTYLGYLLKEGKRWLTPARKATVMKIPPPTTPRQVREFLGKAGFCRLFIPGFASLAAPLYPLTKPSIPFIWTEEHQKAFDRIKEALLSAPALALPDLTKPFTLYVDERAGVARGVLTQTLGPWRRPVAYLSKKLDPVASGWPTCLKAVAAVALLLKDADKLTLGQNVTVIASHSLESIVRQPPDRWMTNARMTHYQSLLLNERVSFAPPAVLNPATLLPVESEATPVHRCSEILAEETGTRRDLKDQPLPGVPAWYTDGSSFIAEGKRRAGAAIVDGKRTVWASSLPEGTSAQKAELVALTQALRLAEGKDINIYTDSRYAFATAHIHGAIYKQRGWLTSAGKDIKNKEEILALLEAIHLPKRVAIIHCPGHQKGNDPVATGNRRADEAAKQAALSTRVLAETTKPAGKRTADGSEFEKRTADGSEFESPKKKAKVE

SEQ ID NO: 872 - protein, 2092 aa, synthetic construct
MPAAKRVKLDGGDKKYSIGLDIGTNSVGWAVITDEYKVPSKKFKVLGNTDRHSIKKNLIGALLFDSGETAEATRLKRTARRRYTRRKNRICYLQEIFSNEMAKVDDSFFHRLEESFLVEEDKKHERHPIFGNIVDEVAYHEKYPTIYHLRKKLVDSTDKADLRLIYLALAHMIKFRGHFLIEGDLNPDNSDVDKLFIQLVQTYNQLFEENPINASGVDAKAILSARLSKSRRLENLIAQLPGEKKNGLFGNLIALSLGLTPNFKSNFDLAEDAKLQLSKDTYDDDLDNLLAQIGDQYADLFLAAKNLSDAILLSDILRVNTEITKAPLSASMIKRYDEHHQDLTLLKALVRQQLPEKYKEIFFDQSKNGYAGYIDGGASQEEFYKFIKPILEKMDGTEELLVKLNREDLLRKQRTFDNGSIPHQIHLGELHAILRRQEDFYPFLKDNREKIEKILTFRIPYYVGPLARGNSRFAWMTRKSEETITPWNFEEVVDKGASAQSFIERMTNFDKNLPNEKVLPKHSLLYEYFTVYNELTKVKYVTEGMRKPAFLSGEQKKAIVDLLFKTNRKVTVKQLKEDYFKKIECFDSVEISGVEDRFNASLGTYHDLLKIIKDKDFLDNEENEDILEDIVLTLTLFEDREMIEERLKTYAHLFDDKVMKQLKRRRYTGWGRLSRKLINGIRDKQSGKTILDFLKSDGFANRNFMQLIHDDSLTFKEDIQKAQVSGQGDSLHEHIANLAGSPAIKKGILQTVKVVDELVKVMGRHKPENIVIEMARENQTTQKGQKNSRERMKRIEEGIKELGSQILKEHPVENTQLQNEKLYLYYLQNGRDMYVDQELDINRLSDYDVDHIVPQSFLKDDSIDNKVLTRSDKARGKSDNVPSEEVVKKMKNYWRQLLNAKLITQRKFDNLTKAERGGLSELDKAGFIKRQLVETRQITKHVAQILDSRMNTKYDENDKLIREVKVITLKSKLVSDFRKDFQFYKVREINNYHHAHDAYLNAVVGTALIKKYPKLESEFVYGDYKVYDVRKMIAKSEQEIGKATAKYFFYSNIMNFFKTEITLANGEIRKRPLIETNGETGEIVWDKGRDFATVRKVLSMPQVNIVKKTEVQTGGFSKESILPKRNSDKLIARKKDWDPKKYGGFDSPTVAYSVLVVAKVEKGKSKKLKSVKELLGITIMERSSFEKNPIDFLEAKGYKEVKKDLIIKLPKYSLFELENGRKRMLASAGELQKGNELALPSKYVNFLYLASHYEKLKGSPEDNEQKQLFVEQHKHYLDEIIEQISEFSKRVILADANLDKVLSAYNKHRDKPIREQAENIIHLFTLTNLGAPAAFKYFDTTIDRKRYTSTKEVLDATLIHQSITGLYETRIDLSQLGGDGGPAPGGGGSSGGVLNLEEEYRLHEKPVPSSIDPSWLQLFPTVWAERAGMGLANQVPPVVVELRSGASPVAVRQYPMSKEAREGIRPHIQRFLDLGVLVPCQSPWNTPLLPVKKPGTNDYRPVQDLREINKRVQDIHPTVPNPYNLLSSLPPSHTWYSVLDLKDAFFCLKLHPNSQPLFAFEWRDPEKGNTGQLTWTRLPQGFKNSPTLFNEALHRDLAPFRALNPQVVLLQYVDDLLVAAPTYRDCKEGTQKLLQELSKLGYRVSAKKAQLCQKEVTYLGYLLKEGKRWLTPARKATVMKIPPPTTPRQVREFLGKAGFCRLFIPGFASLAAPLYPLTKPSIPFIWTEEHQKAFDRIKEALLSAPALALPDLTKPFTLYVDERAGVARGVLTQTLGPWRRPVAYLSKKLDPVASGWPTCLKAVAAVALLLKDADKLTLGQNVTVIASHSLESIVRQPPDRWMTNARMTHYQSLLLNERVSFAPPAVLNPATLLPVESEATPVHRCSEILAEETGTRRDLKDQPLPGVPAWYTDGSSFIAEGKRRAGAAIVDGKRTVWASSLPEGTSAQKAELVALTQALRLAEGKDINIYTDSRYAFATAHIHGAIYKQRGWLTSAGKDIKNKEEILALLEAIHLPKRVAIIHCPGHQKGNDPVATGNRRADEAAKQAALSTRVLAETTKPAGKRTADGSEFEKRTADGSEFESPKKKAKVE

SEQ ID NO: 873 - protein, 2108 aa, synthetic construct
MPAAKRVKLDGGDKKYSIGLDIGTNSVGWAVITDEYKVPSKKFKVLGNTDRHSIKKNLIGALLFDSGETAEATRLKRTARRRYTRRKNRICYLQEIFSNEMAKVDDSFFHRLEESFLVEEDKKHERHPIFGNIVDEVAYHEKYPTIYHLRKKLVDSTDKADLRLIYLALAHMIKFRGHFLIEGDLNPDNSDVDKLFIQLVQTYNQLFEENPINASGVDAKAILSARLSKSRRLENLIAQLPGEKKNGLFGNLIALSLGLTPNFKSNFDLAEDAKLQLSKDTYDDDLDNLLAQIGDQYADLFLAAKNLSDAILLSDILRVNTEITKAPLSASMIKRYDEHHQDLTLLKALVRQQLPEKYKEIFFDQSKNGYAGYIDGGASQEEFYKFIKPILEKMDGTEELLVKLNREDLLRKQRTFDNGSIPHQIHLGELHAILRRQEDFYPFLKDNREKIEKILTFRIPYYVGPLARGNSRFAWMTRKSEETITPWNFEEVVDKGASAQSFIERMTNFDKNLPNEKVLPKHSLLYEYFTVYNELTKVKYVTEGMRKPAFLSGEQKKAIVDLLFKTNRKVTVKQLKEDYFKKIECFDSVEISGVEDRFNASLGTYHDLLKIIKDKDFLDNEENEDILEDIVLTLTLFEDREMIEERLKTYAHLFDDKVMKQLKRRRYTGWGRLSRKLINGIRDKQSGKTILDFLKSDGFANRNFMQLIHDDSLTFKEDIQKAQVSGQGDSLHEHIANLAGSPAIKKGILQTVKVVDELVKVMGRHKPENIVIEMARENQTTQKGQKNSRERMKRIEEGIKELGSQILKEHPVENTQLQNEKLYLYYLQNGRDMYVDQELDINRLSDYDVDHIVPQSFLKDDSIDNKVLTRSDKARGKSDNVPSEEVVKKMKNYWRQLLNAKLITQRKFDNLTKAERGGLSELDKAGFIKRQLVETRQITKHVAQILDSRMNTKYDENDKLIREVKVITLKSKLVSDFRKDFQFYKVREINNYHHAHDAYLNAVVGTALIKKYPKLESEFVYGDYKVYDVRKMIAKSEQEIGKATAKYFFYSNIMNFFKTEITLANGEIRKRPLIETNGETGEIVWDKGRDFATVRKVLSMPQVNIVKKTEVQTGGFSKESILPKRNSDKLIARKKDWDPKKYGGFDSPTVAYSVLVVAKVEKGKSKKLKSVKELLGITIMERSSFEKNPIDFLEAKGYKEVKKDLIIKLPKYSLFELENGRKRMLASAGELQKGNELALPSKYVNFLYLASHYEKLKGSPEDNEQKQLFVEQHKHYLDEIIEQISEFSKRVILADANLDKVLSAYNKHRDKPIREQAENIIHLFTLTNLGAPAAFKYFDTTIDRKRYTSTKEVLDATLIHQSITGLYETRIDLSQLGGDGGGGGGSGGGGSGGGGSGGGGSGGGGSGGVLNLEEEYRLHEKPVPSSIDPSWLQLFPTVWAERAGMGLANQVPPVVVELRSGASPVAVRQYPMSKEAREGIRPHIQRFLDLGVLVPCQSPWNTPLLPVKKPGTNDYRPVQDLREINKRVQDIHPTVPNPYNLLSSLPPSHTWYSVLDLKDAFFCLKLHPNSQPLFAFEWRDPEKGNTGQLTWTRLPQGFKNSPTLFNEALHRDLAPFRALNPQVVLLQYVDDLLVAAPTYRDCKEGTQKLLQELSKLGYRVSAKKAQLCQKEVTYLGYLLKEGKRWLTPARKATVMKIPPPTTPRQVREFLGKAGFCRLFIPGFASLAAPLYPLTKPSIPFIWTEEHQKAFDRIKEALLSAPALALPDLTKPFTLYVDERAGVARGVLTQTLGPWRRPVAYLSKKLDPVASGWPTCLKAVAAVALLLKDADKLTLGQNVTVIASHSLESIVRQPPDRWMTNARMTHYQSLLLNERVSFAPPAVLNPATLLPVESEATPVHRCSEILAEETGTRRDLKDQPLPGVPAWYTDGSSFIAEGKRRAGAAIVDGKRTVWASSLPEGTSAQKAELVALTQALRLAEGKDINIYTDSRYAFATAHIHGAIYKQRGWLTSAGKDIKNKEEILALLEAIHLPKRVAIIHCPGHQKGNDPVATGNRRADEAAKQAALSTRVLAETTKPAGKRTADGSEFEKRTADGSEFESPKKKAKVE

SEQ ID NO: 874 - protein, 2094 aa, synthetic construct
MPAAKRVKLDGGDKKYSIGLDIGTNSVGWAVITDEYKVPSKKFKVLGNTDRHSIKKNLIGALLFDSGETAEATRLKRTARRRYTRRKNRICYLQEIFSNEMAKVDDSFFHRLEESFLVEEDKKHERHPIFGNIVDEVAYHEKYPTIYHLRKKLVDSTDKADLRLIYLALAHMIKFRGHFLIEGDLNPDNSDVDKLFIQLVQTYNQLFEENPINASGVDAKAILSARLSKSRRLENLIAQLPGEKKNGLFGNLIALSLGLTPNFKSNFDLAEDAKLQLSKDTYDDDLDNLLAQIGDQYADLFLAAKNLSDAILLSDILRVNTEITKAPLSASMIKRYDEHHQDLTLLKALVRQQLPEKYKEIFFDQSKNGYAGYIDGGASQEEFYKFIKPILEKMDGTEELLVKLNREDLLRKQRTFDNGSIPHQIHLGELHAILRRQEDFYPFLKDNREKIEKILTFRIPYYVGPLARGNSRFAWMTRKSEETITPWNFEEVVDKGASAQSFIERMTNFDKNLPNEKVLPKHSLLYEYFTVYNELTKVKYVTEGMRKPAFLSGEQKKAIVDLLFKTNRKVTVKQLKEDYFKKIECFDSVEISGVEDRFNASLGTYHDLLKIIKDKDFLDNEENEDILEDIVLTLTLFEDREMIEERLKTYAHLFDDKVMKQLKRRRYTGWGRLSRKLINGIRDKQSGKTILDFLKSDGFANRNFMQLIHDDSLTFKEDIQKAQVSGQGDSLHEHIANLAGSPAIKKGILQTVKVVDELVKVMGRHKPENIVIEMARENQTTQKGQKNSRERMKRIEEGIKELGSQILKEHPVENTQLQNEKLYLYYLQNGRDMYVDQELDINRLSDYDVDHIVPQSFLKDDSIDNKVLTRSDKARGKSDNVPSEEVVKKMKNYWRQLLNAKLITQRKFDNLTKAERGGLSELDKAGFIKRQLVETRQITKHVAQILDSRMNTKYDENDKLIREVKVITLKSKLVSDFRKDFQFYKVREINNYHHAHDAYLNAVVGTALIKKYPKLESEFVYGDYKVYDVRKMIAKSEQEIGKATAKYFFYSNIMNFFKTEITLANGEIRKRPLIETNGETGEIVWDKGRDFATVRKVLSMPQVNIVKKTEVQTGGFSKESILPKRNSDKLIARKKDWDPKKYGGFDSPTVAYSVLVVAKVEKGKSKKLKSVKELLGITIMERSSFEKNPIDFLEAKGYKEVKKDLIIKLPKYSLFELENGRKRMLASAGELQKGNELALPSKYVNFLYLASHYEKLKGSPEDNEQKQLFVEQHKHYLDEIIEQISEFSKRVILADANLDKVLSAYNKHRDKPIREQAENIIHLFTLTNLGAPAAFKYFDTTIDRKRYTSTKEVLDATLIHQSITGLYETRIDLSQLGGDGGEAAAKPAPGSSGGVLNLEEEYRLHEKPVPSSIDPSWLQLFPTVWAERAGMGLANQVPPVVVELRSGASPVAVRQYPMSKEAREGIRPHIQRFLDLGVLVPCQSPWNTPLLPVKKPGTNDYRPVQDLREINKRVQDIHPTVPNPYNLLSSLPPSHTWYSVLDLKDAFFCLKLHPNSQPLFAFEWRDPEKGNTGQLTWTRLPQGFKNSPTLFNEALHRDLAPFRALNPQVVLLQYVDDLLVAAPTYRDCKEGTQKLLQELSKLGYRVSAKKAQLCQKEVTYLGYLLKEGKRWLTPARKATVMKIPPPTTPRQVREFLGKAGFCRLFIPGFASLAAPLYPLTKPSIPFIWTEEHQKAFDRIKEALLSAPALALPDLTKPFTLYVDERAGVARGVLTQTLGPWRRPVAYLSKKLDPVASGWPTCLKAVAAVALLLKDADKLTLGQNVTVIASHSLESIVRQPPDRWMTNARMTHYQSLLLNERVSFAPPAVLNPATLLPVESEATPVHRCSEILAEETGTRRDLKDQPLPGVPAWYTDGSSFIAEGKRRAGAAIVDGKRTVWASSLPEGTSAQKAELVALTQALRLAEGKDINIYTDSRYAFATAHIHGAIYKQRGWLTSAGKDIKNKEEILALLEAIHLPKRVAIIHCPGHQKGNDPVATGNRRADEAAKQAALSTRVLAETTKPAGKRTADGSEFEKRTADGSEFESPKKKAKVE

SEQ ID NO: 875 - skipped

SEQ ID NO: 876 - protein, 2086 aa, synthetic construct
MPAAKRVKLDGGDKKYSIGLDIGTNSVGWAVITDEYKVPSKKFKVLGNTDRHSIKKNLIGALLFDSGETAEATRLKRTARRRYTRRKNRICYLQEIFSNEMAKVDDSFFHRLEESFLVEEDKKHERHPIFGNIVDEVAYHEKYPTIYHLRKKLVDSTDKADLRLIYLALAHMIKFRGHFLIEGDLNPDNSDVDKLFIQLVQTYNQLFEENPINASGVDAKAILSARLSKSRRLENLIAQLPGEKKNGLFGNLIALSLGLTPNFKSNFDLAEDAKLQLSKDTYDDDLDNLLAQIGDQYADLFLAAKNLSDAILLSDILRVNTEITKAPLSASMIKRYDEHHQDLTLLKALVRQQLPEKYKEIFFDQSKNGYAGYIDGGASQEEFYKFIKPILEKMDGTEELLVKLNREDLLRKQRTFDNGSIPHQIHLGELHAILRRQEDFYPFLKDNREKIEKILTFRIPYYVGPLARGNSRFAWMTRKSEETITPWNFEEVVDKGASAQSFIERMTNFDKNLPNEKVLPKHSLLYEYFTVYNELTKVKYVTEGMRKPAFLSGEQKKAIVDLLFKTNRKVTVKQLKEDYFKKIECFDSVEISGVEDRFNASLGTYHDLLKIIKDKDFLDNEENEDILEDIVLTLTLFEDREMIEERLKTYAHLFDDKVMKQLKRRRYTGWGRLSRKLINGIRDKQSGKTILDFLKSDGFANRNFMQLIHDDSLTFKEDIQKAQVSGQGDSLHEHIANLAGSPAIKKGILQTVKVVDELVKVMGRHKPENIVIEMARENQTTQKGQKNSRERMKRIEEGIKELGSQILKEHPVENTQLQNEKLYLYYLQNGRDMYVDQELDINRLSDYDVDHIVPQSFLKDDSIDNKVLTRSDKARGKSDNVPSEEVVKKMKNYWRQLLNAKLITQRKFDNLTKAERGGLSELDKAGFIKRQLVETRQITKHVAQILDSRMNTKYDENDKLIREVKVITLKSKLVSDFRKDFQFYKVREINNYHHAHDAYLNAVVGTALIKKYPKLESEFVYGDYKVYDVRKMIAKSEQEIGKATAKYFFYSNIMNFFKTEITLANGEIRKRPLIETNGETGEIVWDKGRDFATVRKVLSMPQVNIVKKTEVQTGGFSKESILPKRNSDKLIARKKDWDPKKYGGFDSPTVAYSVLVVAKVEKGKSKKLKSVKELLGITIMERSSFEKNPIDFLEAKGYKEVKKDLIIKLPKYSLFELENGRKRMLASAGELQKGNELALPSKYVNFLYLASHYEKLKGSPEDNEQKQLFVEQHKHYLDEIIEQISEFSKRVILADANLDKVLSAYNKHRDKPIREQAENIIHLFTLTNLGAPAAFKYFDTTIDRKRYTSTKEVLDATLIHQSITGLYETRIDLSQLGGDGGGSSGGVLNLEEEYRLHEKPVPSSIDPSWLQLFPTVWAERAGMGLANQVPPVVVELRSGASPVAVRQYPMSKEAREGIRPHIQRFLDLGVLVPCQSPWNTPLLPVKKPGTNDYRPVQDLREINKRVQDIHPTVPNPYNLLSSLPPSHTWYSVLDLKDAFFCLKLHPNSQPLFAFEWRDPEKGNTGQLTWTRLPQGFKNSPTLFNEALHRDLAPFRALNPQVVLLQYVDDLLVAAPTYRDCKEGTQKLLQELSKLGYRVSAKKAQLCQKEVTYLGYLLKEGKRWLTPARKATVMKIPPPTTPRQVREFLGKAGFCRLFIPGFASLAAPLYPLTKPSIPFIWTEEHQKAFDRIKEALLSAPALALPDLTKPFTLYVDERAGVARGVLTQTLGPWRRPVAYLSKKLDPVASGWPTCLKAVAAVALLLKDADKLTLGQNVTVIASHSLESIVRQPPDRWMTNARMTHYQSLLLNERVSFAPPAVLNPATLLPVESEATPVHRCSEILAEETGTRRDLKDQPLPGVPAWYTDGSSFIAEGKRRAGAAIVDGKRTVWASSLPEGTSAQKAELVALTQALRLAEGKDINIYTDSRYAFATAHIHGAIYKQRGWLTSAGKDIKNKEEILALLEAIHLPKRVAIIHCPGHQKGNDPVATGNRRADEAAKQAALSTRVLAETTKPAGKRTADGSEFEKRTADGSEFESPKKKAKVE

SEQ ID NO: 877 - skipped

SEQ ID NO: 878 - protein, 2092 aa, synthetic construct
MPAAKRVKLDGGDKKYSIGLDIGTNSVGWAVITDEYKVPSKKFKVLGNTDRHSIKKNLIGALLFDSGETAEATRLKRTARRRYTRRKNRICYLQEIFSNEMAKVDDSFFHRLEESFLVEEDKKHERHPIFGNIVDEVAYHEKYPTIYHLRKKLVDSTDKADLRLIYLALAHMIKFRGHFLIEGDLNPDNSDVDKLFIQLVQTYNQLFEENPINASGVDAKAILSARLSKSRRLENLIAQLPGEKKNGLFGNLIALSLGLTPNFKSNFDLAEDAKLQLSKDTYDDDLDNLLAQIGDQYADLFLAAKNLSDAILLSDILRVNTEITKAPLSASMIKRYDEHHQDLTLLKALVRQQLPEKYKEIFFDQSKNGYAGYIDGGASQEEFYKFIKPILEKMDGTEELLVKLNREDLLRKQRTFDNGSIPHQIHLGELHAILRRQEDFYPFLKDNREKIEKILTFRIPYYVGPLARGNSRFAWMTRKSEETITPWNFEEVVDKGASAQSFIERMTNFDKNLPNEKVLPKHSLLYEYFTVYNELTKVKYVTEGMRKPAFLSGEQKKAIVDLLFKTNRKVTVKQLKEDYFKKIECFDSVEISGVEDRFNASLGTYHDLLKIIKDKDFLDNEENEDILEDIVLTLTLFEDREMIEERLKTYAHLFDDKVMKQLKRRRYTGWGRLSRKLINGIRDKQSGKTILDFLKSDGFANRNFMQLIHDDSLTFKEDIQKAQVSGQGDSLHEHIANLAGSPAIKKGILQTVKVVDELVKVMGRHKPENIVIEMARENQTTQKGQKNSRERMKRIEEGIKELGSQILKEHPVENTQLQNEKLYLYYLQNGRDMYVDQELDINRLSDYDVDHIVPQSFLKDDSIDNKVLTRSDKARGKSDNVPSEEVVKKMKNYWRQLLNAKLITQRKFDNLTKAERGGLSELDKAGFIKRQLVETRQITKHVAQILDSRMNTKYDENDKLIREVKVITLKSKLVSDFRKDFQFYKVREINNYHHAHDAYLNAVVGTALIKKYPKLESEFVYGDYKVYDVRKMIAKSEQEIGKATAKYFFYSNIMNFFKTEITLANGEIRKRPLIETNGETGEIVWDKGRDFATVRKVLSMPQVNIVKKTEVQTGGFSKESILPKRNSDKLIARKKDWDPKKYGGFDSPTVAYSVLVVAKVEKGKSKKLKSVKELLGITIMERSSFEKNPIDFLEAKGYKEVKKDLIIKLPKYSLFELENGRKRMLASAGELQKGNELALPSKYVNFLYLASHYEKLKGSPEDNEQKQLFVEQHKHYLDEIIEQISEFSKRVILADANLDKVLSAYNKHRDKPIREQAENIIHLFTLTNLGAPAAFKYFDTTIDRKRYTSTKEVLDATLIHQSITGLYETRIDLSQLGGDGGGGGPAPGGSGGVLNLEEEYRLHEKPVPSSIDPSWLQLFPTVWAERAGMGLANQVPPVVVELRSGASPVAVRQYPMSKEAREGIRPHIQRFLDLGVLVPCQSPWNTPLLPVKKPGTNDYRPVQDLREINKRVQDIHPTVPNPYNLLSSLPPSHTWYSVLDLKDAFFCLKLHPNSQPLFAFEWRDPEKGNTGQLTWTRLPQGFKNSPTLFNEALHRDLAPFRALNPQVVLLQYVDDLLVAAPTYRDCKEGTQKLLQELSKLGYRVSAKKAQLCQKEVTYLGYLLKEGKRWLTPARKATVMKIPPPTTPRQVREFLGKAGFCRLFIPGFASLAAPLYPLTKPSIPFIWTEEHQKAFDRIKEALLSAPALALPDLTKPFTLYVDERAGVARGVLTQTLGPWRRPVAYLSKKLDPVASGWPTCLKAVAAVALLLKDADKLTLGQNVTVIASHSLESIVRQPPDRWMTNARMTHYQSLLLNERVSFAPPAVLNPATLLPVESEATPVHRCSEILAEETGTRRDLKDQPLPGVPAWYTDGSSFIAEGKRRAGAAIVDGKRTVWASSLPEGTSAQKAELVALTQALRLAEGKDINIYTDSRYAFATAHIHGAIYKQRGWLTSAGKDIKNKEEILALLEAIHLPKRVAIIHCPGHQKGNDPVATGNRRADEAAKQAALSTRVLAETTKPAGKRTADGSEFEKRTADGSEFESPKKKAKVE

SEQ ID NO: 879 - skipped

SEQ ID NO: 880 - protein, 2092 aa, synthetic construct
MPAAKRVKLDGGDKKYSIGLDIGTNSVGWAVITDEYKVPSKKFKVLGNTDRHSIKKNLIGALLFDSGETAEATRLKRTARRRYTRRKNRICYLQEIFSNEMAKVDDSFFHRLEESFLVEEDKKHERHPIFGNIVDEVAYHEKYPTIYHLRKKLVDSTDKADLRLIYLALAHMIKFRGHFLIEGDLNPDNSDVDKLFIQLVQTYNQLFEENPINASGVDAKAILSARLSKSRRLENLIAQLPGEKKNGLFGNLIALSLGLTPNFKSNFDLAEDAKLQLSKDTYDDDLDNLLAQIGDQYADLFLAAKNLSDAILLSDILRVNTEITKAPLSASMIKRYDEHHQDLTLLKALVRQQLPEKYKEIFFDQSKNGYAGYIDGGASQEEFYKFIKPILEKMDGTEELLVKLNREDLLRKQRTFDNGSIPHQIHLGELHAILRRQEDFYPFLKDNREKIEKILTFRIPYYVGPLARGNSRFAWMTRKSEETITPWNFEEVVDKGASAQSFIERMTNFDKNLPNEKVLPKHSLLYEYFTVYNELTKVKYVTEGMRKPAFLSGEQKKAIVDLLFKTNRKVTVKQLKEDYFKKIECFDSVEISGVEDRFNASLGTYHDLLKIIKDKDFLDNEENEDILEDIVLTLTLFEDREMIEERLKTYAHLFDDKVMKQLKRRRYTGWGRLSRKLINGIRDKQSGKTILDFLKSDGFANRNFMQLIHDDSLTFKEDIQKAQVSGQGDSLHEHIANLAGSPAIKKGILQTVKVVDELVKVMGRHKPENIVIEMARENQTTQKGQKNSRERMKRIEEGIKELGSQILKEHPVENTQLQNEKLYLYYLQNGRDMYVDQELDINRLSDYDVDHIVPQSFLKDDSIDNKVLTRSDKARGKSDNVPSEEVVKKMKNYWRQLLNAKLITQRKFDNLTKAERGGLSELDKAGFIKRQLVETRQITKHVAQILDSRMNTKYDENDKLIREVKVITLKSKLVSDFRKDFQFYKVREINNYHHAHDAYLNAVVGTALIKKYPKLESEFVYGDYKVYDVRKMIAKSEQEIGKATAKYFFYSNIMNFFKTEITLANGEIRKRPLIETNGETGEIVWDKGRDFATVRKVLSMPQVNIVKKTEVQTGGFSKESILPKRNSDKLIARKKDWDPKKYGGFDSPTVAYSVLVVAKVEKGKSKKLKSVKELLGITIMERSSFEKNPIDFLEAKGYKEVKKDLIIKLPKYSLFELENGRKRMLASAGELQKGNELALPSKYVNFLYLASHYEKLKGSPEDNEQKQLFVEQHKHYLDEIIEQISEFSKRVILADANLDKVLSAYNKHRDKPIREQAENIIHLFTLTNLGAPAAFKYFDTTIDRKRYTSTKEVLDATLIHQSITGLYETRIDLSQLGGDGGPAPGGSGSSGGVLNLEEEYRLHEKPVPSSIDPSWLQLFPTVWAERAGMGLANQVPPVVVELRSGASPVAVRQYPMSKEAREGIRPHIQRFLDLGVLVPCQSPWNTPLLPVKKPGTNDYRPVQDLREINKRVQDIHPTVPNPYNLLSSLPPSHTWYSVLDLKDAFFCLKLHPNSQPLFAFEWRDPEKGNTGQLTWTRLPQGFKNSPTLFNEALHRDLAPFRALNPQVVLLQYVDDLLVAAPTYRDCKEGTQKLLQELSKLGYRVSAKKAQLCQKEVTYLGYLLKEGKRWLTPARKATVMKIPPPTTPRQVREFLGKAGFCRLFIPGFASLAAPLYPLTKPSIPFIWTEEHQKAFDRIKEALLSAPALALPDLTKPFTLYVDERAGVARGVLTQTLGPWRRPVAYLSKKLDPVASGWPTCLKAVAAVALLLKDADKLTLGQNVTVIASHSLESIVRQPPDRWMTNARMTHYQSLLLNERVSFAPPAVLNPATLLPVESEATPVHRCSEILAEETGTRRDLKDQPLPGVPAWYTDGSSFIAEGKRRAGAAIVDGKRTVWASSLPEGTSAQKAELVALTQALRLAEGKDINIYTDSRYAFATAHIHGAIYKQRGWLTSAGKDIKNKEEILALLEAIHLPKRVAIIHCPGHQKGNDPVATGNRRADEAAKQAALSTRVLAETTKPAGKRTADGSEFEKRTADGSEFESPKKKAKVE

SEQ ID NO: 881 - skipped

SEQ ID NO: 882 - protein, 2089 aa, synthetic construct
MPAAKRVKLDGGDKKYSIGLDIGTNSVGWAVITDEYKVPSKKFKVLGNTDRHSIKKNLIGALLFDSGETAEATRLKRTARRRYTRRKNRICYLQEIFSNEMAKVDDSFFHRLEESFLVEEDKKHERHPIFGNIVDEVAYHEKYPTIYHLRKKLVDSTDKADLRLIYLALAHMIKFRGHFLIEGDLNPDNSDVDKLFIQLVQTYNQLFEENPINASGVDAKAILSARLSKSRRLENLIAQLPGEKKNGLFGNLIALSLGLTPNFKSNFDLAEDAKLQLSKDTYDDDLDNLLAQIGDQYADLFLAAKNLSDAILLSDILRVNTEITKAPLSASMIKRYDEHHQDLTLLKALVRQQLPEKYKEIFFDQSKNGYAGYIDGGASQEEFYKFIKPILEKMDGTEELLVKLNREDLLRKQRTFDNGSIPHQIHLGELHAILRRQEDFYPFLKDNREKIEKILTFRIPYYVGPLARGNSRFAWMTRKSEETITPWNFEEVVDKGASAQSFIERMTNFDKNLPNEKVLPKHSLLYEYFTVYNELTKVKYVTEGMRKPAFLSGEQKKAIVDLLFKTNRKVTVKQLKEDYFKKIECFDSVEISGVEDRFNASLGTYHDLLKIIKDKDFLDNEENEDILEDIVLTLTLFEDREMIEERLKTYAHLFDDKVMKQLKRRRYTGWGRLSRKLINGIRDKQSGKTILDFLKSDGFANRNFMQLIHDDSLTFKEDIQKAQVSGQGDSLHEHIANLAGSPAIKKGILQTVKVVDELVKVMGRHKPENIVIEMARENQTTQKGQKNSRERMKRIEEGIKELGSQILKEHPVENTQLQNEKLYLYYLQNGRDMYVDQELDINRLSDYDVDHIVPQSFLKDDSIDNKVLTRSDKARGKSDNVPSEEVVKKMKNYWRQLLNAKLITQRKFDNLTKAERGGLSELDKAGFIKRQLVETRQITKHVAQILDSRMNTKYDENDKLIREVKVITLKSKLVSDFRKDFQFYKVREINNYHHAHDAYLNAVVGTALIKKYPKLESEFVYGDYKVYDVRKMIAKSEQEIGKATAKYFFYSNIMNFFKTEITLANGEIRKRPLIETNGETGEIVWDKGRDFATVRKVLSMPQVNIVKKTEVQTGGFSKESILPKRNSDKLIARKKDWDPKKYGGFDSPTVAYSVLVVAKVEKGKSKKLKSVKELLGITIMERSSFEKNPIDFLEAKGYKEVKKDLIIKLPKYSLFELENGRKRMLASAGELQKGNELALPSKYVNFLYLASHYEKLKGSPEDNEQKQLFVEQHKHYLDEIIEQISEFSKRVILADANLDKVLSAYNKHRDKPIREQAENIIHLFTLTNLGAPAAFKYFDTTIDRKRYTSTKEVLDATLIHQSITGLYETRIDLSQLGGDGGGGGGGGGGVLNLEEEYRLHEKPVPSSIDPSWLQLFPTVWAERAGMGLANQVPPVVVELRSGASPVAVRQYPMSKEAREGIRPHIQRFLDLGVLVPCQSPWNTPLLPVKKPGTNDYRPVQDLREINKRVQDIHPTVPNPYNLLSSLPPSHTWYSVLDLKDAFFCLKLHPNSQPLFAFEWRDPEKGNTGQLTWTRLPQGFKNSPTLFNEALHRDLAPFRALNPQVVLLQYVDDLLVAAPTYRDCKEGTQKLLQELSKLGYRVSAKKAQLCQKEVTYLGYLLKEGKRWLTPARKATVMKIPPPTTPRQVREFLGKAGFCRLFIPGFASLAAPLYPLTKPSIPFIWTEEHQKAFDRIKEALLSAPALALPDLTKPFTLYVDERAGVARGVLTQTLGPWRRPVAYLSKKLDPVASGWPTCLKAVAAVALLLKDADKLTLGQNVTVIASHSLESIVRQPPDRWMTNARMTHYQSLLLNERVSFAPPAVLNPATLLPVESEATPVHRCSEILAEETGTRRDLKDQPLPGVPAWYTDGSSFIAEGKRRAGAAIVDGKRTVWASSLPEGTSAQKAELVALTQALRLAEGKDINIYTDSRYAFATAHIHGAIYKQRGWLTSAGKDIKNKEEILALLEAIHLPKRVAIIHCPGHQKGNDPVATGNRRADEAAKQAALSTRVLAETTKPAGKRTADGSEFEKRTADGSEFESPKKKAKVE

SEQ ID NO: 883 - protein, 2091 aa, synthetic construct
MPAAKRVKLDGGDKKYSIGLDIGTNSVGWAVITDEYKVPSKKFKVLGNTDRHSIKKNLIGALLFDSGETAEATRLKRTARRRYTRRKNRICYLQEIFSNEMAKVDDSFFHRLEESFLVEEDKKHERHPIFGNIVDEVAYHEKYPTIYHLRKKLVDSTDKADLRLIYLALAHMIKFRGHFLIEGDLNPDNSDVDKLFIQLVQTYNQLFEENPINASGVDAKAILSARLSKSRRLENLIAQLPGEKKNGLFGNLIALSLGLTPNFKSNFDLAEDAKLQLSKDTYDDDLDNLLAQIGDQYADLFLAAKNLSDAILLSDILRVNTEITKAPLSASMIKRYDEHHQDLTLLKALVRQQLPEKYKEIFFDQSKNGYAGYIDGGASQEEFYKFIKPILEKMDGTEELLVKLNREDLLRKQRTFDNGSIPHQIHLGELHAILRRQEDFYPFLKDNREKIEKILTFRIPYYVGPLARGNSRFAWMTRKSEETITPWNFEEVVDKGASAQSFIERMTNFDKNLPNEKVLPKHSLLYEYFTVYNELTKVKYVTEGMRKPAFLSGEQKKAIVDLLFKTNRKVTVKQLKEDYFKKIECFDSVEISGVEDRFNASLGTYHDLLKIIKDKDFLDNEENEDILEDIVLTLTLFEDREMIEERLKTYAHLFDDKVMKQLKRRRYTGWGRLSRKLINGIRDKQSGKTILDFLKSDGFANRNFMQLIHDDSLTFKEDIQKAQVSGQGDSLHEHIANLAGSPAIKKGILQTVKVVDELVKVMGRHKPENIVIEMARENQTTQKGQKNSRERMKRIEEGIKELGSQILKEHPVENTQLQNEKLYLYYLQNGRDMYVDQELDINRLSDYDVDHIVPQSFLKDDSIDNKVLTRSDKARGKSDNVPSEEVVKKMKNYWRQLLNAKLITQRKFDNLTKAERGGLSELDKAGFIKRQLVETRQITKHVAQILDSRMNTKYDENDKLIREVKVITLKSKLVSDFRKDFQFYKVREINNYHHAHDAYLNAVVGTALIKKYPKLESEFVYGDYKVYDVRKMIAKSEQEIGKATAKYFFYSNIMNFFKTEITLANGEIRKRPLIETNGETGEIVWDKGRDFATVRKVLSMPQVNIVKKTEVQTGGFSKESILPKRNSDKLIARKKDWDPKKYGGFDSPTVAYSVLVVAKVEKGKSKKLKSVKELLGITIMERSSFEKNPIDFLEAKGYKEVKKDLIIKLPKYSLFELENGRKRMLASAGELQKGNELALPSKYVNFLYLASHYEKLKGSPEDNEQKQLFVEQHKHYLDEIIEQISEFSKRVILADANLDKVLSAYNKHRDKPIREQAENIIHLFTLTNLGAPAAFKYFDTTIDRKRYTSTKEVLDATLIHQSITGLYETRIDLSQLGGDGGGSSEAAAKGGVLNLEEEYRLHEKPVPSSIDPSWLQLFPTVWAERAGMGLANQVPPVVVELRSGASPVAVRQYPMSKEAREGIRPHIQRFLDLGVLVPCQSPWNTPLLPVKKPGTNDYRPVQDLREINKRVQDIHPTVPNPYNLLSSLPPSHTWYSVLDLKDAFFCLKLHPNSQPLFAFEWRDPEKGNTGQLTWTRLPQGFKNSPTLFNEALHRDLAPFRALNPQVVLLQYVDDLLVAAPTYRDCKEGTQKLLQELSKLGYRVSAKKAQLCQKEVTYLGYLLKEGKRWLTPARKATVMKIPPPTTPRQVREFLGKAGFCRLFIPGFASLAAPLYPLTKPSIPFIWTEEHQKAFDRIKEALLSAPALALPDLTKPFTLYVDERAGVARGVLTQTLGPWRRPVAYLSKKLDPVASGWPTCLKAVAAVALLLKDADKLTLGQNVTVIASHSLESIVRQPPDRWMTNARMTHYQSLLLNERVSFAPPAVLNPATLLPVESEATPVHRCSEILAEETGTRRDLKDQPLPGVPAWYTDGSSFIAEGKRRAGAAIVDGKRTVWASSLPEGTSAQKAELVALTQALRLAEGKDINIYTDSRYAFATAHIHGAIYKQRGWLTSAGKDIKNKEEILALLEAIHLPKRVAIIHCPGHQKGNDPVATGNRRADEAAKQAALSTRVLAETTKPAGKRTADGSEFEKRTADGSEFESPKKKAKVE

SEQ ID NO: 884 - protein, 2089 aa, synthetic construct
MPAAKRVKLDGGDKKYSIGLDIGTNSVGWAVITDEYKVPSKKFKVLGNTDRHSIKKNLIGALLFDSGETAEATRLKRTARRRYTRRKNRICYLQEIFSNEMAKVDDSFFHRLEESFLVEEDKKHERHPIFGNIVDEVAYHEKYPTIYHLRKKLVDSTDKADLRLIYLALAHMIKFRGHFLIEGDLNPDNSDVDKLFIQLVQTYNQLFEENPINASGVDAKAILSARLSKSRRLENLIAQLPGEKKNGLFGNLIALSLGLTPNFKSNFDLAEDAKLQLSKDTYDDDLDNLLAQIGDQYADLFLAAKNLSDAILLSDILRVNTEITKAPLSASMIKRYDEHHQDLTLLKALVRQQLPEKYKEIFFDQSKNGYAGYIDGGASQEEFYKFIKPILEKMDGTEELLVKLNREDLLRKQRTFDNGSIPHQIHLGELHAILRRQEDFYPFLKDNREKIEKILTFRIPYYVGPLARGNSRFAWMTRKSEETITPWNFEEVVDKGASAQSFIERMTNFDKNLPNEKVLPKHSLLYEYFTVYNELTKVKYVTEGMRKPAFLSGEQKKAIVDLLFKTNRKVTVKQLKEDYFKKIECFDSVEISGVEDRFNASLGTYHDLLKIIKDKDFLDNEENEDILEDIVLTLTLFEDREMIEERLKTYAHLFDDKVMKQLKRRRYTGWGRLSRKLINGIRDKQSGKTILDFLKSDGFANRNFMQLIHDDSLTFKEDIQKAQVSGQGDSLHEHIANLAGSPAIKKGILQTVKVVDELVKVMGRHKPENIVIEMARENQTTQKGQKNSRERMKRIEEGIKELGSQILKEHPVENTQLQNEKLYLYYLQNGRDMYVDQELDINRLSDYDVDHIVPQSFLKDDSIDNKVLTRSDKARGKSDNVPSEEVVKKMKNYWRQLLNAKLITQRKFDNLTKAERGGLSELDKAGFIKRQLVETRQITKHVAQILDSRMNTKYDENDKLIREVKVITLKSKLVSDFRKDFQFYKVREINNYHHAHDAYLNAVVGTALIKKYPKLESEFVYGDYKVYDVRKMIAKSEQEIGKATAKYFFYSNIMNFFKTEITLANGEIRKRPLIETNGETGEIVWDKGRDFATVRKVLSMPQVNIVKKTEVQTGGFSKESILPKRNSDKLIARKKDWDPKKYGGFDSPTVAYSVLVVAKVEKGKSKKLKSVKELLGITIMERSSFEKNPIDFLEAKGYKEVKKDLIIKLPKYSLFELENGRKRMLASAGELQKGNELALPSKYVNFLYLASHYEKLKGSPEDNEQKQLFVEQHKHYLDEIIEQISEFSKRVILADANLDKVLSAYNKHRDKPIREQAENIIHLFTLTNLGAPAAFKYFDTTIDRKRYTSTKEVLDATLIHQSITGLYETRIDLSQLGGDGGGSSPAPGGVLNLEEEYRLHEKPVPSSIDPSWLQLFPTVWAERAGMGLANQVPPVVVELRSGASPVAVRQYPMSKEAREGIRPHIQRFLDLGVLVPCQSPWNTPLLPVKKPGTNDYRPVQDLREINKRVQDIHPTVPNPYNLLSSLPPSHTWYSVLDLKDAFFCLKLHPNSQPLFAFEWRDPEKGNTGQLTWTRLPQGFKNSPTLFNEALHRDLAPFRALNPQVVLLQYVDDLLVAAPTYRDCKEGTQKLLQELSKLGYRVSAKKAQLCQKEVTYLGYLLKEGKRWLTPARKATVMKIPPPTTPRQVREFLGKAGFCRLFIPGFASLAAPLYPLTKPSIPFIWTEEHQKAFDRIKEALLSAPALALPDLTKPFTLYVDERAGVARGVLTQTLGPWRRPVAYLSKKLDPVASGWPTCLKAVAAVALLLKDADKLTLGQNVTVIASHSLESIVRQPPDRWMTNARMTHYQSLLLNERVSFAPPAVLNPATLLPVESEATPVHRCSEILAEETGTRRDLKDQPLPGVPAWYTDGSSFIAEGKRRAGAAIVDGKRTVWASSLPEGTSAQKAELVALTQALRLAEGKDINIYTDSRYAFATAHIHGAIYKQRGWLTSAGKDIKNKEEILALLEAIHLPKRVAIIHCPGHQKGNDPVATGNRRADEAAKQAALSTRVLAETTKPAGKRTADGSEFEKRTADGSEFESPKKKAKVE

SEQ ID NO: 885-889 - skipped (5 entries)

SEQ ID NO: 890 - protein, 2096 aa, synthetic construct
MPAAKRVKLDGGDKKYSIGLDIGTNSVGWAVITDEYKVPSKKFKVLGNTDRHSIKKNLIGALLFDSGETAEATRLKRTARRRYTRRKNRICYLQEIFSNEMAKVDDSFFHRLEESFLVEEDKKHERHPIFGNIVDEVAYHEKYPTIYHLRKKLVDSTDKADLRLIYLALAHMIKFRGHFLIEGDLNPDNSDVDKLFIQLVQTYNQLFEENPINASGVDAKAILSARLSKSRRLENLIAQLPGEKKNGLFGNLIALSLGLTPNFKSNFDLAEDAKLQLSKDTYDDDLDNLLAQIGDQYADLFLAAKNLSDAILLSDILRVNTEITKAPLSASMIKRYDEHHQDLTLLKALVRQQLPEKYKEIFFDQSKNGYAGYIDGGASQEEFYKFIKPILEKMDGTEELLVKLNREDLLRKQRTFDNGSIPHQIHLGELHAILRRQEDFYPFLKDNREKIEKILTFRIPYYVGPLARGNSRFAWMTRKSEETITPWNFEEVVDKGASAQSFIERMTNFDKNLPNEKVLPKHSLLYEYFTVYNELTKVKYVTEGMRKPAFLSGEQKKAIVDLLFKTNRKVTVKQLKEDYFKKIECFDSVEISGVEDRFNASLGTYHDLLKIIKDKDFLDNEENEDILEDIVLTLTLFEDREMIEERLKTYAHLFDDKVMKQLKRRRYTGWGRLSRKLINGIRDKQSGKTILDFLKSDGFANRNFMQLIHDDSLTFKEDIQKAQVSGQGDSLHEHIANLAGSPAIKKGILQTVKVVDELVKVMGRHKPENIVIEMARENQTTQKGQKNSRERMKRIEEGIKELGSQILKEHPVENTQLQNEKLYLYYLQNGRDMYVDQELDINRLSDYDVDHIVPQSFLKDDSIDNKVLTRSDKARGKSDNVPSEEVVKKMKNYWRQLLNAKLITQRKFDNLTKAERGGLSELDKAGFIKRQLVETRQITKHVAQILDSRMNTKYDENDKLIREVKVITLKSKLVSDFRKDFQFYKVREINNYHHAHDAYLNAVVGTALIKKYPKLESEFVYGDYKVYDVRKMIAKSEQEIGKATAKYFFYSNIMNFFKTEITLANGEIRKRPLIETNGETGEIVWDKGRDFATVRKVLSMPQVNIVKKTEVQTGGFSKESILPKRNSDKLIARKKDWDPKKYGGFDSPTVAYSVLVVAKVEKGKSKKLKSVKELLGITIMERSSFEKNPIDFLEAKGYKEVKKDLIIKLPKYSLFELENGRKRMLASAGELQKGNELALPSKYVNFLYLASHYEKLKGSPEDNEQKQLFVEQHKHYLDEIIEQISEFSKRVILADANLDKVLSAYNKHRDKPIREQAENIIHLFTLTNLGAPAAFKYFDTTIDRKRYTSTKEVLDATLIHQSITGLYETRIDLSQLGGDGGPAPAPAPAPAPAPGGVLNLEEEYRLHEKPVPSSIDPSWLQLFPTVWAERAGMGLANQVPPVVVELRSGASPVAVRQYPMSKEAREGIRPHIQRFLDLGVLVPCQSPWNTPLLPVKKPGTNDYRPVQDLREINKRVQDIHPTVPNPYNLLSSLPPSHTWYSVLDLKDAFFCLKLHPNSQPLFAFEWRDPEKGNTGQLTWTRLPQGFKNSPTLFNEALHRDLAPFRALNPQVVLLQYVDDLLVAAPTYRDCKEGTQKLLQELSKLGYRVSAKKAQLCQKEVTYLGYLLKEGKRWLTPARKATVMKIPPPTTPRQVREFLGKAGFCRLFIPGFASLAAPLYPLTKPSIPFIWTEEHQKAFDRIKEALLSAPALALPDLTKPFTLYVDERAGVARGVLTQTLGPWRRPVAYLSKKLDPVASGWPTCLKAVAAVALLLKDADKLTLGQNVTVIASHSLESIVRQPPDRWMTNARMTHYQSLLLNERVSFAPPAVLNPATLLPVESEATPVHRCSEILAEETGTRRDLKDQPLPGVPAWYTDGSSFIAEGKRRAGAAIVDGKRTVWASSLPEGTSAQKAELVALTQALRLAEGKDINIYTDSRYAFATAHIHGAIYKQRGWLTSAGKDIKNKEEILALLEAIHLPKRVAIIHCPGHQKGNDPVATGNRRADEAAKQAALSTRVLAETTKPAGKRTADGSEFEKRTADGSEFESPKKKAKVE

SEQ ID NO: 891-897 - skipped (7 entries)

SEQ ID NO: 898 - protein, 2094 aa, synthetic construct
MPAAKRVKLDGGDKKYSIGLDIGTNSVGWAVITDEYKVPSKKFKVLGNTDRHSIKKNLIGALLFDSGETAEATRLKRTARRRYTRRKNRICYLQEIFSNEMAKVDDSFFHRLEESFLVEEDKKHERHPIFGNIVDEVAYHEKYPTIYHLRKKLVDSTDKADLRLIYLALAHMIKFRGHFLIEGDLNPDNSDVDKLFIQLVQTYNQLFEENPINASGVDAKAILSARLSKSRRLENLIAQLPGEKKNGLFGNLIALSLGLTPNFKSNFDLAEDAKLQLSKDTYDDDLDNLLAQIGDQYADLFLAAKNLSDAILLSDILRVNTEITKAPLSASMIKRYDEHHQDLTLLKALVRQQLPEKYKEIFFDQSKNGYAGYIDGGASQEEFYKFIKPILEKMDGTEELLVKLNREDLLRKQRTFDNGSIPHQIHLGELHAILRRQEDFYPFLKDNREKIEKILTFRIPYYVGPLARGNSRFAWMTRKSEETITPWNFEEVVDKGASAQSFIERMTNFDKNLPNEKVLPKHSLLYEYFTVYNELTKVKYVTEGMRKPAFLSGEQKKAIVDLLFKTNRKVTVKQLKEDYFKKIECFDSVEISGVEDRFNASLGTYHDLLKIIKDKDFLDNEENEDILEDIVLTLTLFEDREMIEERLKTYAHLFDDKVMKQLKRRRYTGWGRLSRKLINGIRDKQSGKTILDFLKSDGFANRNFMQLIHDDSLTFKEDIQKAQVSGQGDSLHEHIANLAGSPAIKKGILQTVKVVDELVKVMGRHKPENIVIEMARENQTTQKGQKNSRERMKRIEEGIKELGSQILKEHPVENTQLQNEKLYLYYLQNGRDMYVDQELDINRLSDYDVDHIVPQSFLKDDSIDNKVLTRSDKARGKSDNVPSEEVVKKMKNYWRQLLNAKLITQRKFDNLTKAERGGLSELDKAGFIKRQLVETRQITKHVAQILDSRMNTKYDENDKLIREVKVITLKSKLVSDFRKDFQFYKVREINNYHHAHDAYLNAVVGTALIKKYPKLESEFVYGDYKVYDVRKMIAKSEQEIGKATAKYFFYSNIMNFFKTEITLANGEIRKRPLIETNGETGEIVWDKGRDFATVRKVLSMPQVNIVKKTEVQTGGFSKESILPKRNSDKLIARKKDWDPKKYGGFDSPTVAYSVLVVAKVEKGKSKKLKSVKELLGITIMERSSFEKNPIDFLEAKGYKEVKKDLIIKLPKYSLFELENGRKRMLASAGELQKGNELALPSKYVNFLYLASHYEKLKGSPEDNEQKQLFVEQHKHYLDEIIEQISEFSKRVILADANLDKVLSAYNKHRDKPIREQAENIIHLFTLTNLGAPAAFKYFDTTIDRKRYTSTKEVLDATLIHQSITGLYETRIDLSQLGGDGGGGSPAPEAAAKGGVLNLEEEYRLHEKPVPSSIDPSWLQLFPTVWAERAGMGLANQVPPVVVELRSGASPVAVRQYPMSKEAREGIRPHIQRFLDLGVLVPCQSPWNTPLLPVKKPGTNDYRPVQDLREINKRVQDIHPTVPNPYNLLSSLPPSHTWYSVLDLKDAFFCLKLHPNSQPLFAFEWRDPEKGNTGQLTWTRLPQGFKNSPTLFNEALHRDLAPFRALNPQVVLLQYVDDLLVAAPTYRDCKEGTQKLLQELSKLGYRVSAKKAQLCQKEVTYLGYLLKEGKRWLTPARKATVMKIPPPTTPRQVREFLGKAGFCRLFIPGFASLAAPLYPLTKPSIPFIWTEEHQKAFDRIKEALLSAPALALPDLTKPFTLYVDERAGVARGVLTQTLGPWRRPVAYLSKKLDPVASGWPTCLKAVAAVALLLKDADKLTLGQNVTVIASHSLESIVRQPPDRWMTNARMTHYQSLLLNERVSFAPPAVLNPATLLPVESEATPVHRCSEILAEETGTRRDLKDQPLPGVPAWYTDGSSFIAEGKRRAGAAIVDGKRTVWASSLPEGTSAQKAELVALTQALRLAEGKDINIYTDSRYAFATAHIHGAIYKQRGWLTSAGKDIKNKEEILALLEAIHLPKRVAIIHCPGHQKGNDPVATGNRRADEAAKQAALSTRVLAETTKPAGKRTADGSEFEKRTADGSEFESPKKKAKVE

SEQ ID NO: 899 - skipped

SEQ ID NO: 900 - protein, 2098 aa, synthetic construct
MPAAKRVKLDGGDKKYSIGLDIGTNSVGWAVITDEYKVPSKKFKVLGNTDRHSIKKNLIGALLFDSGETAEATRLKRTARRRYTRRKNRICYLQEIFSNEMAKVDDSFFHRLEESFLVEEDKKHERHPIFGNIVDEVAYHEKYPTIYHLRKKLVDSTDKADLRLIYLALAHMIKFRGHFLIEGDLNPDNSDVDKLFIQLVQTYNQLFEENPINASGVDAKAILSARLSKSRRLENLIAQLPGEKKNGLFGNLIALSLGLTPNFKSNFDLAEDAKLQLSKDTYDDDLDNLLAQIGDQYADLFLAAKNLSDAILLSDILRVNTEITKAPLSASMIKRYDEHHQDLTLLKALVRQQLPEKYKEIFFDQSKNGYAGYIDGGASQEEFYKFIKPILEKMDGTEELLVKLNREDLLRKQRTFDNGSIPHQIHLGELHAILRRQEDFYPFLKDNREKIEKILTFRIPYYVGPLARGNSRFAWMTRKSEETITPWNFEEVVDKGASAQSFIERMTNFDKNLPNEKVLPKHSLLYEYFTVYNELTKVKYVTEGMRKPAFLSGEQKKAIVDLLFKTNRKVTVKQLKEDYFKKIECFDSVEISGVEDRFNASLGTYHDLLKIIKDKDFLDNEENEDILEDIVLTLTLFEDREMIEERLKTYAHLFDDKVMKQLKRRRYTGWGRLSRKLINGIRDKQSGKTILDFLKSDGFANRNFMQLIHDDSLTFKEDIQKAQVSGQGDSLHEHIANLAGSPAIKKGILQTVKVVDELVKVMGRHKPENIVIEMARENQTTQKGQKNSRERMKRIEEGIKELGSQILKEHPVENTQLQNEKLYLYYLQNGRDMYVDQELDINRLSDYDVDHIVPQSFLKDDSIDNKVLTRSDKARGKSDNVPSEEVVKKMKNYWRQLLNAKLITQRKFDNLTKAERGGLSELDKAGFIKRQLVETRQITKHVAQILDSRMNTKYDENDKLIREVKVITLKSKLVSDFRKDFQFYKVREINNYHHAHDAYLNAVVGTALIKKYPKLESEFVYGDYKVYDVRKMIAKSEQEIGKATAKYFFYSNIMNFFKTEITLANGEIRKRPLIETNGETGEIVWDKGRDFATVRKVLSMPQVNIVKKTEVQTGGFSKESILPKRNSDKLIARKKDWDPKKYGGFDSPTVAYSVLVVAKVEKGKSKKLKSVKELLGITIMERSSFEKNPIDFLEAKGYKEVKKDLIIKLPKYSLFELENGRKRMLASAGELQKGNELALPSKYVNFLYLASHYEKLKGSPEDNEQKQLFVEQHKHYLDEIIEQISEFSKRVILADANLDKVLSAYNKHRDKPIREQAENIIHLFTLTNLGAPAAFKYFDTTIDRKRYTSTKEVLDATLIHQSITGLYETRIDLSQLGGDGGEAAAKGGGGSEAAAKGGVLNLEEEYRLHEKPVPSSIDPSWLQLFPTVWAERAGMGLANQVPPVVVELRSGASPVAVRQYPMSKEAREGIRPHIQRFLDLGVLVPCQSPWNTPLLPVKKPGTNDYRPVQDLREINKRVQDIHPTVPNPYNLLSSLPPSHTWYSVLDLKDAFFCLKLHPNSQPLFAFEWRDPEKGNTGQLTWTRLPQGFKNSPTLFNEALHRDLAPFRALNPQVVLLQYVDDLLVAAPTYRDCKEGTQKLLQELSKLGYRVSAKKAQLCQKEVTYLGYLLKEGKRWLTPARKATVMKIPPPTTPRQVREFLGKAGFCRLFIPGFASLAAPLYPLTKPSIPFIWTEEHQKAFDRIKEALLSAPALALPDLTKPFTLYVDERAGVARGVLTQTLGPWRRPVAYLSKKLDPVASGWPTCLKAVAAVALLLKDADKLTLGQNVTVIASHSLESIVRQPPDRWMTNARMTHYQSLLLNERVSFAPPAVLNPATLLPVESEATPVHRCSEILAEETGTRRDLKDQPLPGVPAWYTDGSSFIAEGKRRAGAAIVDGKRTVWASSLPEGTSAQKAELVALTQALRLAEGKDINIYTDSRYAFATAHIHGAIYKQRGWLTSAGKDIKNKEEILALLEAIHLPKRVAIIHCPGHQKGNDPVATGNRRADEAAKQAALSTRVLAETTKPAGKRTADGSEFEKRTADGSEFESPKKKAKVE

SEQ ID NO: 901 - protein, 2094 aa, synthetic construct
MPAAKRVKLDGGDKKYSIGLDIGTNSVGWAVITDEYKVPSKKFKVLGNTDRHSIKKNLIGALLFDSGETAEATRLKRTARRRYTRRKNRICYLQEIFSNEMAKVDDSFFHRLEESFLVEEDKKHERHPIFGNIVDEVAYHEKYPTIYHLRKKLVDSTDKADLRLIYLALAHMIKFRGHFLIEGDLNPDNSDVDKLFIQLVQTYNQLFEENPINASGVDAKAILSARLSKSRRLENLIAQLPGEKKNGLFGNLIALSLGLTPNFKSNFDLAEDAKLQLSKDTYDDDLDNLLAQIGDQYADLFLAAKNLSDAILLSDILRVNTEITKAPLSASMIKRYDEHHQDLTLLKALVRQQLPEKYKEIFFDQSKNGYAGYIDGGASQEEFYKFIKPILEKMDGTEELLVKLNREDLLRKQRTFDNGSIPHQIHLGELHAILRRQEDFYPFLKDNREKIEKILTFRIPYYVGPLARGNSRFAWMTRKSEETITPWNFEEVVDKGASAQSFIERMTNFDKNLPNEKVLPKHSLLYEYFTVYNELTKVKYVTEGMRKPAFLSGEQKKAIVDLLFKTNRKVTVKQLKEDYFKKIECFDSVEISGVEDRFNASLGTYHDLLKIIKDKDFLDNEENEDILEDIVLTLTLFEDREMIEERLKTYAHLFDDKVMKQLKRRRYTGWGRLSRKLINGIRDKQSGKTILDFLKSDGFANRNFMQLIHDDSLTFKEDIQKAQVSGQGDSLHEHIANLAGSPAIKKGILQTVKVVDELVKVMGRHKPENIVIEMARENQTTQKGQKNSRERMKRIEEGIKELGSQILKEHPVENTQLQNEKLYLYYLQNGRDMYVDQELDINRLSDYDVDHIVPQSFLKDDSIDNKVLTRSDKARGKSDNVPSEEVVKKMKNYWRQLLNAKLITQRKFDNLTKAERGGLSELDKAGFIKRQLVETRQITKHVAQILDSRMNTKYDENDKLIREVKVITLKSKLVSDFRKDFQFYKVREINNYHHAHDAYLNAVVGTALIKKYPKLESEFVYGDYKVYDVRKMIAKSEQEIGKATAKYFFYSNIMNFFKTEITLANGEIRKRPLIETNGETGEIVWDKGRDFATVRKVLSMPQVNIVKKTEVQTGGFSKESILPKRNSDKLIARKKDWDPKKYGGFDSPTVAYSVLVVAKVEKGKSKKLKSVKELLGITIMERSSFEKNPIDFLEAKGYKEVKKDLIIKLPKYSLFELENGRKRMLASAGELQKGNELALPSKYVNFLYLASHYEKLKGSPEDNEQKQLFVEQHKHYLDEIIEQISEFSKRVILADANLDKVLSAYNKHRDKPIREQAENIIHLFTLTNLGAPAAFKYFDTTIDRKRYTSTKEVLDATLIHQSITGLYETRIDLSQLGGDGGGGGEAAAKGGSGGVLNLEEEYRLHEKPVPSSIDPSWLQLFPTVWAERAGMGLANQVPPVVVELRSGASPVAVRQYPMSKEAREGIRPHIQRFLDLGVLVPCQSPWNTPLLPVKKPGTNDYRPVQDLREINKRVQDIHPTVPNPYNLLSSLPPSHTWYSVLDLKDAFFCLKLHPNSQPLFAFEWRDPEKGNTGQLTWTRLPQGFKNSPTLFNEALHRDLAPFRALNPQVVLLQYVDDLLVAAPTYRDCKEGTQKLLQELSKLGYRVSAKKAQLCQKEVTYLGYLLKEGKRWLTPARKATVMKIPPPTTPRQVREFLGKAGFCRLFIPGFASLAAPLYPLTKPSIPFIWTEEHQKAFDRIKEALLSAPALALPDLTKPFTLYVDERAGVARGVLTQTLGPWRRPVAYLSKKLDPVASGWPTCLKAVAAVALLLKDADKLTLGQNVTVIASHSLESIVRQPPDRWMTNARMTHYQSLLLNERVSFAPPAVLNPATLLPVESEATPVHRCSEILAEETGTRRDLKDQPLPGVPAWYTDGSSFIAEGKRRAGAAIVDGKRTVWASSLPEGTSAQKAELVALTQALRLAEGKDINIYTDSRYAFATAHIHGAIYKQRGWLTSAGKDIKNKEEILALLEAIHLPKRVAIIHCPGHQKGNDPVATGNRRADEAAKQAALSTRVLAETTKPAGKRTADGSEFEKRTADGSEFESPKKKAKVE

SEQ ID NO: 902-911 - skipped (10 entries)

SEQ ID NO: 912 - protein, 2094 aa, synthetic construct
MPAAKRVKLDGGDKKYSIGLDIGTNSVGWAVITDEYKVPSKKFKVLGNTDRHSIKKNLIGALLFDSGETAEATRLKRTARRRYTRRKNRICYLQEIFSNEMAKVDDSFFHRLEESFLVEEDKKHERHPIFGNIVDEVAYHEKYPTIYHLRKKLVDSTDKADLRLIYLALAHMIKFRGHFLIEGDLNPDNSDVDKLFIQLVQTYNQLFEENPINASGVDAKAILSARLSKSRRLENLIAQLPGEKKNGLFGNLIALSLGLTPNFKSNFDLAEDAKLQLSKDTYDDDLDNLLAQIGDQYADLFLAAKNLSDAILLSDILRVNTEITKAPLSASMIKRYDEHHQDLTLLKALVRQQLPEKYKEIFFDQSKNGYAGYIDGGASQEEFYKFIKPILEKMDGTEELLVKLNREDLLRKQRTFDNGSIPHQIHLGELHAILRRQEDFYPFLKDNREKIEKILTFRIPYYVGPLARGNSRFAWMTRKSEETITPWNFEEVVDKGASAQSFIERMTNFDKNLPNEKVLPKHSLLYEYFTVYNELTKVKYVTEGMRKPAFLSGEQKKAIVDLLFKTNRKVTVKQLKEDYFKKIECFDSVEISGVEDRFNASLGTYHDLLKIIKDKDFLDNEENEDILEDIVLTLTLFEDREMIEERLKTYAHLFDDKVMKQLKRRRYTGWGRLSRKLINGIRDKQSGKTILDFLKSDGFANRNFMQLIHDDSLTFKEDIQKAQVSGQGDSLHEHIANLAGSPAIKKGILQTVKVVDELVKVMGRHKPENIVIEMARENQTTQKGQKNSRERMKRIEEGIKELGSQILKEHPVENTQLQNEKLYLYYLQNGRDMYVDQELDINRLSDYDVDHIVPQSFLKDDSIDNKVLTRSDKARGKSDNVPSEEVVKKMKNYWRQLLNAKLITQRKFDNLTKAERGGLSELDKAGFIKRQLVETRQITKHVAQILDSRMNTKYDENDKLIREVKVITLKSKLVSDFRKDFQFYKVREINNYHHAHDAYLNAVVGTALIKKYPKLESEFVYGDYKVYDVRKMIAKSEQEIGKATAKYFFYSNIMNFFKTEITLANGEIRKRPLIETNGETGEIVWDKGRDFATVRKVLSMPQVNIVKKTEVQTGGFSKESILPKRNSDKLIARKKDWDPKKYGGFDSPTVAYSVLVVAKVEKGKSKKLKSVKELLGITIMERSSFEKNPIDFLEAKGYKEVKKDLIIKLPKYSLFELENGRKRMLASAGELQKGNELALPSKYVNFLYLASHYEKLKGSPEDNEQKQLFVEQHKHYLDEIIEQISEFSKRVILADANLDKVLSAYNKHRDKPIREQAENIIHLFTLTNLGAPAAFKYFDTTIDRKRYTSTKEVLDATLIHQSITGLYETRIDLSQLGGDGGGGSEAAAKPAPGGVLNLEEEYRLHEKPVPSSIDPSWLQLFPTVWAERAGMGLANQVPPVVVELRSGASPVAVRQYPMSKEAREGIRPHIQRFLDLGVLVPCQSPWNTPLLPVKKPGTNDYRPVQDLREINKRVQDIHPTVPNPYNLLSSLPPSHTWYSVLDLKDAFFCLKLHPNSQPLFAFEWRDPEKGNTGQLTWTRLPQGFKNSPTLFNEALHRDLAPFRALNPQVVLLQYVDDLLVAAPTYRDCKEGTQKLLQELSKLGYRVSAKKAQLCQKEVTYLGYLLKEGKRWLTPARKATVMKIPPPTTPRQVREFLGKAGFCRLFIPGFASLAAPLYPLTKPSIPFIWTEEHQKAFDRIKEALLSAPALALPDLTKPFTLYVDERAGVARGVLTQTLGPWRRPVAYLSKKLDPVASGWPTCLKAVAAVALLLKDADKLTLGQNVTVIASHSLESIVRQPPDRWMTNARMTHYQSLLLNERVSFAPPAVLNPATLLPVESEATPVHRCSEILAEETGTRRDLKDQPLPGVPAWYTDGSSFIAEGKRRAGAAIVDGKRTVWASSLPEGTSAQKAELVALTQALRLAEGKDINIYTDSRYAFATAHIHGAIYKQRGWLTSAGKDIKNKEEILALLEAIHLPKRVAIIHCPGHQKGNDPVATGNRRADEAAKQAALSTRVLAETTKPAGKRTADGSEFEKRTADGSEFESPKKKAKVE

SEQ ID NO: 913-914 - skipped (2 entries)

SEQ ID NO: 915 - protein, 2094 aa, synthetic construct
MPAAKRVKLDGGDKKYSIGLDIGTNSVGWAVITDEYKVPSKKFKVLGNTDRHSIKKNLIGALLFDSGETAEATRLKRTARRRYTRRKNRICYLQEIFSNEMAKVDDSFFHRLEESFLVEEDKKHERHPIFGNIVDEVAYHEKYPTIYHLRKKLVDSTDKADLRLIYLALAHMIKFRGHFLIEGDLNPDNSDVDKLFIQLVQTYNQLFEENPINASGVDAKAILSARLSKSRRLENLIAQLPGEKKNGLFGNLIALSLGLTPNFKSNFDLAEDAKLQLSKDTYDDDLDNLLAQIGDQYADLFLAAKNLSDAILLSDILRVNTEITKAPLSASMIKRYDEHHQDLTLLKALVRQQLPEKYKEIFFDQSKNGYAGYIDGGASQEEFYKFIKPILEKMDGTEELLVKLNREDLLRKQRTFDNGSIPHQIHLGELHAILRRQEDFYPFLKDNREKIEKILTFRIPYYVGPLARGNSRFAWMTRKSEETITPWNFEEVVDKGASAQSFIERMTNFDKNLPNEKVLPKHSLLYEYFTVYNELTKVKYVTEGMRKPAFLSGEQKKAIVDLLFKTNRKVTVKQLKEDYFKKIECFDSVEISGVEDRFNASLGTYHDLLKIIKDKDFLDNEENEDILEDIVLTLTLFEDREMIEERLKTYAHLFDDKVMKQLKRRRYTGWGRLSRKLINGIRDKQSGKTILDFLKSDGFANRNFMQLIHDDSLTFKEDIQKAQVSGQGDSLHEHIANLAGSPAIKKGILQTVKVVDELVKVMGRHKPENIVIEMARENQTTQKGQKNSRERMKRIEEGIKELGSQILKEHPVENTQLQNEKLYLYYLQNGRDMYVDQELDINRLSDYDVDHIVPQSFLKDDSIDNKVLTRSDKARGKSDNVPSEEVVKKMKNYWRQLLNAKLITQRKFDNLTKAERGGLSELDKAGFIKRQLVETRQITKHVAQILDSRMNTKYDENDKLIREVKVITLKSKLVSDFRKDFQFYKVREINNYHHAHDAYLNAVVGTALIKKYPKLESEFVYGDYKVYDVRKMIAKSEQEIGKATAKYFFYSNIMNFFKTEITLANGEIRKRPLIETNGETGEIVWDKGRDFATVRKVLSMPQVNIVKKTEVQTGGFSKESILPKRNSDKLIARKKDWDPKKYGGFDSPTVAYSVLVVAKVEKGKSKKLKSVKELLGITIMERSSFEKNPIDFLEAKGYKEVKKDLIIKLPKYSLFELENGRKRMLASAGELQKGNELALPSKYVNFLYLASHYEKLKGSPEDNEQKQLFVEQHKHYLDEIIEQISEFSKRVILADANLDKVLSAYNKHRDKPIREQAENIIHLFTLTNLGAPAAFKYFDTTIDRKRYTSTKEVLDATLIHQSITGLYETRIDLSQLGGDGGGSSGGSEAAAKGGVLNLEEEYRLHEKPVPSSIDPSWLQLFPTVWAERAGMGLANQVPPVVVELRSGASPVAVRQYPMSKEAREGIRPHIQRFLDLGVLVPCQSPWNTPLLPVKKPGTNDYRPVQDLREINKRVQDIHPTVPNPYNLLSSLPPSHTWYSVLDLKDAFFCLKLHPNSQPLFAFEWRDPEKGNTGQLTWTRLPQGFKNSPTLFNEALHRDLAPFRALNPQVVLLQYVDDLLVAAPTYRDCKEGTQKLLQELSKLGYRVSAKKAQLCQKEVTYLGYLLKEGKRWLTPARKATVMKIPPPTTPRQVREFLGKAGFCRLFIPGFASLAAPLYPLTKPSIPFIWTEEHQKAFDRIKEALLSAPALALPDLTKPFTLYVDERAGVARGVLTQTLGPWRRPVAYLSKKLDPVASGWPTCLKAVAAVALLLKDADKLTLGQNVTVIASHSLESIVRQPPDRWMTNARMTHYQSLLLNERVSFAPPAVLNPATLLPVESEATPVHRCSEILAEETGTRRDLKDQPLPGVPAWYTDGSSFIAEGKRRAGAAIVDGKRTVWASSLPEGTSAQKAELVALTQALRLAEGKDINIYTDSRYAFATAHIHGAIYKQRGWLTSAGKDIKNKEEILALLEAIHLPKRVAIIHCPGHQKGNDPVATGNRRADEAAKQAALSTRVLAETTKPAGKRTADGSEFEKRTADGSEFESPKKKAKVE

SEQ ID NO: 916-928 - skipped (13 entries)

SEQ ID NO: 929 - protein, 2092 aa, synthetic construct
MPAAKRVKLDGGDKKYSIGLDIGTNSVGWAVITDEYKVPSKKFKVLGNTDRHSIKKNLIGALLFDSGETAEATRLKRTARRRYTRRKNRICYLQEIFSNEMAKVDDSFFHRLEESFLVEEDKKHERHPIFGNIVDEVAYHEKYPTIYHLRKKLVDSTDKADLRLIYLALAHMIKFRGHFLIEGDLNPDNSDVDKLFIQLVQTYNQLFEENPINASGVDAKAILSARLSKSRRLENLIAQLPGEKKNGLFGNLIALSLGLTPNFKSNFDLAEDAKLQLSKDTYDDDLDNLLAQIGDQYADLFLAAKNLSDAILLSDILRVNTEITKAPLSASMIKRYDEHHQDLTLLKALVRQQLPEKYKEIFFDQSKNGYAGYIDGGASQEEFYKFIKPILEKMDGTEELLVKLNREDLLRKQRTFDNGSIPHQIHLGELHAILRRQEDFYPFLKDNREKIEKILTFRIPYYVGPLARGNSRFAWMTRKSEETITPWNFEEVVDKGASAQSFIERMTNFDKNLPNEKVLPKHSLLYEYFTVYNELTKVKYVTEGMRKPAFLSGEQKKAIVDLLFKTNRKVTVKQLKEDYFKKIECFDSVEISGVEDRFNASLGTYHDLLKIIKDKDFLDNEENEDILEDIVLTLTLFEDREMIEERLKTYAHLFDDKVMKQLKRRRYTGWGRLSRKLINGIRDKQSGKTILDFLKSDGFANRNFMQLIHDDSLTFKEDIQKAQVSGQGDSLHEHIANLAGSPAIKKGILQTVKVVDELVKVMGRHKPENIVIEMARENQTTQKGQKNSRERMKRIEEGIKELGSQILKEHPVENTQLQNEKLYLYYLQNGRDMYVDQELDINRLSDYDVDHIVPQSFLKDDSIDNKVLTRSDKARGKSDNVPSEEVVKKMKNYWRQLLNAKLITQRKFDNLTKAERGGLSELDKAGFIKRQLVETRQITKHVAQILDSRMNTKYDENDKLIREVKVITLKSKLVSDFRKDFQFYKVREINNYHHAHDAYLNAVVGTALIKKYPKLESEFVYGDYKVYDVRKMIAKSEQEIGKATAKYFFYSNIMNFFKTEITLANGEIRKRPLIETNGETGEIVWDKGRDFATVRKVLSMPQVNIVKKTEVQTGGFSKESILPKRNSDKLIARKKDWDPKKYGGFDSPTVAYSVLVVAKVEKGKSKKLKSVKELLGITIMERSSFEKNPIDFLEAKGYKEVKKDLIIKLPKYSLFELENGRKRMLASAGELQKGNELALPSKYVNFLYLASHYEKLKGSPEDNEQKQLFVEQHKHYLDEIIEQISEFSKRVILADANLDKVLSAYNKHRDKPIREQAENIIHLFTLTNLGAPAAFKYFDTTIDRKRYTSTKEVLDATLIHQSITGLYETRIDLSQLGGDGGGSSGSSGSSGGVLNLEEEYRLHEKPVPSSIDPSWLQLFPTVWAERAGMGLANQVPPVVVELRSGASPVAVRQYPMSKEAREGIRPHIQRFLDLGVLVPCQSPWNTPLLPVKKPGTNDYRPVQDLREINKRVQDIHPTVPNPYNLLSSLPPSHTWYSVLDLKDAFFCLKLHPNSQPLFAFEWRDPEKGNTGQLTWTRLPQGFKNSPTLFNEALHRDLAPFRALNPQVVLLQYVDDLLVAAPTYRDCKEGTQKLLQELSKLGYRVSAKKAQLCQKEVTYLGYLLKEGKRWLTPARKATVMKIPPPTTPRQVREFLGKAGFCRLFIPGFASLAAPLYPLTKPSIPFIWTEEHQKAFDRIKEALLSAPALALPDLTKPFTLYVDERAGVARGVLTQTLGPWRRPVAYLSKKLDPVASGWPTCLKAVAAVALLLKDADKLTLGQNVTVIASHSLESIVRQPPDRWMTNARMTHYQSLLLNERVSFAPPAVLNPATLLPVESEATPVHRCSEILAEETGTRRDLKDQPLPGVPAWYTDGSSFIAEGKRRAGAAIVDGKRTVWASSLPEGTSAQKAELVALTQALRLAEGKDINIYTDSRYAFATAHIHGAIYKQRGWLTSAGKDIKNKEEILALLEAIHLPKRVAIIHCPGHQKGNDPVATGNRRADEAAKQAALSTRVLAETTKPAGKRTADGSEFEKRTADGSEFESPKKKAKVE

SEQ ID NO: 930-932 - skipped (3 entries)

SEQ ID NO: 933 - protein, 2098 aa, synthetic construct
MPAAKRVKLDGGDKKYSIGLDIGTNSVGWAVITDEYKVPSKKFKVLGNTDRHSIKKNLIGALLFDSGETAEATRLKRTARRRYTRRKNRICYLQEIFSNEMAKVDDSFFHRLEESFLVEEDKKHERHPIFGNIVDEVAYHEKYPTIYHLRKKLVDSTDKADLRLIYLALAHMIKFRGHFLIEGDLNPDNSDVDKLFIQLVQTYNQLFEENPINASGVDAKAILSARLSKSRRLENLIAQLPGEKKNGLFGNLIALSLGLTPNFKSNFDLAEDAKLQLSKDTYDDDLDNLLAQIGDQYADLFLAAKNLSDAILLSDILRVNTEITKAPLSASMIKRYDEHHQDLTLLKALVRQQLPEKYKEIFFDQSKNGYAGYIDGGASQEEFYKFIKPILEKMDGTEELLVKLNREDLLRKQRTFDNGSIPHQIHLGELHAILRRQEDFYPFLKDNREKIEKILTFRIPYYVGPLARGNSRFAWMTRKSEETITPWNFEEVVDKGASAQSFIERMTNFDKNLPNEKVLPKHSLLYEYFTVYNELTKVKYVTEGMRKPAFLSGEQKKAIVDLLFKTNRKVTVKQLKEDYFKKIECFDSVEISGVEDRFNASLGTYHDLLKIIKDKDFLDNEENEDILEDIVLTLTLFEDREMIEERLKTYAHLFDDKVMKQLKRRRYTGWGRLSRKLINGIRDKQSGKTILDFLKSDGFANRNFMQLIHDDSLTFKEDIQKAQVSGQGDSLHEHIANLAGSPAIKKGILQTVKVVDELVKVMGRHKPENIVIEMARENQTTQKGQKNSRERMKRIEEGIKELGSQILKEHPVENTQLQNEKLYLYYLQNGRDMYVDQELDINRLSDYDVDHIVPQSFLKDDSIDNKVLTRSDKARGKSDNVPSEEVVKKMKNYWRQLLNAKLITQRKFDNLTKAERGGLSELDKAGFIKRQLVETRQITKHVAQILDSRMNTKYDENDKLIREVKVITLKSKLVSDFRKDFQFYKVREINNYHHAHDAYLNAVVGTALIKKYPKLESEFVYGDYKVYDVRKMIAKSEQEIGKATAKYFFYSNIMNFFKTEITLANGEIRKRPLIETNGETGEIVWDKGRDFATVRKVLSMPQVNIVKKTEVQTGGFSKESILPKRNSDKLIARKKDWDPKKYGGFDSPTVAYSVLVVAKVEKGKSKKLKSVKELLGITIMERSSFEKNPIDFLEAKGYKEVKKDLIIKLPKYSLFELENGRKRMLASAGELQKGNELALPSKYVNFLYLASHYEKLKGSPEDNEQKQLFVEQHKHYLDEIIEQISEFSKRVILADANLDKVLSAYNKHRDKPIREQAENIIHLFTLTNLGAPAAFKYFDTTIDRKRYTSTKEVLDATLIHQSITGLYETRIDLSQLGGDGGEAAAKEAAAKEAAAKGGVLNLEEEYRLHEKPVPSSIDPSWLQLFPTVWAERAGMGLANQVPPVVVELRSGASPVAVRQYPMSKEAREGIRPHIQRFLDLGVLVPCQSPWNTPLLPVKKPGTNDYRPVQDLREINKRVQDIHPTVPNPYNLLSSLPPSHTWYSVLDLKDAFFCLKLHPNSQPLFAFEWRDPEKGNTGQLTWTRLPQGFKNSPTLFNEALHRDLAPFRALNPQVVLLQYVDDLLVAAPTYRDCKEGTQKLLQELSKLGYRVSAKKAQLCQKEVTYLGYLLKEGKRWLTPARKATVMKIPPPTTPRQVREFLGKAGFCRLFIPGFASLAAPLYPLTKPSIPFIWTEEHQKAFDRIKEALLSAPALALPDLTKPFTLYVDERAGVARGVLTQTLGPWRRPVAYLSKKLDPVASGWPTCLKAVAAVALLLKDADKLTLGQNVTVIASHSLESIVRQPPDRWMTNARMTHYQSLLLNERVSFAPPAVLNPATLLPVESEATPVHRCSEILAEETGTRRDLKDQPLPGVPAWYTDGSSFIAEGKRRAGAAIVDGKRTVWASSLPEGTSAQKAELVALTQALRLAEGKDINIYTDSRYAFATAHIHGAIYKQRGWLTSAGKDIKNKEEILALLEAIHLPKRVAIIHCPGHQKGNDPVATGNRRADEAAKQAALSTRVLAETTKPAGKRTADGSEFEKRTADGSEFESPKKKAKVE

SEQ ID NO: 934-957 - skipped (24 entries)

SEQ ID NO: 958 - protein, 2103 aa, synthetic construct
MPAAKRVKLDGGDKKYSIGLDIGTNSVGWAVITDEYKVPSKKFKVLGNTDRHSIKKNLIGALLFDSGETAEATRLKRTARRRYTRRKNRICYLQEIFSNEMAKVDDSFFHRLEESFLVEEDKKHERHPIFGNIVDEVAYHEKYPTIYHLRKKLVDSTDKADLRLIYLALAHMIKFRGHFLIEGDLNPDNSDVDKLFIQLVQTYNQLFEENPINASGVDAKAILSARLSKSRRLENLIAQLPGEKKNGLFGNLIALSLGLTPNFKSNFDLAEDAKLQLSKDTYDDDLDNLLAQIGDQYADLFLAAKNLSDAILLSDILRVNTEITKAPLSASMIKRYDEHHQDLTLLKALVRQQLPEKYKEIFFDQSKNGYAGYIDGGASQEEFYKFIKPILEKMDGTEELLVKLNREDLLRKQRTFDNGSIPHQIHLGELHAILRRQEDFYPFLKDNREKIEKILTFRIPYYVGPLARGNSRFAWMTRKSEETITPWNFEEVVDKGASAQSFIERMTNFDKNLPNEKVLPKHSLLYEYFTVYNELTKVKYVTEGMRKPAFLSGEQKKAIVDLLFKTNRKVTVKQLKEDYFKKIECFDSVEISGVEDRFNASLGTYHDLLKIIKDKDFLDNEENEDILEDIVLTLTLFEDREMIEERLKTYAHLFDDKVMKQLKRRRYTGWGRLSRKLINGIRDKQSGKTILDFLKSDGFANRNFMQLIHDDSLTFKEDIQKAQVSGQGDSLHEHIANLAGSPAIKKGILQTVKVVDELVKVMGRHKPENIVIEMARENQTTQKGQKNSRERMKRIEEGIKELGSQILKEHPVENTQLQNEKLYLYYLQNGRDMYVDQELDINRLSDYDVDHIVPQSFLKDDSIDNKVLTRSDKARGKSDNVPSEEVVKKMKNYWRQLLNAKLITQRKFDNLTKAERGGLSELDKAGFIKRQLVETRQITKHVAQILDSRMNTKYDENDKLIREVKVITLKSKLVSDFRKDFQFYKVREINNYHHAHDAYLNAVVGTALIKKYPKLESEFVYGDYKVYDVRKMIAKSEQEIGKATAKYFFYSNIMNFFKTEITLANGEIRKRPLIETNGETGEIVWDKGRDFATVRKVLSMPQVNIVKKTEVQTGGFSKESILPKRNSDKLIARKKDWDPKKYGGFDSPTVAYSVLVVAKVEKGKSKKLKSVKELLGITIMERSSFEKNPIDFLEAKGYKEVKKDLIIKLPKYSLFELENGRKRMLASAGELQKGNELALPSKYVNFLYLASHYEKLKGSPEDNEQKQLFVEQHKHYLDEIIEQISEFSKRVILADANLDKVLSAYNKHRDKPIREQAENIIHLFTLTNLGAPAAFKYFDTTIDRKRYTSTKEVLDATLIHQSITGLYETRIDLSQLGGDGGGGSGGSGGSGGSGGSGGSGGTLNIEDEYRLHETSKEPDVPLGSTWLSDFPQAWAETGGMGLAVRQAPLIIPLKATSTPVSIKQYPMSQEARLGIKPHIQRLLDQGILVPCQSPWNTPLLPVKKPGTNDYRPVQDLREVNKRVEDIHPTVPNPYNLLSGLPPSHQWYTVLDLKDAFFCLRLHPTSQPLFAFEWRDPEMGISGQLTWTRLPQGFKNSPTLFNEALHRDLADFRIQHPDLILLQYVDDLLLAATSEQDCQRGTRALLQTLGNLGYRASAKKAQICQKQVKYLGYLLKEGQRWLTEARKETVMGQPTPKTPRQLREFLGTAGFCRLWIPGFAEMAAPLYPLTKPGTLFNWGPDQQKAYQEIKQALLTAPALGLPDLTKPFELFVDEKQGYAKGVLTQKLGPWRRPVAYLSKKLDPVAAGWPPCLRMVAAIAVLTKDAGKLTMGQPLVILAPHAVEALVKQPPDRWLSNARMTHYQAMLLDTDRVQFGPVVALNPATLLPLPEKEAPHDCLEILAETHGTRPDLTDQPIPDADYTWYTDGSSFLQEGQRRAGAAVTTETEVIWARALPAGTSAQRAELIALTQALKMAEGKKLNVYTDSRYAFATAHVHGEIYRRRGWLTSEGREIKNKNEILALLKALFLPKRLSIIHCPGHQKGNSAEARGNRMADQAAREAAMKAVLETSTLLAGKRTADGSEFEKRTADGSEFESPKKKAKVE

SEQ ID NO: 959 - skipped

SEQ ID NO: 960 - protein, 2096 aa, synthetic construct
MPAAKRVKLDGGDKKYSIGLDIGTNSVGWAVITDEYKVPSKKFKVLGNTDRHSIKKNLIGALLFDSGETAEATRLKRTARRRYTRRKNRICYLQEIFSNEMAKVDDSFFHRLEESFLVEEDKKHERHPIFGNIVDEVAYHEKYPTIYHLRKKLVDSTDKADLRLIYLALAHMIKFRGHFLIEGDLNPDNSDVDKLFIQLVQTYNQLFEENPINASGVDAKAILSARLSKSRRLENLIAQLPGEKKNGLFGNLIALSLGLTPNFKSNFDLAEDAKLQLSKDTYDDDLDNLLAQIGDQYADLFLAAKNLSDAILLSDILRVNTEITKAPLSASMIKRYDEHHQDLTLLKALVRQQLPEKYKEIFFDQSKNGYAGYIDGGASQEEFYKFIKPILEKMDGTEELLVKLNREDLLRKQRTFDNGSIPHQIHLGELHAILRRQEDFYPFLKDNREKIEKILTFRIPYYVGPLARGNSRFAWMTRKSEETITPWNFEEVVDKGASAQSFIERMTNFDKNLPNEKVLPKHSLLYEYFTVYNELTKVKYVTEGMRKPAFLSGEQKKAIVDLLFKTNRKVTVKQLKEDYFKKIECFDSVEISGVEDRFNASLGTYHDLLKIIKDKDFLDNEENEDILEDIVLTLTLFEDREMIEERLKTYAHLFDDKVMKQLKRRRYTGWGRLSRKLINGIRDKQSGKTILDFLKSDGFANRNFMQLIHDDSLTFKEDIQKAQVSGQGDSLHEHIANLAGSPAIKKGILQTVKVVDELVKVMGRHKPENIVIEMARENQTTQKGQKNSRERMKRIEEGIKELGSQILKEHPVENTQLQNEKLYLYYLQNGRDMYVDQELDINRLSDYDVDHIVPQSFLKDDSIDNKVLTRSDKARGKSDNVPSEEVVKKMKNYWRQLLNAKLITQRKFDNLTKAERGGLSELDKAGFIKRQLVETRQITKHVAQILDSRMNTKYDENDKLIREVKVITLKSKLVSDFRKDFQFYKVREINNYHHAHDAYLNAVVGTALIKKYPKLESEFVYGDYKVYDVRKMIAKSEQEIGKATAKYFFYSNIMNFFKTEITLANGEIRKRPLIETNGETGEIVWDKGRDFATVRKVLSMPQVNIVKKTEVQTGGFSKESILPKRNSDKLIARKKDWDPKKYGGFDSPTVAYSVLVVAKVEKGKSKKLKSVKELLGITIMERSSFEKNPIDFLEAKGYKEVKKDLIIKLPKYSLFELENGRKRMLASAGELQKGNELALPSKYVNFLYLASHYEKLKGSPEDNEQKQLFVEQHKHYLDEIIEQISEFSKRVILADANLDKVLSAYNKHRDKPIREQAENIIHLFTLTNLGAPAAFKYFDTTIDRKRYTSTKEVLDATLIHQSITGLYETRIDLSQLGGDGGEAAAKGSSPAPGGTLNIEDEYRLHETSKEPDVPLGSTWLSDFPQAWAETGGMGLAVRQAPLIIPLKATSTPVSIKQYPMSQEARLGIKPHIQRLLDQGILVPCQSPWNTPLLPVKKPGTNDYRPVQDLREVNKRVEDIHPTVPNPYNLLSGLPPSHQWYTVLDLKDAFFCLRLHPTSQPLFAFEWRDPEMGISGQLTWTRLPQGFKNSPTLFNEALHRDLADFRIQHPDLILLQYVDDLLLAATSEQDCQRGTRALLQTLGNLGYRASAKKAQICQKQVKYLGYLLKEGQRWLTEARKETVMGQPTPKTPRQLREFLGTAGFCRLWIPGFAEMAAPLYPLTKPGTLFNWGPDQQKAYQEIKQALLTAPALGLPDLTKPFELFVDEKQGYAKGVLTQKLGPWRRPVAYLSKKLDPVAAGWPPCLRMVAAIAVLTKDAGKLTMGQPLVILAPHAVEALVKQPPDRWLSNARMTHYQAMLLDTDRVQFGPVVALNPATLLPLPEKEAPHDCLEILAETHGTRPDLTDQPIPDADYTWYTDGSSFLQEGQRRAGAAVTTETEVIWARALPAGTSAQRAELIALTQALKMAEGKKLNVYTDSRYAFATAHVHGEIYRRRGWLTSEGREIKNKNEILALLKALFLPKRLSIIHCPGHQKGNSAEARGNRMADQAAREAAMKAVLETSTLLAGKRTADGSEFEKRTADGSEFESPKKKAKVE

SEQ ID NO: 961 - protein, 2096 aa, synthetic construct
MPAAKRVKLDGGDKKYSIGLDIGTNSVGWAVITDEYKVPSKKFKVLGNTDRHSIKKNLIGALLFDSGETAEATRLKRTARRRYTRRKNRICYLQEIFSNEMAKVDDSFFHRLEESFLVEEDKKHERHPIFGNIVDEVAYHEKYPTIYHLRKKLVDSTDKADLRLIYLALAHMIKFRGHFLIEGDLNPDNSDVDKLFIQLVQTYNQLFEENPINASGVDAKAILSARLSKSRRLENLIAQLPGEKKNGLFGNLIALSLGLTPNFKSNFDLAEDAKLQLSKDTYDDDLDNLLAQIGDQYADLFLAAKNLSDAILLSDILRVNTEITKAPLSASMIKRYDEHHQDLTLLKALVRQQLPEKYKEIFFDQSKNGYAGYIDGGASQEEFYKFIKPILEKMDGTEELLVKLNREDLLRKQRTFDNGSIPHQIHLGELHAILRRQEDFYPFLKDNREKIEKILTFRIPYYVGPLARGNSRFAWMTRKSEETITPWNFEEVVDKGASAQSFIERMTNFDKNLPNEKVLPKHSLLYEYFTVYNELTKVKYVTEGMRKPAFLSGEQKKAIVDLLFKTNRKVTVKQLKEDYFKKIECFDSVEISGVEDRFNASLGTYHDLLKIIKDKDFLDNEENEDILEDIVLTLTLFEDREMIEERLKTYAHLFDDKVMKQLKRRRYTGWGRLSRKLINGIRDKQSGKTILDFLKSDGFANRNFMQLIHDDSLTFKEDIQKAQVSGQGDSLHEHIANLAGSPAIKKGILQTVKVVDELVKVMGRHKPENIVIEMARENQTTQKGQKNSRERMKRIEEGIKELGSQILKEHPVENTQLQNEKLYLYYLQNGRDMYVDQELDINRLSDYDVDHIVPQSFLKDDSIDNKVLTRSDKARGKSDNVPSEEVVKKMKNYWRQLLNAKLITQRKFDNLTKAERGGLSELDKAGFIKRQLVETRQITKHVAQILDSRMNTKYDENDKLIREVKVITLKSKLVSDFRKDFQFYKVREINNYHHAHDAYLNAVVGTALIKKYPKLESEFVYGDYKVYDVRKMIAKSEQEIGKATAKYFFYSNIMNFFKTEITLANGEIRKRPLIETNGETGEIVWDKGRDFATVRKVLSMPQVNIVKKTEVQTGGFSKESILPKRNSDKLIARKKDWDPKKYGGFDSPTVAYSVLVVAKVEKGKSKKLKSVKELLGITIMERSSFEKNPIDFLEAKGYKEVKKDLIIKLPKYSLFELENGRKRMLASAGELQKGNELALPSKYVNFLYLASHYEKLKGSPEDNEQKQLFVEQHKHYLDEIIEQISEFSKRVILADANLDKVLSAYNKHRDKPIREQAENIIHLFTLTNLGAPAAFKYFDTTIDRKRYTSTKEVLDATLIHQSITGLYETRIDLSQLGGDGGEAAAKPAPGGSGGTLNIEDEYRLHETSKEPDVPLGSTWLSDFPQAWAETGGMGLAVRQAPLIIPLKATSTPVSIKQYPMSQEARLGIKPHIQRLLDQGILVPCQSPWNTPLLPVKKPGTNDYRPVQDLREVNKRVEDIHPTVPNPYNLLSGLPPSHQWYTVLDLKDAFFCLRLHPTSQPLFAFEWRDPEMGISGQLTWTRLPQGFKNSPTLFNEALHRDLADFRIQHPDLILLQYVDDLLLAATSEQDCQRGTRALLQTLGNLGYRASAKKAQICQKQVKYLGYLLKEGQRWLTEARKETVMGQPTPKTPRQLREFLGTAGFCRLWIPGFAEMAAPLYPLTKPGTLFNWGPDQQKAYQEIKQALLTAPALGLPDLTKPFELFVDEKQGYAKGVLTQKLGPWRRPVAYLSKKLDPVAAGWPPCLRMVAAIAVLTKDAGKLTMGQPLVILAPHAVEALVKQPPDRWLSNARMTHYQAMLLDTDRVQFGPVVALNPATLLPLPEKEAPHDCLEILAETHGTRPDLTDQPIPDADYTWYTDGSSFLQEGQRRAGAAVTTETEVIWARALPAGTSAQRAELIALTQALKMAEGKKLNVYTDSRYAFATAHVHGEIYRRRGWLTSEGREIKNKNEILALLKALFLPKRLSIIHCPGHQKGNSAEARGNRMADQAAREAAMKAVLETSTLLAGKRTADGSEFEKRTADGSEFESPKKKAKVE

SEQ ID NO: 962 - skipped

SEQ ID NO: 963 - protein, 2096 aa, synthetic construct
MPAAKRVKLDGGDKKYSIGLDIGTNSVGWAVITDEYKVPSKKFKVLGNTDRHSIKKNLIGALLFDSGETAEATRLKRTARRRYTRRKNRICYLQEIFSNEMAKVDDSFFHRLEESFLVEEDKKHERHPIFGNIVDEVAYHEKYPTIYHLRKKLVDSTDKADLRLIYLALAHMIKFRGHFLIEGDLNPDNSDVDKLFIQLVQTYNQLFEENPINASGVDAKAILSARLSKSRRLENLIAQLPGEKKNGLFGNLIALSLGLTPNFKSNFDLAEDAKLQLSKDTYDDDLDNLLAQIGDQYADLFLAAKNLSDAILLSDILRVNTEITKAPLSASMIKRYDEHHQDLTLLKALVRQQLPEKYKEIFFDQSKNGYAGYIDGGASQEEFYKFIKPILEKMDGTEELLVKLNREDLLRKQRTFDNGSIPHQIHLGELHAILRRQEDFYPFLKDNREKIEKILTFRIPYYVGPLARGNSRFAWMTRKSEETITPWNFEEVVDKGASAQSFIERMTNFDKNLPNEKVLPKHSLLYEYFTVYNELTKVKYVTEGMRKPAFLSGEQKKAIVDLLFKTNRKVTVKQLKEDYFKKIECFDSVEISGVEDRFNASLGTYHDLLKIIKDKDFLDNEENEDILEDIVLTLTLFEDREMIEERLKTYAHLFDDKVMKQLKRRRYTGWGRLSRKLINGIRDKQSGKTILDFLKSDGFANRNFMQLIHDDSLTFKEDIQKAQVSGQGDSLHEHIANLAGSPAIKKGILQTVKVVDELVKVMGRHKPENIVIEMARENQTTQKGQKNSRERMKRIEEGIKELGSQILKEHPVENTQLQNEKLYLYYLQNGRDMYVDQELDINRLSDYDVDHIVPQSFLKDDSIDNKVLTRSDKARGKSDNVPSEEVVKKMKNYWRQLLNAKLITQRKFDNLTKAERGGLSELDKAGFIKRQLVETRQITKHVAQILDSRMNTKYDENDKLIREVKVITLKSKLVSDFRKDFQFYKVREINNYHHAHDAYLNAVVGTALIKKYPKLESEFVYGDYKVYDVRKMIAKSEQEIGKATAKYFFYSNIMNFFKTEITLANGEIRKRPLIETNGETGEIVWDKGRDFATVRKVLSMPQVNIVKKTEVQTGGFSKESILPKRNSDKLIARKKDWDPKKYGGFDSPTVAYSVLVVAKVEKGKSKKLKSVKELLGITIMERSSFEKNPIDFLEAKGYKEVKKDLIIKLPKYSLFELENGRKRMLASAGELQKGNELALPSKYVNFLYLASHYEKLKGSPEDNEQKQLFVEQHKHYLDEIIEQISEFSKRVILADANLDKVLSAYNKHRDKPIREQAENIIHLFTLTNLGAPAAFKYFDTTIDRKRYTSTKEVLDATLIHQSITGLYETRIDLSQLGGDGGEAAAKGGGPAPGGTLNIEDEYRLHETSKEPDVPLGSTWLSDFPQAWAETGGMGLAVRQAPLIIPLKATSTPVSIKQYPMSQEARLGIKPHIQRLLDQGILVPCQSPWNTPLLPVKKPGTNDYRPVQDLREVNKRVEDIHPTVPNPYNLLSGLPPSHQWYTVLDLKDAFFCLRLHPTSQPLFAFEWRDPEMGISGQLTWTRLPQGFKNSPTLFNEALHRDLADFRIQHPDLILLQYVDDLLLAATSEQDCQRGTRALLQTLGNLGYRASAKKAQICQKQVKYLGYLLKEGQRWLTEARKETVMGQPTPKTPRQLREFLGTAGFCRLWIPGFAEMAAPLYPLTKPGTLFNWGPDQQKAYQEIKQALLTAPALGLPDLTKPFELFVDEKQGYAKGVLTQKLGPWRRPVAYLSKKLDPVAAGWPPCLRMVAAIAVLTKDAGKLTMGQPLVILAPHAVEALVKQPPDRWLSNARMTHYQAMLLDTDRVQFGPVVALNPATLLPLPEKEAPHDCLEILAETHGTRPDLTDQPIPDADYTWYTDGSSFLQEGQRRAGAAVTTETEVIWARALPAGTSAQRAELIALTQALKMAEGKKLNVYTDSRYAFATAHVHGEIYRRRGWLTSEGREIKNKNEILALLKALFLPKRLSIIHCPGHQKGNSAEARGNRMADQAAREAAMKAVLETSTLLAGKRTADGSEFEKRTADGSEFESPKKKAKVE

SEQ ID NO: 964 - protein, 2100 aa, synthetic construct
MPAAKRVKLDGGDKKYSIGLDIGTNSVGWAVITDEYKVPSKKFKVLGNTDRHSIKKNLIGALLFDSGETAEATRLKRTARRRYTRRKNRICYLQEIFSNEMAKVDDSFFHRLEESFLVEEDKKHERHPIFGNIVDEVAYHEKYPTIYHLRKKLVDSTDKADLRLIYLALAHMIKFRGHFLIEGDLNPDNSDVDKLFIQLVQTYNQLFEENPINASGVDAKAILSARLSKSRRLENLIAQLPGEKKNGLFGNLIALSLGLTPNFKSNFDLAEDAKLQLSKDTYDDDLDNLLAQIGDQYADLFLAAKNLSDAILLSDILRVNTEITKAPLSASMIKRYDEHHQDLTLLKALVRQQLPEKYKEIFFDQSKNGYAGYIDGGASQEEFYKFIKPILEKMDGTEELLVKLNREDLLRKQRTFDNGSIPHQIHLGELHAILRRQEDFYPFLKDNREKIEKILTFRIPYYVGPLARGNSRFAWMTRKSEETITPWNFEEVVDKGASAQSFIERMTNFDKNLPNEKVLPKHSLLYEYFTVYNELTKVKYVTEGMRKPAFLSGEQKKAIVDLLFKTNRKVTVKQLKEDYFKKIECFDSVEISGVEDRFNASLGTYHDLLKIIKDKDFLDNEENEDILEDIVLTLTLFEDREMIEERLKTYAHLFDDKVMKQLKRRRYTGWGRLSRKLINGIRDKQSGKTILDFLKSDGFANRNFMQLIHDDSLTFKEDIQKAQVSGQGDSLHEHIANLAGSPAIKKGILQTVKVVDELVKVMGRHKPENIVIEMARENQTTQKGQKNSRERMKRIEEGIKELGSQILKEHPVENTQLQNEKLYLYYLQNGRDMYVDQELDINRLSDYDVDHIVPQSFLKDDSIDNKVLTRSDKARGKSDNVPSEEVVKKMKNYWRQLLNAKLITQRKFDNLTKAERGGLSELDKAGFIKRQLVETRQITKHVAQILDSRMNTKYDENDKLIREVKVITLKSKLVSDFRKDFQFYKVREINNYHHAHDAYLNAVVGTALIKKYPKLESEFVYGDYKVYDVRKMIAKSEQEIGKATAKYFFYSNIMNFFKTEITLANGEIRKRPLIETNGETGEIVWDKGRDFATVRKVLSMPQVNIVKKTEVQTGGFSKESILPKRNSDKLIARKKDWDPKKYGGFDSPTVAYSVLVVAKVEKGKSKKLKSVKELLGITIMERSSFEKNPIDFLEAKGYKEVKKDLIIKLPKYSLFELENGRKRMLASAGELQKGNELALPSKYVNFLYLASHYEKLKGSPEDNEQKQLFVEQHKHYLDEIIEQISEFSKRVILADANLDKVLSAYNKHRDKPIREQAENIIHLFTLTNLGAPAAFKYFDTTIDRKRYTSTKEVLDATLIHQSITGLYETRIDLSQLGGDGGGSSGSSGSSGSSGSSGGTLNIEDEYRLHETSKEPDVPLGSTWLSDFPQAWAETGGMGLAVRQAPLIIPLKATSTPVSIKQYPMSQEARLGIKPHIQRLLDQGILVPCQSPWNTPLLPVKKPGTNDYRPVQDLREVNKRVEDIHPTVPNPYNLLSGLPPSHQWYTVLDLKDAFFCLRLHPTSQPLFAFEWRDPEMGISGQLTWTRLPQGFKNSPTLFNEALHRDLADFRIQHPDLILLQYVDDLLLAATSEQDCQRGTRALLQTLGNLGYRASAKKAQICQKQVKYLGYLLKEGQRWLTEARKETVMGQPTPKTPRQLREFLGTAGFCRLWIPGFAEMAAPLYPLTKPGTLFNWGPDQQKAYQEIKQALLTAPALGLPDLTKPFELFVDEKQGYAKGVLTQKLGPWRRPVAYLSKKLDPVAAGWPPCLRMVAAIAVLTKDAGKLTMGQPLVILAPHAVEALVKQPPDRWLSNARMTHYQAMLLDTDRVQFGPVVALNPATLLPLPEKEAPHDCLEILAETHGTRPDLTDQPIPDADYTWYTDGSSFLQEGQRRAGAAVTTETEVIWARALPAGTSAQRAELIALTQALKMAEGKKLNVYTDSRYAFATAHVHGEIYRRRGWLTSEGREIKNKNEILALLKALFLPKRLSIIHCPGHQKGNSAEARGNRMADQAAREAAMKAVLETSTLLAGKRTADGSEFEKRTADGSEFESPKKKAKVE

SEQ ID NO: 965 - skipped

SEQ ID NO: 966 - protein, 2093 aa, synthetic construct
MPAAKRVKLDGGDKKYSIGLDIGTNSVGWAVITDEYKVPSKKFKVLGNTDRHSIKKNLIGALLFDSGETAEATRLKRTARRRYTRRKNRICYLQEIFSNEMAKVDDSFFHRLEESFLVEEDKKHERHPIFGNIVDEVAYHEKYPTIYHLRKKLVDSTDKADLRLIYLALAHMIKFRGHFLIEGDLNPDNSDVDKLFIQLVQTYNQLFEENPINASGVDAKAILSARLSKSRRLENLIAQLPGEKKNGLFGNLIALSLGLTPNFKSNFDLAEDAKLQLSKDTYDDDLDNLLAQIGDQYADLFLAAKNLSDAILLSDILRVNTEITKAPLSASMIKRYDEHHQDLTLLKALVRQQLPEKYKEIFFDQSKNGYAGYIDGGASQEEFYKFIKPILEKMDGTEELLVKLNREDLLRKQRTFDNGSIPHQIHLGELHAILRRQEDFYPFLKDNREKIEKILTFRIPYYVGPLARGNSRFAWMTRKSEETITPWNFEEVVDKGASAQSFIERMTNFDKNLPNEKVLPKHSLLYEYFTVYNELTKVKYVTEGMRKPAFLSGEQKKAIVDLLFKTNRKVTVKQLKEDYFKKIECFDSVEISGVEDRFNASLGTYHDLLKIIKDKDFLDNEENEDILEDIVLTLTLFEDREMIEERLKTYAHLFDDKVMKQLKRRRYTGWGRLSRKLINGIRDKQSGKTILDFLKSDGFANRNFMQLIHDDSLTFKEDIQKAQVSGQGDSLHEHIANLAGSPAIKKGILQTVKVVDELVKVMGRHKPENIVIEMARENQTTQKGQKNSRERMKRIEEGIKELGSQILKEHPVENTQLQNEKLYLYYLQNGRDMYVDQELDINRLSDYDVDHIVPQSFLKDDSIDNKVLTRSDKARGKSDNVPSEEVVKKMKNYWRQLLNAKLITQRKFDNLTKAERGGLSELDKAGFIKRQLVETRQITKHVAQILDSRMNTKYDENDKLIREVKVITLKSKLVSDFRKDFQFYKVREINNYHHAHDAYLNAVVGTALIKKYPKLESEFVYGDYKVYDVRKMIAKSEQEIGKATAKYFFYSNIMNFFKTEITLANGEIRKRPLIETNGETGEIVWDKGRDFATVRKVLSMPQVNIVKKTEVQTGGFSKESILPKRNSDKLIARKKDWDPKKYGGFDSPTVAYSVLVVAKVEKGKSKKLKSVKELLGITIMERSSFEKNPIDFLEAKGYKEVKKDLIIKLPKYSLFELENGRKRMLASAGELQKGNELALPSKYVNFLYLASHYEKLKGSPEDNEQKQLFVEQHKHYLDEIIEQISEFSKRVILADANLDKVLSAYNKHRDKPIREQAENIIHLFTLTNLGAPAAFKYFDTTIDRKRYTSTKEVLDATLIHQSITGLYETRIDLSQLGGDGGGSSEAAAKGGTLNIEDEYRLHETSKEPDVPLGSTWLSDFPQAWAETGGMGLAVRQAPLIIPLKATSTPVSIKQYPMSQEARLGIKPHIQRLLDQGILVPCQSPWNTPLLPVKKPGTNDYRPVQDLREVNKRVEDIHPTVPNPYNLLSGLPPSHQWYTVLDLKDAFFCLRLHPTSQPLFAFEWRDPEMGISGQLTWTRLPQGFKNSPTLFNEALHRDLADFRIQHPDLILLQYVDDLLLAATSEQDCQRGTRALLQTLGNLGYRASAKKAQICQKQVKYLGYLLKEGQRWLTEARKETVMGQPTPKTPRQLREFLGTAGFCRLWIPGFAEMAAPLYPLTKPGTLFNWGPDQQKAYQEIKQALLTAPALGLPDLTKPFELFVDEKQGYAKGVLTQKLGPWRRPVAYLSKKLDPVAAGWPPCLRMVAAIAVLTKDAGKLTMGQPLVILAPHAVEALVKQPPDRWLSNARMTHYQAMLLDTDRVQFGPVVALNPATLLPLPEKEAPHDCLEILAETHGTRPDLTDQPIPDADYTWYTDGSSFLQEGQRRAGAAVTTETEVIWARALPAGTSAQRAELIALTQALKMAEGKKLNVYTDSRYAFATAHVHGEIYRRRGWLTSEGREIKNKNEILALLKALFLPKRLSIIHCPGHQKGNSAEARGNRMADQAAREAAMKAVLETSTLLAGKRTADGSEFEKRTADGSEFESPKKKAKVE

SEQ ID NO: 967 - protein, 2096 aa, synthetic construct
MPAAKRVKLDGGDKKYSIGLDIGTNSVGWAVITDEYKVPSKKFKVLGNTDRHSIKKNLIGALLFDSGETAEATRLKRTARRRYTRRKNRICYLQEIFSNEMAKVDDSFFHRLEESFLVEEDKKHERHPIFGNIVDEVAYHEKYPTIYHLRKKLVDSTDKADLRLIYLALAHMIKFRGHFLIEGDLNPDNSDVDKLFIQLVQTYNQLFEENPINASGVDAKAILSARLSKSRRLENLIAQLPGEKKNGLFGNLIALSLGLTPNFKSNFDLAEDAKLQLSKDTYDDDLDNLLAQIGDQYADLFLAAKNLSDAILLSDILRVNTEITKAPLSASMIKRYDEHHQDLTLLKALVRQQLPEKYKEIFFDQSKNGYAGYIDGGASQEEFYKFIKPILEKMDGTEELLVKLNREDLLRKQRTFDNGSIPHQIHLGELHAILRRQEDFYPFLKDNREKIEKILTFRIPYYVGPLARGNSRFAWMTRKSEETITPWNFEEVVDKGASAQSFIERMTNFDKNLPNEKVLPKHSLLYEYFTVYNELTKVKYVTEGMRKPAFLSGEQKKAIVDLLFKTNRKVTVKQLKEDYFKKIECFDSVEISGVEDRFNASLGTYHDLLKIIKDKDFLDNEENEDILEDIVLTLTLFEDREMIEERLKTYAHLFDDKVMKQLKRRRYTGWGRLSRKLINGIRDKQSGKTILDFLKSDGFANRNFMQLIHDDSLTFKEDIQKAQVSGQGDSLHEHIANLAGSPAIKKGILQTVKVVDELVKVMGRHKPENIVIEMARENQTTQKGQKNSRERMKRIEEGIKELGSQILKEHPVENTQLQNEKLYLYYLQNGRDMYVDQELDINRLSDYDVDHIVPQSFLKDDSIDNKVLTRSDKARGKSDNVPSEEVVKKMKNYWRQLLNAKLITQRKFDNLTKAERGGLSELDKAGFIKRQLVETRQITKHVAQILDSRMNTKYDENDKLIREVKVITLKSKLVSDFRKDFQFYKVREINNYHHAHDAYLNAVVGTALIKKYPKLESEFVYGDYKVYDVRKMIAKSEQEIGKATAKYFFYSNIMNFFKTEITLANGEIRKRPLIETNGETGEIVWDKGRDFATVRKVLSMPQVNIVKKTEVQTGGFSKESILPKRNSDKLIARKKDWDPKKYGGFDSPTVAYSVLVVAKVEKGKSKKLKSVKELLGITIMERSSFEKNPIDFLEAKGYKEVKKDLIIKLPKYSLFELENGRKRMLASAGELQKGNELALPSKYVNFLYLASHYEKLKGSPEDNEQKQLFVEQHKHYLDEIIEQISEFSKRVILADANLDKVLSAYNKHRDKPIREQAENIIHLFTLTNLGAPAAFKYFDTTIDRKRYTSTKEVLDATLIHQSITGLYETRIDLSQLGGDGGPAPGSSEAAAKGGTLNIEDEYRLHETSKEPDVPLGSTWLSDFPQAWAETGGMGLAVRQAPLIIPLKATSTPVSIKQYPMSQEARLGIKPHIQRLLDQGILVPCQSPWNTPLLPVKKPGTNDYRPVQDLREVNKRVEDIHPTVPNPYNLLSGLPPSHQWYTVLDLKDAFFCLRLHPTSQPLFAFEWRDPEMGISGQLTWTRLPQGFKNSPTLFNEALHRDLADFRIQHPDLILLQYVDDLLLAATSEQDCQRGTRALLQTLGNLGYRASAKKAQICQKQVKYLGYLLKEGQRWLTEARKETVMGQPTPKTPRQLREFLGTAGFCRLWIPGFAEMAAPLYPLTKPGTLFNWGPDQQKAYQEIKQALLTAPALGLPDLTKPFELFVDEKQGYAKGVLTQKLGPWRRPVAYLSKKLDPVAAGWPPCLRMVAAIAVLTKDAGKLTMGQPLVILAPHAVEALVKQPPDRWLSNARMTHYQAMLLDTDRVQFGPVVALNPATLLPLPEKEAPHDCLEILAETHGTRPDLTDQPIPDADYTWYTDGSSFLQEGQRRAGAAVTTETEVIWARALPAGTSAQRAELIALTQALKMAEGKKLNVYTDSRYAFATAHVHGEIYRRRGWLTSEGREIKNKNEILALLKALFLPKRLSIIHCPGHQKGNSAEARGNRMADQAAREAAMKAVLETSTLLAGKRTADGSEFEKRTADGSEFESPKKKAKVE

SEQ ID NO: 968-977 - skipped (10 entries)

SEQ ID NO: 978 - protein, 2094 aa, synthetic construct
MPAAKRVKLDGGDKKYSIGLDIGTNSVGWAVITDEYKVPSKKFKVLGNTDRHSIKKNLIGALLFDSGETAEATRLKRTARRRYTRRKNRICYLQEIFSNEMAKVDDSFFHRLEESFLVEEDKKHERHPIFGNIVDEVAYHEKYPTIYHLRKKLVDSTDKADLRLIYLALAHMIKFRGHFLIEGDLNPDNSDVDKLFIQLVQTYNQLFEENPINASGVDAKAILSARLSKSRRLENLIAQLPGEKKNGLFGNLIALSLGLTPNFKSNFDLAEDAKLQLSKDTYDDDLDNLLAQIGDQYADLFLAAKNLSDAILLSDILRVNTEITKAPLSASMIKRYDEHHQDLTLLKALVRQQLPEKYKEIFFDQSKNGYAGYIDGGASQEEFYKFIKPILEKMDGTEELLVKLNREDLLRKQRTFDNGSIPHQIHLGELHAILRRQEDFYPFLKDNREKIEKILTFRIPYYVGPLARGNSRFAWMTRKSEETITPWNFEEVVDKGASAQSFIERMTNFDKNLPNEKVLPKHSLLYEYFTVYNELTKVKYVTEGMRKPAFLSGEQKKAIVDLLFKTNRKVTVKQLKEDYFKKIECFDSVEISGVEDRFNASLGTYHDLLKIIKDKDFLDNEENEDILEDIVLTLTLFEDREMIEERLKTYAHLFDDKVMKQLKRRRYTGWGRLSRKLINGIRDKQSGKTILDFLKSDGFANRNFMQLIHDDSLTFKEDIQKAQVSGQGDSLHEHIANLAGSPAIKKGILQTVKVVDELVKVMGRHKPENIVIEMARENQTTQKGQKNSRERMKRIEEGIKELGSQILKEHPVENTQLQNEKLYLYYLQNGRDMYVDQELDINRLSDYDVDHIVPQSFLKDDSIDNKVLTRSDKARGKSDNVPSEEVVKKMKNYWRQLLNAKLITQRKFDNLTKAERGGLSELDKAGFIKRQLVETRQITKHVAQILDSRMNTKYDENDKLIREVKVITLKSKLVSDFRKDFQFYKVREINNYHHAHDAYLNAVVGTALIKKYPKLESEFVYGDYKVYDVRKMIAKSEQEIGKATAKYFFYSNIMNFFKTEITLANGEIRKRPLIETNGETGEIVWDKGRDFATVRKVLSMPQVNIVKKTEVQTGGFSKESILPKRNSDKLIARKKDWDPKKYGGFDSPTVAYSVLVVAKVEKGKSKKLKSVKELLGITIMERSSFEKNPIDFLEAKGYKEVKKDLIIKLPKYSLFELENGRKRMLASAGELQKGNELALPSKYVNFLYLASHYEKLKGSPEDNEQKQLFVEQHKHYLDEIIEQISEFSKRVILADANLDKVLSAYNKHRDKPIREQAENIIHLFTLTNLGAPAAFKYFDTTIDRKRYTSTKEVLDATLIHQSITGLYETRIDLSQLGGDGGPAPAPAPAPGGTLNIEDEYRLHETSKEPDVPLGSTWLSDFPQAWAETGGMGLAVRQAPLIIPLKATSTPVSIKQYPMSQEARLGIKPHIQRLLDQGILVPCQSPWNTPLLPVKKPGTNDYRPVQDLREVNKRVEDIHPTVPNPYNLLSGLPPSHQWYTVLDLKDAFFCLRLHPTSQPLFAFEWRDPEMGISGQLTWTRLPQGFKNSPTLFNEALHRDLADFRIQHPDLILLQYVDDLLLAATSEQDCQRGTRALLQTLGNLGYRASAKKAQICQKQVKYLGYLLKEGQRWLTEARKETVMGQPTPKTPRQLREFLGTAGFCRLWIPGFAEMAAPLYPLTKPGTLFNWGPDQQKAYQEIKQALLTAPALGLPDLTKPFELFVDEKQGYAKGVLTQKLGPWRRPVAYLSKKLDPVAAGWPPCLRMVAAIAVLTKDAGKLTMGQPLVILAPHAVEALVKQPPDRWLSNARMTHYQAMLLDTDRVQFGPVVALNPATLLPLPEKEAPHDCLEILAETHGTRPDLTDQPIPDADYTWYTDGSSFLQEGQRRAGAAVTTETEVIWARALPAGTSAQRAELIALTQALKMAEGKKLNVYTDSRYAFATAHVHGEIYRRRGWLTSEGREIKNKNEILALLKALFLPKRLSIIHCPGHQKGNSAEARGNRMADQAAREAAMKAVLETSTLLAGKRTADGSEFEKRTADGSEFESPKKKAKVE

SEQ ID NO: 979-986 - skipped (8 entries)

SEQ ID NO: 987 - protein, 2094 aa, synthetic construct
MPAAKRVKLDGGDKKYSIGLDIGTNSVGWAVITDEYKVPSKKFKVLGNTDRHSIKKNLIGALLFDSGETAEATRLKRTARRRYTRRKNRICYLQEIFSNEMAKVDDSFFHRLEESFLVEEDKKHERHPIFGNIVDEVAYHEKYPTIYHLRKKLVDSTDKADLRLIYLALAHMIKFRGHFLIEGDLNPDNSDVDKLFIQLVQTYNQLFEENPINASGVDAKAILSARLSKSRRLENLIAQLPGEKKNGLFGNLIALSLGLTPNFKSNFDLAEDAKLQLSKDTYDDDLDNLLAQIGDQYADLFLAAKNLSDAILLSDILRVNTEITKAPLSASMIKRYDEHHQDLTLLKALVRQQLPEKYKEIFFDQSKNGYAGYIDGGASQEEFYKFIKPILEKMDGTEELLVKLNREDLLRKQRTFDNGSIPHQIHLGELHAILRRQEDFYPFLKDNREKIEKILTFRIPYYVGPLARGNSRFAWMTRKSEETITPWNFEEVVDKGASAQSFIERMTNFDKNLPNEKVLPKHSLLYEYFTVYNELTKVKYVTEGMRKPAFLSGEQKKAIVDLLFKTNRKVTVKQLKEDYFKKIECFDSVEISGVEDRFNASLGTYHDLLKIIKDKDFLDNEENEDILEDIVLTLTLFEDREMIEERLKTYAHLFDDKVMKQLKRRRYTGWGRLSRKLINGIRDKQSGKTILDFLKSDGFANRNFMQLIHDDSLTFKEDIQKAQVSGQGDSLHEHIANLAGSPAIKKGILQTVKVVDELVKVMGRHKPENIVIEMARENQTTQKGQKNSRERMKRIEEGIKELGSQILKEHPVENTQLQNEKLYLYYLQNGRDMYVDQELDINRLSDYDVDHIVPQSFLKDDSIDNKVLTRSDKARGKSDNVPSEEVVKKMKNYWRQLLNAKLITQRKFDNLTKAERGGLSELDKAGFIKRQLVETRQITKHVAQILDSRMNTKYDENDKLIREVKVITLKSKLVSDFRKDFQFYKVREINNYHHAHDAYLNAVVGTALIKKYPKLESEFVYGDYKVYDVRKMIAKSEQEIGKATAKYFFYSNIMNFFKTEITLANGEIRKRPLIETNGETGEIVWDKGRDFATVRKVLSMPQVNIVKKTEVQTGGFSKESILPKRNSDKLIARKKDWDPKKYGGFDSPTVAYSVLVVAKVEKGKSKKLKSVKELLGITIMERSSFEKNPIDFLEAKGYKEVKKDLIIKLPKYSLFELENGRKRMLASAGELQKGNELALPSKYVNFLYLASHYEKLKGSPEDNEQKQLFVEQHKHYLDEIIEQISEFSKRVILADANLDKVLSAYNKHRDKPIREQAENIIHLFTLTNLGAPAAFKYFDTTIDRKRYTSTKEVLDATLIHQSITGLYETRIDLSQLGGDGGGSSPAPGGSGGTLNIEDEYRLHETSKEPDVPLGSTWLSDFPQAWAETGGMGLAVRQAPLIIPLKATSTPVSIKQYPMSQEARLGIKPHIQRLLDQGILVPCQSPWNTPLLPVKKPGTNDYRPVQDLREVNKRVEDIHPTVPNPYNLLSGLPPSHQWYTVLDLKDAFFCLRLHPTSQPLFAFEWRDPEMGISGQLTWTRLPQGFKNSPTLFNEALHRDLADFRIQHPDLILLQYVDDLLLAATSEQDCQRGTRALLQTLGNLGYRASAKKAQICQKQVKYLGYLLKEGQRWLTEARKETVMGQPTPKTPRQLREFLGTAGFCRLWIPGFAEMAAPLYPLTKPGTLFNWGPDQQKAYQEIKQALLTAPALGLPDLTKPFELFVDEKQGYAKGVLTQKLGPWRRPVAYLSKKLDPVAAGWPPCLRMVAAIAVLTKDAGKLTMGQPLVILAPHAVEALVKQPPDRWLSNARMTHYQAMLLDTDRVQFGPVVALNPATLLPLPEKEAPHDCLEILAETHGTRPDLTDQPIPDADYTWYTDGSSFLQEGQRRAGAAVTTETEVIWARALPAGTSAQRAELIALTQALKMAEGKKLNVYTDSRYAFATAHVHGEIYRRRGWLTSEGREIKNKNEILALLKALFLPKRLSIIHCPGHQKGNSAEARGNRMADQAAREAAMKAVLETSTLLAGKRTADGSEFEKRTADGSEFESPKKKAKVE

SEQ ID NO: 988-1005 - skipped (18 entries)

SEQ ID NO: 1006 - protein, 2131 aa, synthetic construct
MPAAKRVKLDGGDKKYSIGLDIGTNSVGWAVITDEYKVPSKKFKVLGNTDRHSIKKNLIGALLFDSGETAEATRLKRTARRRYTRRKNRICYLQEIFSNEMAKVDDSFFHRLEESFLVEEDKKHERHPIFGNIVDEVAYHEKYPTIYHLRKKLVDSTDKADLRLIYLALAHMIKFRGHFLIEGDLNPDNSDVDKLFIQLVQTYNQLFEENPINASGVDAKAILSARLSKSRRLENLIAQLPGEKKNGLFGNLIALSLGLTPNFKSNFDLAEDAKLQLSKDTYDDDLDNLLAQIGDQYADLFLAAKNLSDAILLSDILRVNTEITKAPLSASMIKRYDEHHQDLTLLKALVRQQLPEKYKEIFFDQSKNGYAGYIDGGASQEEFYKFIKPILEKMDGTEELLVKLNREDLLRKQRTFDNGSIPHQIHLGELHAILRRQEDFYPFLKDNREKIEKILTFRIPYYVGPLARGNSRFAWMTRKSEETITPWNFEEVVDKGASAQSFIERMTNFDKNLPNEKVLPKHSLLYEYFTVYNELTKVKYVTEGMRKPAFLSGEQKKAIVDLLFKTNRKVTVKQLKEDYFKKIECFDSVEISGVEDRFNASLGTYHDLLKIIKDKDFLDNEENEDILEDIVLTLTLFEDREMIEERLKTYAHLFDDKVMKQLKRRRYTGWGRLSRKLINGIRDKQSGKTILDFLKSDGFANRNFMQLIHDDSLTFKEDIQKAQVSGQGDSLHEHIANLAGSPAIKKGILQTVKVVDELVKVMGRHKPENIVIEMARENQTTQKGQKNSRERMKRIEEGIKELGSQILKEHPVENTQLQNEKLYLYYLQNGRDMYVDQELDINRLSDYDVDHIVPQSFLKDDSIDNKVLTRSDKARGKSDNVPSEEVVKKMKNYWRQLLNAKLITQRKFDNLTKAERGGLSELDKAGFIKRQLVETRQITKHVAQILDSRMNTKYDENDKLIREVKVITLKSKLVSDFRKDFQFYKVREINNYHHAHDAYLNAVVGTALIKKYPKLESEFVYGDYKVYDVRKMIAKSEQEIGKATAKYFFYSNIMNFFKTEITLANGEIRKRPLIETNGETGEIVWDKGRDFATVRKVLSMPQVNIVKKTEVQTGGFSKESILPKRNSDKLIARKKDWDPKKYGGFDSPTVAYSVLVVAKVEKGKSKKLKSVKELLGITIMERSSFEKNPIDFLEAKGYKEVKKDLIIKLPKYSLFELENGRKRMLASAGELQKGNELALPSKYVNFLYLASHYEKLKGSPEDNEQKQLFVEQHKHYLDEIIEQISEFSKRVILADANLDKVLSAYNKHRDKPIREQAENIIHLFTLTNLGAPAAFKYFDTTIDRKRYTSTKEVLDATLIHQSITGLYETRIDLSQLGGDGGAEAAAKEAAAKEAAAKEAAAKALEAEAAAKEAAAKEAAAKEAAAKAGGTLNIEDEYRLHETSKEPDVPLGSTWLSDFPQAWAETGGMGLAVRQAPLIIPLKATSTPVSIKQYPMSQEARLGIKPHIQRLLDQGILVPCQSPWNTPLLPVKKPGTNDYRPVQDLREVNKRVEDIHPTVPNPYNLLSGLPPSHQWYTVLDLKDAFFCLRLHPTSQPLFAFEWRDPEMGISGQLTWTRLPQGFKNSPTLFNEALHRDLADFRIQHPDLILLQYVDDLLLAATSEQDCQRGTRALLQTLGNLGYRASAKKAQICQKQVKYLGYLLKEGQRWLTEARKETVMGQPTPKTPRQLREFLGKAGFCRLFIPGFAEMAAPLYPLTKPGTLFNWGPDQQKAYQEIKQALLTAPALGLPDLTKPFELFVDEKQGYAKGVLTQKLGPWRRPVAYLSKKLDPVAAGWPPCLRMVAAIAVLTKDAGKLTMGQPLVILAPHAVEALVKQPPDRWLSNARMTHYQAMLLDTDRVQFGPVVALNPATLLPLPEKEAPHDCLEILAETHGTRPDLTDQPIPDADYTWYTDGSSFLQEGQRRAGAAVTTETEVIWARALPAGTSAQRAELIALTQALKMAEGKKLNVYTDSRYAFATAHVHGEIYRRRGWLTSEGREIKNKNEILALLKALFLPKRLSIIHCPGHQKGNSAEARGNRMADQAAREAAMKAVLETSTLLAGKRTADGSEFEKRTADGSEFESPKKKAKVE

SEQ ID NO: 1007 - protein, 2096 aa, synthetic construct
MPAAKRVKLDGGDKKYSIGLDIGTNSVGWAVITDEYKVPSKKFKVLGNTDRHSIKKNLIGALLFDSGETAEATRLKRTARRRYTRRKNRICYLQEIFSNEMAKVDDSFFHRLEESFLVEEDKKHERHPIFGNIVDEVAYHEKYPTIYHLRKKLVDSTDKADLRLIYLALAHMIKFRGHFLIEGDLNPDNSDVDKLFIQLVQTYNQLFEENPINASGVDAKAILSARLSKSRRLENLIAQLPGEKKNGLFGNLIALSLGLTPNFKSNFDLAEDAKLQLSKDTYDDDLDNLLAQIGDQYADLFLAAKNLSDAILLSDILRVNTEITKAPLSASMIKRYDEHHQDLTLLKALVRQQLPEKYKEIFFDQSKNGYAGYIDGGASQEEFYKFIKPILEKMDGTEELLVKLNREDLLRKQRTFDNGSIPHQIHLGELHAILRRQEDFYPFLKDNREKIEKILTFRIPYYVGPLARGNSRFAWMTRKSEETITPWNFEEVVDKGASAQSFIERMTNFDKNLPNEKVLPKHSLLYEYFTVYNELTKVKYVTEGMRKPAFLSGEQKKAIVDLLFKTNRKVTVKQLKEDYFKKIECFDSVEISGVEDRFNASLGTYHDLLKIIKDKDFLDNEENEDILEDIVLTLTLFEDREMIEERLKTYAHLFDDKVMKQLKRRRYTGWGRLSRKLINGIRDKQSGKTILDFLKSDGFANRNFMQLIHDDSLTFKEDIQKAQVSGQGDSLHEHIANLAGSPAIKKGILQTVKVVDELVKVMGRHKPENIVIEMARENQTTQKGQKNSRERMKRIEEGIKELGSQILKEHPVENTQLQNEKLYLYYLQNGRDMYVDQELDINRLSDYDVDHIVPQSFLKDDSIDNKVLTRSDKARGKSDNVPSEEVVKKMKNYWRQLLNAKLITQRKFDNLTKAERGGLSELDKAGFIKRQLVETRQITKHVAQILDSRMNTKYDENDKLIREVKVITLKSKLVSDFRKDFQFYKVREINNYHHAHDAYLNAVVGTALIKKYPKLESEFVYGDYKVYDVRKMIAKSEQEIGKATAKYFFYSNIMNFFKTEITLANGEIRKRPLIETNGETGEIVWDKGRDFATVRKVLSMPQVNIVKKTEVQTGGFSKESILPKRNSDKLIARKKDWDPKKYGGFDSPTVAYSVLVVAKVEKGKSKKLKSVKELLGITIMERSSFEKNPIDFLEAKGYKEVKKDLIIKLPKYSLFELENGRKRMLASAGELQKGNELALPSKYVNFLYLASHYEKLKGSPEDNEQKQLFVEQHKHYLDEIIEQISEFSKRVILADANLDKVLSAYNKHRDKPIREQAENIIHLFTLTNLGAPAAFKYFDTTIDRKRYTSTKEVLDATLIHQSITGLYETRIDLSQLGGDGGPAPEAAAKGSSGGTLNIEDEYRLHETSKEPDVPLGSTWLSDFPQAWAETGGMGLAVRQAPLIIPLKATSTPVSIKQYPMSQEARLGIKPHIQRLLDQGILVPCQSPWNTPLLPVKKPGTNDYRPVQDLREVNKRVEDIHPTVPNPYNLLSGLPPSHQWYTVLDLKDAFFCLRLHPTSQPLFAFEWRDPEMGISGQLTWTRLPQGFKNSPTLFNEALHRDLADFRIQHPDLILLQYVDDLLLAATSEQDCQRGTRALLQTLGNLGYRASAKKAQICQKQVKYLGYLLKEGQRWLTEARKETVMGQPTPKTPRQLREFLGKAGFCRLFIPGFAEMAAPLYPLTKPGTLFNWGPDQQKAYQEIKQALLTAPALGLPDLTKPFELFVDEKQGYAKGVLTQKLGPWRRPVAYLSKKLDPVAAGWPPCLRMVAAIAVLTKDAGKLTMGQPLVILAPHAVEALVKQPPDRWLSNARMTHYQAMLLDTDRVQFGPVVALNPATLLPLPEKEAPHDCLEILAETHGTRPDLTDQPIPDADYTWYTDGSSFLQEGQRRAGAAVTTETEVIWARALPAGTSAQRAELIALTQALKMAEGKKLNVYTDSRYAFATAHVHGEIYRRRGWLTSEGREIKNKNEILALLKALFLPKRLSIIHCPGHQKGNSAEARGNRMADQAAREAAMKAVLETSTLLAGKRTADGSEFEKRTADGSEFESPKKKAKVE

SEQ ID NO: 1008 - protein, 2105 aa, synthetic construct
MPAAKRVKLDGGDKKYSIGLDIGTNSVGWAVITDEYKVPSKKFKVLGNTDRHSIKKNLIGALLFDSGETAEATRLKRTARRRYTRRKNRICYLQEIFSNEMAKVDDSFFHRLEESFLVEEDKKHERHPIFGNIVDEVAYHEKYPTIYHLRKKLVDSTDKADLRLIYLALAHMIKFRGHFLIEGDLNPDNSDVDKLFIQLVQTYNQLFEENPINASGVDAKAILSARLSKSRRLENLIAQLPGEKKNGLFGNLIALSLGLTPNFKSNFDLAEDAKLQLSKDTYDDDLDNLLAQIGDQYADLFLAAKNLSDAILLSDILRVNTEITKAPLSASMIKRYDEHHQDLTLLKALVRQQLPEKYKEIFFDQSKNGYAGYIDGGASQEEFYKFIKPILEKMDGTEELLVKLNREDLLRKQRTFDNGSIPHQIHLGELHAILRRQEDFYPFLKDNREKIEKILTFRIPYYVGPLARGNSRFAWMTRKSEETITPWNFEEVVDKGASAQSFIERMTNFDKNLPNEKVLPKHSLLYEYFTVYNELTKVKYVTEGMRKPAFLSGEQKKAIVDLLFKTNRKVTVKQLKEDYFKKIECFDSVEISGVEDRFNASLGTYHDLLKIIKDKDFLDNEENEDILEDIVLTLTLFEDREMIEERLKTYAHLFDDKVMKQLKRRRYTGWGRLSRKLINGIRDKQSGKTILDFLKSDGFANRNFMQLIHDDSLTFKEDIQKAQVSGQGDSLHEHIANLAGSPAIKKGILQTVKVVDELVKVMGRHKPENIVIEMARENQTTQKGQKNSRERMKRIEEGIKELGSQILKEHPVENTQLQNEKLYLYYLQNGRDMYVDQELDINRLSDYDVDHIVPQSFLKDDSIDNKVLTRSDKARGKSDNVPSEEVVKKMKNYWRQLLNAKLITQRKFDNLTKAERGGLSELDKAGFIKRQLVETRQITKHVAQILDSRMNTKYDENDKLIREVKVITLKSKLVSDFRKDFQFYKVREINNYHHAHDAYLNAVVGTALIKKYPKLESEFVYGDYKVYDVRKMIAKSEQEIGKATAKYFFYSNIMNFFKTEITLANGEIRKRPLIETNGETGEIVWDKGRDFATVRKVLSMPQVNIVKKTEVQTGGFSKESILPKRNSDKLIARKKDWDPKKYGGFDSPTVAYSVLVVAKVEKGKSKKLKSVKELLGITIMERSSFEKNPIDFLEAKGYKEVKKDLIIKLPKYSLFELENGRKRMLASAGELQKGNELALPSKYVNFLYLASHYEKLKGSPEDNEQKQLFVEQHKHYLDEIIEQISEFSKRVILADANLDKVLSAYNKHRDKPIREQAENIIHLFTLTNLGAPAAFKYFDTTIDRKRYTSTKEVLDATLIHQSITGLYETRIDLSQLGGDGGEAAAKEAAAKEAAAKEAAAKGGTLNIEDEYRLHETSKEPDVPLGSTWLSDFPQAWAETGGMGLAVRQAPLIIPLKATSTPVSIKQYPMSQEARLGIKPHIQRLLDQGILVPCQSPWNTPLLPVKKPGTNDYRPVQDLREVNKRVEDIHPTVPNPYNLLSGLPPSHQWYTVLDLKDAFFCLRLHPTSQPLFAFEWRDPEMGISGQLTWTRLPQGFKNSPTLFNEALHRDLADFRIQHPDLILLQYVDDLLLAATSEQDCQRGTRALLQTLGNLGYRASAKKAQICQKQVKYLGYLLKEGQRWLTEARKETVMGQPTPKTPRQLREFLGKAGFCRLFIPGFAEMAAPLYPLTKPGTLFNWGPDQQKAYQEIKQALLTAPALGLPDLTKPFELFVDEKQGYAKGVLTQKLGPWRRPVAYLSKKLDPVAAGWPPCLRMVAAIAVLTKDAGKLTMGQPLVILAPHAVEALVKQPPDRWLSNARMTHYQAMLLDTDRVQFGPVVALNPATLLPLPEKEAPHDCLEILAETHGTRPDLTDQPIPDADYTWYTDGSSFLQEGQRRAGAAVTTETEVIWARALPAGTSAQRAELIALTQALKMAEGKKLNVYTDSRYAFATAHVHGEIYRRRGWLTSEGREIKNKNEILALLKALFLPKRLSIIHCPGHQKGNSAEARGNRMADQAAREAAMKAVLETSTLLAGKRTADGSEFEKRTADGSEFESPKKKAKVE

SEQ ID NO: 1009 - protein, 2090 aa, synthetic construct
MPAAKRVKLDGGDKKYSIGLDIGTNSVGWAVITDEYKVPSKKFKVLGNTDRHSIKKNLIGALLFDSGETAEATRLKRTARRRYTRRKNRICYLQEIFSNEMAKVDDSFFHRLEESFLVEEDKKHERHPIFGNIVDEVAYHEKYPTIYHLRKKLVDSTDKADLRLIYLALAHMIKFRGHFLIEGDLNPDNSDVDKLFIQLVQTYNQLFEENPINASGVDAKAILSARLSKSRRLENLIAQLPGEKKNGLFGNLIALSLGLTPNFKSNFDLAEDAKLQLSKDTYDDDLDNLLAQIGDQYADLFLAAKNLSDAILLSDILRVNTEITKAPLSASMIKRYDEHHQDLTLLKALVRQQLPEKYKEIFFDQSKNGYAGYIDGGASQEEFYKFIKPILEKMDGTEELLVKLNREDLLRKQRTFDNGSIPHQIHLGELHAILRRQEDFYPFLKDNREKIEKILTFRIPYYVGPLARGNSRFAWMTRKSEETITPWNFEEVVDKGASAQSFIERMTNFDKNLPNEKVLPKHSLLYEYFTVYNELTKVKYVTEGMRKPAFLSGEQKKAIVDLLFKTNRKVTVKQLKEDYFKKIECFDSVEISGVEDRFNASLGTYHDLLKIIKDKDFLDNEENEDILEDIVLTLTLFEDREMIEERLKTYAHLFDDKVMKQLKRRRYTGWGRLSRKLINGIRDKQSGKTILDFLKSDGFANRNFMQLIHDDSLTFKEDIQKAQVSGQGDSLHEHIANLAGSPAIKKGILQTVKVVDELVKVMGRHKPENIVIEMARENQTTQKGQKNSRERMKRIEEGIKELGSQILKEHPVENTQLQNEKLYLYYLQNGRDMYVDQELDINRLSDYDVDHIVPQSFLKDDSIDNKVLTRSDKARGKSDNVPSEEVVKKMKNYWRQLLNAKLITQRKFDNLTKAERGGLSELDKAGFIKRQLVETRQITKHVAQILDSRMNTKYDENDKLIREVKVITLKSKLVSDFRKDFQFYKVREINNYHHAHDAYLNAVVGTALIKKYPKLESEFVYGDYKVYDVRKMIAKSEQEIGKATAKYFFYSNIMNFFKTEITLANGEIRKRPLIETNGETGEIVWDKGRDFATVRKVLSMPQVNIVKKTEVQTGGFSKESILPKRNSDKLIARKKDWDPKKYGGFDSPTVAYSVLVVAKVEKGKSKKLKSVKELLGITIMERSSFEKNPIDFLEAKGYKEVKKDLIIKLPKYSLFELENGRKRMLASAGELQKGNELALPSKYVNFLYLASHYEKLKGSPEDNEQKQLFVEQHKHYLDEIIEQISEFSKRVILADANLDKVLSAYNKHRDKPIREQAENIIHLFTLTNLGAPAAFKYFDTTIDRKRYTSTKEVLDATLIHQSITGLYETRIDLSQLGGDGGEAAAKGGTLNIEDEYRLHETSKEPDVPLGSTWLSDFPQAWAETGGMGLAVRQAPLIIPLKATSTPVSIKQYPMSQEARLGIKPHIQRLLDQGILVPCQSPWNTPLLPVKKPGTNDYRPVQDLREVNKRVEDIHPTVPNPYNLLSGLPPSHQWYTVLDLKDAFFCLRLHPTSQPLFAFEWRDPEMGISGQLTWTRLPQGFKNSPTLFNEALHRDLADFRIQHPDLILLQYVDDLLLAATSEQDCQRGTRALLQTLGNLGYRASAKKAQICQKQVKYLGYLLKEGQRWLTEARKETVMGQPTPKTPRQLREFLGKAGFCRLFIPGFAEMAAPLYPLTKPGTLFNWGPDQQKAYQEIKQALLTAPALGLPDLTKPFELFVDEKQGYAKGVLTQKLGPWRRPVAYLSKKLDPVAAGWPPCLRMVAAIAVLTKDAGKLTMGQPLVILAPHAVEALVKQPPDRWLSNARMTHYQAMLLDTDRVQFGPVVALNPATLLPLPEKEAPHDCLEILAETHGTRPDLTDQPIPDADYTWYTDGSSFLQEGQRRAGAAVTTETEVIWARALPAGTSAQRAELIALTQALKMAEGKKLNVYTDSRYAFATAHVHGEIYRRRGWLTSEGREIKNKNEILALLKALFLPKRLSIIHCPGHQKGNSAEARGNRMADQAAREAAMKAVLETSTLLAGKRTADGSEFEKRTADGSEFESPKKKAKVE

SEQ ID NO: 1010 - skipped

SEQ ID NO: 1011 - protein, 2088 aa, synthetic construct
MPAAKRVKLDGGDKKYSIGLDIGTNSVGWAVITDEYKVPSKKFKVLGNTDRHSIKKNLIGALLFDSGETAEATRLKRTARRRYTRRKNRICYLQEIFSNEMAKVDDSFFHRLEESFLVEEDKKHERHPIFGNIVDEVAYHEKYPTIYHLRKKLVDSTDKADLRLIYLALAHMIKFRGHFLIEGDLNPDNSDVDKLFIQLVQTYNQLFEENPINASGVDAKAILSARLSKSRRLENLIAQLPGEKKNGLFGNLIALSLGLTPNFKSNFDLAEDAKLQLSKDTYDDDLDNLLAQIGDQYADLFLAAKNLSDAILLSDILRVNTEITKAPLSASMIKRYDEHHQDLTLLKALVRQQLPEKYKEIFFDQSKNGYAGYIDGGASQEEFYKFIKPILEKMDGTEELLVKLNREDLLRKQRTFDNGSIPHQIHLGELHAILRRQEDFYPFLKDNREKIEKILTFRIPYYVGPLARGNSRFAWMTRKSEETITPWNFEEVVDKGASAQSFIERMTNFDKNLPNEKVLPKHSLLYEYFTVYNELTKVKYVTEGMRKPAFLSGEQKKAIVDLLFKTNRKVTVKQLKEDYFKKIECFDSVEISGVEDRFNASLGTYHDLLKIIKDKDFLDNEENEDILEDIVLTLTLFEDREMIEERLKTYAHLFDDKVMKQLKRRRYTGWGRLSRKLINGIRDKQSGKTILDFLKSDGFANRNFMQLIHDDSLTFKEDIQKAQVSGQGDSLHEHIANLAGSPAIKKGILQTVKVVDELVKVMGRHKPENIVIEMARENQTTQKGQKNSRERMKRIEEGIKELGSQILKEHPVENTQLQNEKLYLYYLQNGRDMYVDQELDINRLSDYDVDHIVPQSFLKDDSIDNKVLTRSDKARGKSDNVPSEEVVKKMKNYWRQLLNAKLITQRKFDNLTKAERGGLSELDKAGFIKRQLVETRQITKHVAQILDSRMNTKYDENDKLIREVKVITLKSKLVSDFRKDFQFYKVREINNYHHAHDAYLNAVVGTALIKKYPKLESEFVYGDYKVYDVRKMIAKSEQEIGKATAKYFFYSNIMNFFKTEITLANGEIRKRPLIETNGETGEIVWDKGRDFATVRKVLSMPQVNIVKKTEVQTGGFSKESILPKRNSDKLIARKKDWDPKKYGGFDSPTVAYSVLVVAKVEKGKSKKLKSVKELLGITIMERSSFEKNPIDFLEAKGYKEVKKDLIIKLPKYSLFELENGRKRMLASAGELQKGNELALPSKYVNFLYLASHYEKLKGSPEDNEQKQLFVEQHKHYLDEIIEQISEFSKRVILADANLDKVLSAYNKHRDKPIREQAENIIHLFTLTNLGAPAAFKYFDTTIDRKRYTSTKEVLDATLIHQSITGLYETRIDLSQLGGDGGGSSGGTLNIEDEYRLHETSKEPDVPLGSTWLSDFPQAWAETGGMGLAVRQAPLIIPLKATSTPVSIKQYPMSQEARLGIKPHIQRLLDQGILVPCQSPWNTPLLPVKKPGTNDYRPVQDLREVNKRVEDIHPTVPNPYNLLSGLPPSHQWYTVLDLKDAFFCLRLHPTSQPLFAFEWRDPEMGISGQLTWTRLPQGFKNSPTLFNEALHRDLADFRIQHPDLILLQYVDDLLLAATSEQDCQRGTRALLQTLGNLGYRASAKKAQICQKQVKYLGYLLKEGQRWLTEARKETVMGQPTPKTPRQLREFLGKAGFCRLFIPGFAEMAAPLYPLTKPGTLFNWGPDQQKAYQEIKQALLTAPALGLPDLTKPFELFVDEKQGYAKGVLTQKLGPWRRPVAYLSKKLDPVAAGWPPCLRMVAAIAVLTKDAGKLTMGQPLVILAPHAVEALVKQPPDRWLSNARMTHYQAMLLDTDRVQFGPVVALNPATLLPLPEKEAPHDCLEILAETHGTRPDLTDQPIPDADYTWYTDGSSFLQEGQRRAGAAVTTETEVIWARALPAGTSAQRAELIALTQALKMAEGKKLNVYTDSRYAFATAHVHGEIYRRRGWLTSEGREIKNKNEILALLKALFLPKRLSIIHCPGHQKGNSAEARGNRMADQAAREAAMKAVLETSTLLAGKRTADGSEFEKRTADGSEFESPKKKAKVE

SEQ ID NO: 1012 - protein, 2096 aa, synthetic construct
MPAAKRVKLDGGDKKYSIGLDIGTNSVGWAVITDEYKVPSKKFKVLGNTDRHSIKKNLIGALLFDSGETAEATRLKRTARRRYTRRKNRICYLQEIFSNEMAKVDDSFFHRLEESFLVEEDKKHERHPIFGNIVDEVAYHEKYPTIYHLRKKLVDSTDKADLRLIYLALAHMIKFRGHFLIEGDLNPDNSDVDKLFIQLVQTYNQLFEENPINASGVDAKAILSARLSKSRRLENLIAQLPGEKKNGLFGNLIALSLGLTPNFKSNFDLAEDAKLQLSKDTYDDDLDNLLAQIGDQYADLFLAAKNLSDAILLSDILRVNTEITKAPLSASMIKRYDEHHQDLTLLKALVRQQLPEKYKEIFFDQSKNGYAGYIDGGASQEEFYKFIKPILEKMDGTEELLVKLNREDLLRKQRTFDNGSIPHQIHLGELHAILRRQEDFYPFLKDNREKIEKILTFRIPYYVGPLARGNSRFAWMTRKSEETITPWNFEEVVDKGASAQSFIERMTNFDKNLPNEKVLPKHSLLYEYFTVYNELTKVKYVTEGMRKPAFLSGEQKKAIVDLLFKTNRKVTVKQLKEDYFKKIECFDSVEISGVEDRFNASLGTYHDLLKIIKDKDFLDNEENEDILEDIVLTLTLFEDREMIEERLKTYAHLFDDKVMKQLKRRRYTGWGRLSRKLINGIRDKQSGKTILDFLKSDGFANRNFMQLIHDDSLTFKEDIQKAQVSGQGDSLHEHIANLAGSPAIKKGILQTVKVVDELVKVMGRHKPENIVIEMARENQTTQKGQKNSRERMKRIEEGIKELGSQILKEHPVENTQLQNEKLYLYYLQNGRDMYVDQELDINRLSDYDVDHIVPQSFLKDDSIDNKVLTRSDKARGKSDNVPSEEVVKKMKNYWRQLLNAKLITQRKFDNLTKAERGGLSELDKAGFIKRQLVETRQITKHVAQILDSRMNTKYDENDKLIREVKVITLKSKLVSDFRKDFQFYKVREINNYHHAHDAYLNAVVGTALIKKYPKLESEFVYGDYKVYDVRKMIAKSEQEIGKATAKYFFYSNIMNFFKTEITLANGEIRKRPLIETNGETGEIVWDKGRDFATVRKVLSMPQVNIVKKTEVQTGGFSKESILPKRNSDKLIARKKDWDPKKYGGFDSPTVAYSVLVVAKVEKGKSKKLKSVKELLGITIMERSSFEKNPIDFLEAKGYKEVKKDLIIKLPKYSLFELENGRKRMLASAGELQKGNELALPSKYVNFLYLASHYEKLKGSPEDNEQKQLFVEQHKHYLDEIIEQISEFSKRVILADANLDKVLSAYNKHRDKPIREQAENIIHLFTLTNLGAPAAFKYFDTTIDRKRYTSTKEVLDATLIHQSITGLYETRIDLSQLGGDGGEAAAKGSSGGGGGTLNIEDEYRLHETSKEPDVPLGSTWLSDFPQAWAETGGMGLAVRQAPLIIPLKATSTPVSIKQYPMSQEARLGIKPHIQRLLDQGILVPCQSPWNTPLLPVKKPGTNDYRPVQDLREVNKRVEDIHPTVPNPYNLLSGLPPSHQWYTVLDLKDAFFCLRLHPTSQPLFAFEWRDPEMGISGQLTWTRLPQGFKNSPTLFNEALHRDLADFRIQHPDLILLQYVDDLLLAATSEQDCQRGTRALLQTLGNLGYRASAKKAQICQKQVKYLGYLLKEGQRWLTEARKETVMGQPTPKTPRQLREFLGKAGFCRLFIPGFAEMAAPLYPLTKPGTLFNWGPDQQKAYQEIKQALLTAPALGLPDLTKPFELFVDEKQGYAKGVLTQKLGPWRRPVAYLSKKLDPVAAGWPPCLRMVAAIAVLTKDAGKLTMGQPLVILAPHAVEALVKQPPDRWLSNARMTHYQAMLLDTDRVQFGPVVALNPATLLPLPEKEAPHDCLEILAETHGTRPDLTDQPIPDADYTWYTDGSSFLQEGQRRAGAAVTTETEVIWARALPAGTSAQRAELIALTQALKMAEGKKLNVYTDSRYAFATAHVHGEIYRRRGWLTSEGREIKNKNEILALLKALFLPKRLSIIHCPGHQKGNSAEARGNRMADQAAREAAMKAVLETSTLLAGKRTADGSEFEKRTADGSEFESPKKKAKVE

SEQ ID NO: 1013-1014 - skipped (2 entries)

SEQ ID NO: 1015 - protein, 2094 aa, synthetic construct
MPAAKRVKLDGGDKKYSIGLDIGTNSVGWAVITDEYKVPSKKFKVLGNTDRHSIKKNLIGALLFDSGETAEATRLKRTARRRYTRRKNRICYLQEIFSNEMAKVDDSFFHRLEESFLVEEDKKHERHPIFGNIVDEVAYHEKYPTIYHLRKKLVDSTDKADLRLIYLALAHMIKFRGHFLIEGDLNPDNSDVDKLFIQLVQTYNQLFEENPINASGVDAKAILSARLSKSRRLENLIAQLPGEKKNGLFGNLIALSLGLTPNFKSNFDLAEDAKLQLSKDTYDDDLDNLLAQIGDQYADLFLAAKNLSDAILLSDILRVNTEITKAPLSASMIKRYDEHHQDLTLLKALVRQQLPEKYKEIFFDQSKNGYAGYIDGGASQEEFYKFIKPILEKMDGTEELLVKLNREDLLRKQRTFDNGSIPHQIHLGELHAILRRQEDFYPFLKDNREKIEKILTFRIPYYVGPLARGNSRFAWMTRKSEETITPWNFEEVVDKGASAQSFIERMTNFDKNLPNEKVLPKHSLLYEYFTVYNELTKVKYVTEGMRKPAFLSGEQKKAIVDLLFKTNRKVTVKQLKEDYFKKIECFDSVEISGVEDRFNASLGTYHDLLKIIKDKDFLDNEENEDILEDIVLTLTLFEDREMIEERLKTYAHLFDDKVMKQLKRRRYTGWGRLSRKLINGIRDKQSGKTILDFLKSDGFANRNFMQLIHDDSLTFKEDIQKAQVSGQGDSLHEHIANLAGSPAIKKGILQTVKVVDELVKVMGRHKPENIVIEMARENQTTQKGQKNSRERMKRIEEGIKELGSQILKEHPVENTQLQNEKLYLYYLQNGRDMYVDQELDINRLSDYDVDHIVPQSFLKDDSIDNKVLTRSDKARGKSDNVPSEEVVKKMKNYWRQLLNAKLITQRKFDNLTKAERGGLSELDKAGFIKRQLVETRQITKHVAQILDSRMNTKYDENDKLIREVKVITLKSKLVSDFRKDFQFYKVREINNYHHAHDAYLNAVVGTALIKKYPKLESEFVYGDYKVYDVRKMIAKSEQEIGKATAKYFFYSNIMNFFKTEITLANGEIRKRPLIETNGETGEIVWDKGRDFATVRKVLSMPQVNIVKKTEVQTGGFSKESILPKRNSDKLIARKKDWDPKKYGGFDSPTVAYSVLVVAKVEKGKSKKLKSVKELLGITIMERSSFEKNPIDFLEAKGYKEVKKDLIIKLPKYSLFELENGRKRMLASAGELQKGNELALPSKYVNFLYLASHYEKLKGSPEDNEQKQLFVEQHKHYLDEIIEQISEFSKRVILADANLDKVLSAYNKHRDKPIREQAENIIHLFTLTNLGAPAAFKYFDTTIDRKRYTSTKEVLDATLIHQSITGLYETRIDLSQLGGDGGGGGGGSPAPGGTLNIEDEYRLHETSKEPDVPLGSTWLSDFPQAWAETGGMGLAVRQAPLIIPLKATSTPVSIKQYPMSQEARLGIKPHIQRLLDQGILVPCQSPWNTPLLPVKKPGTNDYRPVQDLREVNKRVEDIHPTVPNPYNLLSGLPPSHQWYTVLDLKDAFFCLRLHPTSQPLFAFEWRDPEMGISGQLTWTRLPQGFKNSPTLFNEALHRDLADFRIQHPDLILLQYVDDLLLAATSEQDCQRGTRALLQTLGNLGYRASAKKAQICQKQVKYLGYLLKEGQRWLTEARKETVMGQPTPKTPRQLREFLGKAGFCRLFIPGFAEMAAPLYPLTKPGTLFNWGPDQQKAYQEIKQALLTAPALGLPDLTKPFELFVDEKQGYAKGVLTQKLGPWRRPVAYLSKKLDPVAAGWPPCLRMVAAIAVLTKDAGKLTMGQPLVILAPHAVEALVKQPPDRWLSNARMTHYQAMLLDTDRVQFGPVVALNPATLLPLPEKEAPHDCLEILAETHGTRPDLTDQPIPDADYTWYTDGSSFLQEGQRRAGAAVTTETEVIWARALPAGTSAQRAELIALTQALKMAEGKKLNVYTDSRYAFATAHVHGEIYRRRGWLTSEGREIKNKNEILALLKALFLPKRLSIIHCPGHQKGNSAEARGNRMADQAAREAAMKAVLETSTLLAGKRTADGSEFEKRTADGSEFESPKKKAKVE

SEQ ID NO: 1016 - protein, 2091 aa, synthetic construct
MPAAKRVKLDGGDKKYSIGLDIGTNSVGWAVITDEYKVPSKKFKVLGNTDRHSIKKNLIGALLFDSGETAEATRLKRTARRRYTRRKNRICYLQEIFSNEMAKVDDSFFHRLEESFLVEEDKKHERHPIFGNIVDEVAYHEKYPTIYHLRKKLVDSTDKADLRLIYLALAHMIKFRGHFLIEGDLNPDNSDVDKLFIQLVQTYNQLFEENPINASGVDAKAILSARLSKSRRLENLIAQLPGEKKNGLFGNLIALSLGLTPNFKSNFDLAEDAKLQLSKDTYDDDLDNLLAQIGDQYADLFLAAKNLSDAILLSDILRVNTEITKAPLSASMIKRYDEHHQDLTLLKALVRQQLPEKYKEIFFDQSKNGYAGYIDGGASQEEFYKFIKPILEKMDGTEELLVKLNREDLLRKQRTFDNGSIPHQIHLGELHAILRRQEDFYPFLKDNREKIEKILTFRIPYYVGPLARGNSRFAWMTRKSEETITPWNFEEVVDKGASAQSFIERMTNFDKNLPNEKVLPKHSLLYEYFTVYNELTKVKYVTEGMRKPAFLSGEQKKAIVDLLFKTNRKVTVKQLKEDYFKKIECFDSVEISGVEDRFNASLGTYHDLLKIIKDKDFLDNEENEDILEDIVLTLTLFEDREMIEERLKTYAHLFDDKVMKQLKRRRYTGWGRLSRKLINGIRDKQSGKTILDFLKSDGFANRNFMQLIHDDSLTFKEDIQKAQVSGQGDSLHEHIANLAGSPAIKKGILQTVKVVDELVKVMGRHKPENIVIEMARENQTTQKGQKNSRERMKRIEEGIKELGSQILKEHPVENTQLQNEKLYLYYLQNGRDMYVDQELDINRLSDYDVDHIVPQSFLKDDSIDNKVLTRSDKARGKSDNVPSEEVVKKMKNYWRQLLNAKLITQRKFDNLTKAERGGLSELDKAGFIKRQLVETRQITKHVAQILDSRMNTKYDENDKLIREVKVITLKSKLVSDFRKDFQFYKVREINNYHHAHDAYLNAVVGTALIKKYPKLESEFVYGDYKVYDVRKMIAKSEQEIGKATAKYFFYSNIMNFFKTEITLANGEIRKRPLIETNGETGEIVWDKGRDFATVRKVLSMPQVNIVKKTEVQTGGFSKESILPKRNSDKLIARKKDWDPKKYGGFDSPTVAYSVLVVAKVEKGKSKKLKSVKELLGITIMERSSFEKNPIDFLEAKGYKEVKKDLIIKLPKYSLFELENGRKRMLASAGELQKGNELALPSKYVNFLYLASHYEKLKGSPEDNEQKQLFVEQHKHYLDEIIEQISEFSKRVILADANLDKVLSAYNKHRDKPIREQAENIIHLFTLTNLGAPAAFKYFDTTIDRKRYTSTKEVLDATLIHQSITGLYETRIDLSQLGGDGGGGSGSSGGTLNIEDEYRLHETSKEPDVPLGSTWLSDFPQAWAETGGMGLAVRQAPLIIPLKATSTPVSIKQYPMSQEARLGIKPHIQRLLDQGILVPCQSPWNTPLLPVKKPGTNDYRPVQDLREVNKRVEDIHPTVPNPYNLLSGLPPSHQWYTVLDLKDAFFCLRLHPTSQPLFAFEWRDPEMGISGQLTWTRLPQGFKNSPTLFNEALHRDLADFRIQHPDLILLQYVDDLLLAATSEQDCQRGTRALLQTLGNLGYRASAKKAQICQKQVKYLGYLLKEGQRWLTEARKETVMGQPTPKTPRQLREFLGKAGFCRLFIPGFAEMAAPLYPLTKPGTLFNWGPDQQKAYQEIKQALLTAPALGLPDLTKPFELFVDEKQGYAKGVLTQKLGPWRRPVAYLSKKLDPVAAGWPPCLRMVAAIAVLTKDAGKLTMGQPLVILAPHAVEALVKQPPDRWLSNARMTHYQAMLLDTDRVQFGPVVALNPATLLPLPEKEAPHDCLEILAETHGTRPDLTDQPIPDADYTWYTDGSSFLQEGQRRAGAAVTTETEVIWARALPAGTSAQRAELIALTQALKMAEGKKLNVYTDSRYAFATAHVHGEIYRRRGWLTSEGREIKNKNEILALLKALFLPKRLSIIHCPGHQKGNSAEARGNRMADQAAREAAMKAVLETSTLLAGKRTADGSEFEKRTADGSEFESPKKKAKVE

SEQ ID NO: 1017 - protein, 2091 aa, synthetic construct
MPAAKRVKLDGGDKKYSIGLDIGTNSVGWAVITDEYKVPSKKFKVLGNTDRHSIKKNLIGALLFDSGETAEATRLKRTARRRYTRRKNRICYLQEIFSNEMAKVDDSFFHRLEESFLVEEDKKHERHPIFGNIVDEVAYHEKYPTIYHLRKKLVDSTDKADLRLIYLALAHMIKFRGHFLIEGDLNPDNSDVDKLFIQLVQTYNQLFEENPINASGVDAKAILSARLSKSRRLENLIAQLPGEKKNGLFGNLIALSLGLTPNFKSNFDLAEDAKLQLSKDTYDDDLDNLLAQIGDQYADLFLAAKNLSDAILLSDILRVNTEITKAPLSASMIKRYDEHHQDLTLLKALVRQQLPEKYKEIFFDQSKNGYAGYIDGGASQEEFYKFIKPILEKMDGTEELLVKLNREDLLRKQRTFDNGSIPHQIHLGELHAILRRQEDFYPFLKDNREKIEKILTFRIPYYVGPLARGNSRFAWMTRKSEETITPWNFEEVVDKGASAQSFIERMTNFDKNLPNEKVLPKHSLLYEYFTVYNELTKVKYVTEGMRKPAFLSGEQKKAIVDLLFKTNRKVTVKQLKEDYFKKIECFDSVEISGVEDRFNASLGTYHDLLKIIKDKDFLDNEENEDILEDIVLTLTLFEDREMIEERLKTYAHLFDDKVMKQLKRRRYTGWGRLSRKLINGIRDKQSGKTILDFLKSDGFANRNFMQLIHDDSLTFKEDIQKAQVSGQGDSLHEHIANLAGSPAIKKGILQTVKVVDELVKVMGRHKPENIVIEMARENQTTQKGQKNSRERMKRIEEGIKELGSQILKEHPVENTQLQNEKLYLYYLQNGRDMYVDQELDINRLSDYDVDHIVPQSFLKDDSIDNKVLTRSDKARGKSDNVPSEEVVKKMKNYWRQLLNAKLITQRKFDNLTKAERGGLSELDKAGFIKRQLVETRQITKHVAQILDSRMNTKYDENDKLIREVKVITLKSKLVSDFRKDFQFYKVREINNYHHAHDAYLNAVVGTALIKKYPKLESEFVYGDYKVYDVRKMIAKSEQEIGKATAKYFFYSNIMNFFKTEITLANGEIRKRPLIETNGETGEIVWDKGRDFATVRKVLSMPQVNIVKKTEVQTGGFSKESILPKRNSDKLIARKKDWDPKKYGGFDSPTVAYSVLVVAKVEKGKSKKLKSVKELLGITIMERSSFEKNPIDFLEAKGYKEVKKDLIIKLPKYSLFELENGRKRMLASAGELQKGNELALPSKYVNFLYLASHYEKLKGSPEDNEQKQLFVEQHKHYLDEIIEQISEFSKRVILADANLDKVLSAYNKHRDKPIREQAENIIHLFTLTNLGAPAAFKYFDTTIDRKRYTSTKEVLDATLIHQSITGLYETRIDLSQLGGDGGGGSPAPGGTLNIEDEYRLHETSKEPDVPLGSTWLSDFPQAWAETGGMGLAVRQAPLIIPLKATSTPVSIKQYPMSQEARLGIKPHIQRLLDQGILVPCQSPWNTPLLPVKKPGTNDYRPVQDLREVNKRVEDIHPTVPNPYNLLSGLPPSHQWYTVLDLKDAFFCLRLHPTSQPLFAFEWRDPEMGISGQLTWTRLPQGFKNSPTLFNEALHRDLADFRIQHPDLILLQYVDDLLLAATSEQDCQRGTRALLQTLGNLGYRASAKKAQICQKQVKYLGYLLKEGQRWLTEARKETVMGQPTPKTPRQLREFLGKAGFCRLFIPGFAEMAAPLYPLTKPGTLFNWGPDQQKAYQEIKQALLTAPALGLPDLTKPFELFVDEKQGYAKGVLTQKLGPWRRPVAYLSKKLDPVAAGWPPCLRMVAAIAVLTKDAGKLTMGQPLVILAPHAVEALVKQPPDRWLSNARMTHYQAMLLDTDRVQFGPVVALNPATLLPLPEKEAPHDCLEILAETHGTRPDLTDQPIPDADYTWYTDGSSFLQEGQRRAGAAVTTETEVIWARALPAGTSAQRAELIALTQALKMAEGKKLNVYTDSRYAFATAHVHGEIYRRRGWLTSEGREIKNKNEILALLKALFLPKRLSIIHCPGHQKGNSAEARGNRMADQAAREAAMKAVLETSTLLAGKRTADGSEFEKRTADGSEFESPKKKAKVE

SEQ ID NO: 1018 - protein, 2096 aa, synthetic construct
MPAAKRVKLDGGDKKYSIGLDIGTNSVGWAVITDEYKVPSKKFKVLGNTDRHSIKKNLIGALLFDSGETAEATRLKRTARRRYTRRKNRICYLQEIFSNEMAKVDDSFFHRLEESFLVEEDKKHERHPIFGNIVDEVAYHEKYPTIYHLRKKLVDSTDKADLRLIYLALAHMIKFRGHFLIEGDLNPDNSDVDKLFIQLVQTYNQLFEENPINASGVDAKAILSARLSKSRRLENLIAQLPGEKKNGLFGNLIALSLGLTPNFKSNFDLAEDAKLQLSKDTYDDDLDNLLAQIGDQYADLFLAAKNLSDAILLSDILRVNTEITKAPLSASMIKRYDEHHQDLTLLKALVRQQLPEKYKEIFFDQSKNGYAGYIDGGASQEEFYKFIKPILEKMDGTEELLVKLNREDLLRKQRTFDNGSIPHQIHLGELHAILRRQEDFYPFLKDNREKIEKILTFRIPYYVGPLARGNSRFAWMTRKSEETITPWNFEEVVDKGASAQSFIERMTNFDKNLPNEKVLPKHSLLYEYFTVYNELTKVKYVTEGMRKPAFLSGEQKKAIVDLLFKTNRKVTVKQLKEDYFKKIECFDSVEISGVEDRFNASLGTYHDLLKIIKDKDFLDNEENEDILEDIVLTLTLFEDREMIEERLKTYAHLFDDKVMKQLKRRRYTGWGRLSRKLINGIRDKQSGKTILDFLKSDGFANRNFMQLIHDDSLTFKEDIQKAQVSGQGDSLHEHIANLAGSPAIKKGILQTVKVVDELVKVMGRHKPENIVIEMARENQTTQKGQKNSRERMKRIEEGIKELGSQILKEHPVENTQLQNEKLYLYYLQNGRDMYVDQELDINRLSDYDVDHIVPQSFLKDDSIDNKVLTRSDKARGKSDNVPSEEVVKKMKNYWRQLLNAKLITQRKFDNLTKAERGGLSELDKAGFIKRQLVETRQITKHVAQILDSRMNTKYDENDKLIREVKVITLKSKLVSDFRKDFQFYKVREINNYHHAHDAYLNAVVGTALIKKYPKLESEFVYGDYKVYDVRKMIAKSEQEIGKATAKYFFYSNIMNFFKTEITLANGEIRKRPLIETNGETGEIVWDKGRDFATVRKVLSMPQVNIVKKTEVQTGGFSKESILPKRNSDKLIARKKDWDPKKYGGFDSPTVAYSVLVVAKVEKGKSKKLKSVKELLGITIMERSSFEKNPIDFLEAKGYKEVKKDLIIKLPKYSLFELENGRKRMLASAGELQKGNELALPSKYVNFLYLASHYEKLKGSPEDNEQKQLFVEQHKHYLDEIIEQISEFSKRVILADANLDKVLSAYNKHRDKPIREQAENIIHLFTLTNLGAPAAFKYFDTTIDRKRYTSTKEVLDATLIHQSITGLYETRIDLSQLGGDGGGGGEAAAKGGSGGTLNIEDEYRLHETSKEPDVPLGSTWLSDFPQAWAETGGMGLAVRQAPLIIPLKATSTPVSIKQYPMSQEARLGIKPHIQRLLDQGILVPCQSPWNTPLLPVKKPGTNDYRPVQDLREVNKRVEDIHPTVPNPYNLLSGLPPSHQWYTVLDLKDAFFCLRLHPTSQPLFAFEWRDPEMGISGQLTWTRLPQGFKNSPTLFNEALHRDLADFRIQHPDLILLQYVDDLLLAATSEQDCQRGTRALLQTLGNLGYRASAKKAQICQKQVKYLGYLLKEGQRWLTEARKETVMGQPTPKTPRQLREFLGKAGFCRLFIPGFAEMAAPLYPLTKPGTLFNWGPDQQKAYQEIKQALLTAPALGLPDLTKPFELFVDEKQGYAKGVLTQKLGPWRRPVAYLSKKLDPVAAGWPPCLRMVAAIAVLTKDAGKLTMGQPLVILAPHAVEALVKQPPDRWLSNARMTHYQAMLLDTDRVQFGPVVALNPATLLPLPEKEAPHDCLEILAETHGTRPDLTDQPIPDADYTWYTDGSSFLQEGQRRAGAAVTTETEVIWARALPAGTSAQRAELIALTQALKMAEGKKLNVYTDSRYAFATAHVHGEIYRRRGWLTSEGREIKNKNEILALLKALFLPKRLSIIHCPGHQKGNSAEARGNRMADQAAREAAMKAVLETSTLLAGKRTADGSEFEKRTADGSEFESPKKKAKVE

SEQ ID NO: 1019 - protein, 2097 aa, synthetic construct
MPAAKRVKLDGGDKKYSIGLDIGTNSVGWAVITDEYKVPSKKFKVLGNTDRHSIKKNLIGALLFDSGETAEATRLKRTARRRYTRRKNRICYLQEIFSNEMAKVDDSFFHRLEESFLVEEDKKHERHPIFGNIVDEVAYHEKYPTIYHLRKKLVDSTDKADLRLIYLALAHMIKFRGHFLIEGDLNPDNSDVDKLFIQLVQTYNQLFEENPINASGVDAKAILSARLSKSRRLENLIAQLPGEKKNGLFGNLIALSLGLTPNFKSNFDLAEDAKLQLSKDTYDDDLDNLLAQIGDQYADLFLAAKNLSDAILLSDILRVNTEITKAPLSASMIKRYDEHHQDLTLLKALVRQQLPEKYKEIFFDQSKNGYAGYIDGGASQEEFYKFIKPILEKMDGTEELLVKLNREDLLRKQRTFDNGSIPHQIHLGELHAILRRQEDFYPFLKDNREKIEKILTFRIPYYVGPLARGNSRFAWMTRKSEETITPWNFEEVVDKGASAQSFIERMTNFDKNLPNEKVLPKHSLLYEYFTVYNELTKVKYVTEGMRKPAFLSGEQKKAIVDLLFKTNRKVTVKQLKEDYFKKIECFDSVEISGVEDRFNASLGTYHDLLKIIKDKDFLDNEENEDILEDIVLTLTLFEDREMIEERLKTYAHLFDDKVMKQLKRRRYTGWGRLSRKLINGIRDKQSGKTILDFLKSDGFANRNFMQLIHDDSLTFKEDIQKAQVSGQGDSLHEHIANLAGSPAIKKGILQTVKVVDELVKVMGRHKPENIVIEMARENQTTQKGQKNSRERMKRIEEGIKELGSQILKEHPVENTQLQNEKLYLYYLQNGRDMYVDQELDINRLSDYDVDHIVPQSFLKDDSIDNKVLTRSDKARGKSDNVPSEEVVKKMKNYWRQLLNAKLITQRKFDNLTKAERGGLSELDKAGFIKRQLVETRQITKHVAQILDSRMNTKYDENDKLIREVKVITLKSKLVSDFRKDFQFYKVREINNYHHAHDAYLNAVVGTALIKKYPKLESEFVYGDYKVYDVRKMIAKSEQEIGKATAKYFFYSNIMNFFKTEITLANGEIRKRPLIETNGETGEIVWDKGRDFATVRKVLSMPQVNIVKKTEVQTGGFSKESILPKRNSDKLIARKKDWDPKKYGGFDSPTVAYSVLVVAKVEKGKSKKLKSVKELLGITIMERSSFEKNPIDFLEAKGYKEVKKDLIIKLPKYSLFELENGRKRMLASAGELQKGNELALPSKYVNFLYLASHYEKLKGSPEDNEQKQLFVEQHKHYLDEIIEQISEFSKRVILADANLDKVLSAYNKHRDKPIREQAENIIHLFTLTNLGAPAAFKYFDTTIDRKRYTSTKEVLDATLIHQSITGLYETRIDLSQLGGDGGGGSGGSGGSGGSGGTLNIEDEYRLHETSKEPDVPLGSTWLSDFPQAWAETGGMGLAVRQAPLIIPLKATSTPVSIKQYPMSQEARLGIKPHIQRLLDQGILVPCQSPWNTPLLPVKKPGTNDYRPVQDLREVNKRVEDIHPTVPNPYNLLSGLPPSHQWYTVLDLKDAFFCLRLHPTSQPLFAFEWRDPEMGISGQLTWTRLPQGFKNSPTLFNEALHRDLADFRIQHPDLILLQYVDDLLLAATSEQDCQRGTRALLQTLGNLGYRASAKKAQICQKQVKYLGYLLKEGQRWLTEARKETVMGQPTPKTPRQLREFLGKAGFCRLFIPGFAEMAAPLYPLTKPGTLFNWGPDQQKAYQEIKQALLTAPALGLPDLTKPFELFVDEKQGYAKGVLTQKLGPWRRPVAYLSKKLDPVAAGWPPCLRMVAAIAVLTKDAGKLTMGQPLVILAPHAVEALVKQPPDRWLSNARMTHYQAMLLDTDRVQFGPVVALNPATLLPLPEKEAPHDCLEILAETHGTRPDLTDQPIPDADYTWYTDGSSFLQEGQRRAGAAVTTETEVIWARALPAGTSAQRAELIALTQALKMAEGKKLNVYTDSRYAFATAHVHGEIYRRRGWLTSEGREIKNKNEILALLKALFLPKRLSIIHCPGHQKGNSAEARGNRMADQAAREAAMKAVLETSTLLAGKRTADGSEFEKRTADGSEFESPKKKAKVE

SEQ ID NO: 1020 - protein, 2098 aa, synthetic construct
MPAAKRVKLDGGDKKYSIGLDIGTNSVGWAVITDEYKVPSKKFKVLGNTDRHSIKKNLIGALLFDSGETAEATRLKRTARRRYTRRKNRICYLQEIFSNEMAKVDDSFFHRLEESFLVEEDKKHERHPIFGNIVDEVAYHEKYPTIYHLRKKLVDSTDKADLRLIYLALAHMIKFRGHFLIEGDLNPDNSDVDKLFIQLVQTYNQLFEENPINASGVDAKAILSARLSKSRRLENLIAQLPGEKKNGLFGNLIALSLGLTPNFKSNFDLAEDAKLQLSKDTYDDDLDNLLAQIGDQYADLFLAAKNLSDAILLSDILRVNTEITKAPLSASMIKRYDEHHQDLTLLKALVRQQLPEKYKEIFFDQSKNGYAGYIDGGASQEEFYKFIKPILEKMDGTEELLVKLNREDLLRKQRTFDNGSIPHQIHLGELHAILRRQEDFYPFLKDNREKIEKILTFRIPYYVGPLARGNSRFAWMTRKSEETITPWNFEEVVDKGASAQSFIERMTNFDKNLPNEKVLPKHSLLYEYFTVYNELTKVKYVTEGMRKPAFLSGEQKKAIVDLLFKTNRKVTVKQLKEDYFKKIECFDSVEISGVEDRFNASLGTYHDLLKIIKDKDFLDNEENEDILEDIVLTLTLFEDREMIEERLKTYAHLFDDKVMKQLKRRRYTGWGRLSRKLINGIRDKQSGKTILDFLKSDGFANRNFMQLIHDDSLTFKEDIQKAQVSGQGDSLHEHIANLAGSPAIKKGILQTVKVVDELVKVMGRHKPENIVIEMARENQTTQKGQKNSRERMKRIEEGIKELGSQILKEHPVENTQLQNEKLYLYYLQNGRDMYVDQELDINRLSDYDVDHIVPQSFLKDDSIDNKVLTRSDKARGKSDNVPSEEVVKKMKNYWRQLLNAKLITQRKFDNLTKAERGGLSELDKAGFIKRQLVETRQITKHVAQILDSRMNTKYDENDKLIREVKVITLKSKLVSDFRKDFQFYKVREINNYHHAHDAYLNAVVGTALIKKYPKLESEFVYGDYKVYDVRKMIAKSEQEIGKATAKYFFYSNIMNFFKTEITLANGEIRKRPLIETNGETGEIVWDKGRDFATVRKVLSMPQVNIVKKTEVQTGGFSKESILPKRNSDKLIARKKDWDPKKYGGFDSPTVAYSVLVVAKVEKGKSKKLKSVKELLGITIMERSSFEKNPIDFLEAKGYKEVKKDLIIKLPKYSLFELENGRKRMLASAGELQKGNELALPSKYVNFLYLASHYEKLKGSPEDNEQKQLFVEQHKHYLDEIIEQISEFSKRVILADANLDKVLSAYNKHRDKPIREQAENIIHLFTLTNLGAPAAFKYFDTTIDRKRYTSTKEVLDATLIHQSITGLYETRIDLSQLGGDGGPAPAPAPAPAPAPGGTLNIEDEYRLHETSKEPDVPLGSTWLSDFPQAWAETGGMGLAVRQAPLIIPLKATSTPVSIKQYPMSQEARLGIKPHIQRLLDQGILVPCQSPWNTPLLPVKKPGTNDYRPVQDLREVNKRVEDIHPTVPNPYNLLSGLPPSHQWYTVLDLKDAFFCLRLHPTSQPLFAFEWRDPEMGISGQLTWTRLPQGFKNSPTLFNEALHRDLADFRIQHPDLILLQYVDDLLLAATSEQDCQRGTRALLQTLGNLGYRASAKKAQICQKQVKYLGYLLKEGQRWLTEARKETVMGQPTPKTPRQLREFLGKAGFCRLFIPGFAEMAAPLYPLTKPGTLFNWGPDQQKAYQEIKQALLTAPALGLPDLTKPFELFVDEKQGYAKGVLTQKLGPWRRPVAYLSKKLDPVAAGWPPCLRMVAAIAVLTKDAGKLTMGQPLVILAPHAVEALVKQPPDRWLSNARMTHYQAMLLDTDRVQFGPVVALNPATLLPLPEKEAPHDCLEILAETHGTRPDLTDQPIPDADYTWYTDGSSFLQEGQRRAGAAVTTETEVIWARALPAGTSAQRAELIALTQALKMAEGKKLNVYTDSRYAFATAHVHGEIYRRRGWLTSEGREIKNKNEILALLKALFLPKRLSIIHCPGHQKGNSAEARGNRMADQAAREAAMKAVLETSTLLAGKRTADGSEFEKRTADGSEFESPKKKAKVE

SEQ ID NO: 1021 - protein, 2115 aa, synthetic construct
MPAAKRVKLDGGDKKYSIGLDIGTNSVGWAVITDEYKVPSKKFKVLGNTDRHSIKKNLIGALLFDSGETAEATRLKRTARRRYTRRKNRICYLQEIFSNEMAKVDDSFFHRLEESFLVEEDKKHERHPIFGNIVDEVAYHEKYPTIYHLRKKLVDSTDKADLRLIYLALAHMIKFRGHFLIEGDLNPDNSDVDKLFIQLVQTYNQLFEENPINASGVDAKAILSARLSKSRRLENLIAQLPGEKKNGLFGNLIALSLGLTPNFKSNFDLAEDAKLQLSKDTYDDDLDNLLAQIGDQYADLFLAAKNLSDAILLSDILRVNTEITKAPLSASMIKRYDEHHQDLTLLKALVRQQLPEKYKEIFFDQSKNGYAGYIDGGASQEEFYKFIKPILEKMDGTEELLVKLNREDLLRKQRTFDNGSIPHQIHLGELHAILRRQEDFYPFLKDNREKIEKILTFRIPYYVGPLARGNSRFAWMTRKSEETITPWNFEEVVDKGASAQSFIERMTNFDKNLPNEKVLPKHSLLYEYFTVYNELTKVKYVTEGMRKPAFLSGEQKKAIVDLLFKTNRKVTVKQLKEDYFKKIECFDSVEISGVEDRFNASLGTYHDLLKIIKDKDFLDNEENEDILEDIVLTLTLFEDREMIEERLKTYAHLFDDKVMKQLKRRRYTGWGRLSRKLINGIRDKQSGKTILDFLKSDGFANRNFMQLIHDDSLTFKEDIQKAQVSGQGDSLHEHIANLAGSPAIKKGILQTVKVVDELVKVMGRHKPENIVIEMARENQTTQKGQKNSRERMKRIEEGIKELGSQILKEHPVENTQLQNEKLYLYYLQNGRDMYVDQELDINRLSDYDVDHIVPQSFLKDDSIDNKVLTRSDKARGKSDNVPSEEVVKKMKNYWRQLLNAKLITQRKFDNLTKAERGGLSELDKAGFIKRQLVETRQITKHVAQILDSRMNTKYDENDKLIREVKVITLKSKLVSDFRKDFQFYKVREINNYHHAHDAYLNAVVGTALIKKYPKLESEFVYGDYKVYDVRKMIAKSEQEIGKATAKYFFYSNIMNFFKTEITLANGEIRKRPLIETNGETGEIVWDKGRDFATVRKVLSMPQVNIVKKTEVQTGGFSKESILPKRNSDKLIARKKDWDPKKYGGFDSPTVAYSVLVVAKVEKGKSKKLKSVKELLGITIMERSSFEKNPIDFLEAKGYKEVKKDLIIKLPKYSLFELENGRKRMLASAGELQKGNELALPSKYVNFLYLASHYEKLKGSPEDNEQKQLFVEQHKHYLDEIIEQISEFSKRVILADANLDKVLSAYNKHRDKPIREQAENIIHLFTLTNLGAPAAFKYFDTTIDRKRYTSTKEVLDATLIHQSITGLYETRIDLSQLGGDGGGGGGSGGGGSGGGGSGGGGSGGGGSGGGGSGGTLNIEDEYRLHETSKEPDVPLGSTWLSDFPQAWAETGGMGLAVRQAPLIIPLKATSTPVSIKQYPMSQEARLGIKPHIQRLLDQGILVPCQSPWNTPLLPVKKPGTNDYRPVQDLREVNKRVEDIHPTVPNPYNLLSGLPPSHQWYTVLDLKDAFFCLRLHPTSQPLFAFEWRDPEMGISGQLTWTRLPQGFKNSPTLFNEALHRDLADFRIQHPDLILLQYVDDLLLAATSEQDCQRGTRALLQTLGNLGYRASAKKAQICQKQVKYLGYLLKEGQRWLTEARKETVMGQPTPKTPRQLREFLGKAGFCRLFIPGFAEMAAPLYPLTKPGTLFNWGPDQQKAYQEIKQALLTAPALGLPDLTKPFELFVDEKQGYAKGVLTQKLGPWRRPVAYLSKKLDPVAAGWPPCLRMVAAIAVLTKDAGKLTMGQPLVILAPHAVEALVKQPPDRWLSNARMTHYQAMLLDTDRVQFGPVVALNPATLLPLPEKEAPHDCLEILAETHGTRPDLTDQPIPDADYTWYTDGSSFLQEGQRRAGAAVTTETEVIWARALPAGTSAQRAELIALTQALKMAEGKKLNVYTDSRYAFATAHVHGEIYRRRGWLTSEGREIKNKNEILALLKALFLPKRLSIIHCPGHQKGNSAEARGNRMADQAAREAAMKAVLETSTLLAGKRTADGSEFEKRTADGSEFESPKKKAKVE

SEQ ID NO: 1022 - protein, 2094 aa, synthetic construct
MPAAKRVKLDGGDKKYSIGLDIGTNSVGWAVITDEYKVPSKKFKVLGNTDRHSIKKNLIGALLFDSGETAEATRLKRTARRRYTRRKNRICYLQEIFSNEMAKVDDSFFHRLEESFLVEEDKKHERHPIFGNIVDEVAYHEKYPTIYHLRKKLVDSTDKADLRLIYLALAHMIKFRGHFLIEGDLNPDNSDVDKLFIQLVQTYNQLFEENPINASGVDAKAILSARLSKSRRLENLIAQLPGEKKNGLFGNLIALSLGLTPNFKSNFDLAEDAKLQLSKDTYDDDLDNLLAQIGDQYADLFLAAKNLSDAILLSDILRVNTEITKAPLSASMIKRYDEHHQDLTLLKALVRQQLPEKYKEIFFDQSKNGYAGYIDGGASQEEFYKFIKPILEKMDGTEELLVKLNREDLLRKQRTFDNGSIPHQIHLGELHAILRRQEDFYPFLKDNREKIEKILTFRIPYYVGPLARGNSRFAWMTRKSEETITPWNFEEVVDKGASAQSFIERMTNFDKNLPNEKVLPKHSLLYEYFTVYNELTKVKYVTEGMRKPAFLSGEQKKAIVDLLFKTNRKVTVKQLKEDYFKKIECFDSVEISGVEDRFNASLGTYHDLLKIIKDKDFLDNEENEDILEDIVLTLTLFEDREMIEERLKTYAHLFDDKVMKQLKRRRYTGWGRLSRKLINGIRDKQSGKTILDFLKSDGFANRNFMQLIHDDSLTFKEDIQKAQVSGQGDSLHEHIANLAGSPAIKKGILQTVKVVDELVKVMGRHKPENIVIEMARENQTTQKGQKNSRERMKRIEEGIKELGSQILKEHPVENTQLQNEKLYLYYLQNGRDMYVDQELDINRLSDYDVDHIVPQSFLKDDSIDNKVLTRSDKARGKSDNVPSEEVVKKMKNYWRQLLNAKLITQRKFDNLTKAERGGLSELDKAGFIKRQLVETRQITKHVAQILDSRMNTKYDENDKLIREVKVITLKSKLVSDFRKDFQFYKVREINNYHHAHDAYLNAVVGTALIKKYPKLESEFVYGDYKVYDVRKMIAKSEQEIGKATAKYFFYSNIMNFFKTEITLANGEIRKRPLIETNGETGEIVWDKGRDFATVRKVLSMPQVNIVKKTEVQTGGFSKESILPKRNSDKLIARKKDWDPKKYGGFDSPTVAYSVLVVAKVEKGKSKKLKSVKELLGITIMERSSFEKNPIDFLEAKGYKEVKKDLIIKLPKYSLFELENGRKRMLASAGELQKGNELALPSKYVNFLYLASHYEKLKGSPEDNEQKQLFVEQHKHYLDEIIEQISEFSKRVILADANLDKVLSAYNKHRDKPIREQAENIIHLFTLTNLGAPAAFKYFDTTIDRKRYTSTKEVLDATLIHQSITGLYETRIDLSQLGGDGGGGSGSSGGGGGTLNIEDEYRLHETSKEPDVPLGSTWLSDFPQAWAETGGMGLAVRQAPLIIPLKATSTPVSIKQYPMSQEARLGIKPHIQRLLDQGILVPCQSPWNTPLLPVKKPGTNDYRPVQDLREVNKRVEDIHPTVPNPYNLLSGLPPSHQWYTVLDLKDAFFCLRLHPTSQPLFAFEWRDPEMGISGQLTWTRLPQGFKNSPTLFNEALHRDLADFRIQHPDLILLQYVDDLLLAATSEQDCQRGTRALLQTLGNLGYRASAKKAQICQKQVKYLGYLLKEGQRWLTEARKETVMGQPTPKTPRQLREFLGKAGFCRLFIPGFAEMAAPLYPLTKPGTLFNWGPDQQKAYQEIKQALLTAPALGLPDLTKPFELFVDEKQGYAKGVLTQKLGPWRRPVAYLSKKLDPVAAGWPPCLRMVAAIAVLTKDAGKLTMGQPLVILAPHAVEALVKQPPDRWLSNARMTHYQAMLLDTDRVQFGPVVALNPATLLPLPEKEAPHDCLEILAETHGTRPDLTDQPIPDADYTWYTDGSSFLQEGQRRAGAAVTTETEVIWARALPAGTSAQRAELIALTQALKMAEGKKLNVYTDSRYAFATAHVHGEIYRRRGWLTSEGREIKNKNEILALLKALFLPKRLSIIHCPGHQKGNSAEARGNRMADQAAREAAMKAVLETSTLLAGKRTADGSEFEKRTADGSEFESPKKKAKVE

SEQ ID NO: 1023 - protein, 2093 aa, synthetic construct
MPAAKRVKLDGGDKKYSIGLDIGTNSVGWAVITDEYKVPSKKFKVLGNTDRHSIKKNLIGALLFDSGETAEATRLKRTARRRYTRRKNRICYLQEIFSNEMAKVDDSFFHRLEESFLVEEDKKHERHPIFGNIVDEVAYHEKYPTIYHLRKKLVDSTDKADLRLIYLALAHMIKFRGHFLIEGDLNPDNSDVDKLFIQLVQTYNQLFEENPINASGVDAKAILSARLSKSRRLENLIAQLPGEKKNGLFGNLIALSLGLTPNFKSNFDLAEDAKLQLSKDTYDDDLDNLLAQIGDQYADLFLAAKNLSDAILLSDILRVNTEITKAPLSASMIKRYDEHHQDLTLLKALVRQQLPEKYKEIFFDQSKNGYAGYIDGGASQEEFYKFIKPILEKMDGTEELLVKLNREDLLRKQRTFDNGSIPHQIHLGELHAILRRQEDFYPFLKDNREKIEKILTFRIPYYVGPLARGNSRFAWMTRKSEETITPWNFEEVVDKGASAQSFIERMTNFDKNLPNEKVLPKHSLLYEYFTVYNELTKVKYVTEGMRKPAFLSGEQKKAIVDLLFKTNRKVTVKQLKEDYFKKIECFDSVEISGVEDRFNASLGTYHDLLKIIKDKDFLDNEENEDILEDIVLTLTLFEDREMIEERLKTYAHLFDDKVMKQLKRRRYTGWGRLSRKLINGIRDKQSGKTILDFLKSDGFANRNFMQLIHDDSLTFKEDIQKAQVSGQGDSLHEHIANLAGSPAIKKGILQTVKVVDELVKVMGRHKPENIVIEMARENQTTQKGQKNSRERMKRIEEGIKELGSQILKEHPVENTQLQNEKLYLYYLQNGRDMYVDQELDINRLSDYDVDHIVPQSFLKDDSIDNKVLTRSDKARGKSDNVPSEEVVKKMKNYWRQLLNAKLITQRKFDNLTKAERGGLSELDKAGFIKRQLVETRQITKHVAQILDSRMNTKYDENDKLIREVKVITLKSKLVSDFRKDFQFYKVREINNYHHAHDAYLNAVVGTALIKKYPKLESEFVYGDYKVYDVRKMIAKSEQEIGKATAKYFFYSNIMNFFKTEITLANGEIRKRPLIETNGETGEIVWDKGRDFATVRKVLSMPQVNIVKKTEVQTGGFSKESILPKRNSDKLIARKKDWDPKKYGGFDSPTVAYSVLVVAKVEKGKSKKLKSVKELLGITIMERSSFEKNPIDFLEAKGYKEVKKDLIIKLPKYSLFELENGRKRMLASAGELQKGNELALPSKYVNFLYLASHYEKLKGSPEDNEQKQLFVEQHKHYLDEIIEQISEFSKRVILADANLDKVLSAYNKHRDKPIREQAENIIHLFTLTNLGAPAAFKYFDTTIDRKRYTSTKEVLDATLIHQSITGLYETRIDLSQLGGDGGEAAAKGGSGGTLNIEDEYRLHETSKEPDVPLGSTWLSDFPQAWAETGGMGLAVRQAPLIIPLKATSTPVSIKQYPMSQEARLGIKPHIQRLLDQGILVPCQSPWNTPLLPVKKPGTNDYRPVQDLREVNKRVEDIHPTVPNPYNLLSGLPPSHQWYTVLDLKDAFFCLRLHPTSQPLFAFEWRDPEMGISGQLTWTRLPQGFKNSPTLFNEALHRDLADFRIQHPDLILLQYVDDLLLAATSEQDCQRGTRALLQTLGNLGYRASAKKAQICQKQVKYLGYLLKEGQRWLTEARKETVMGQPTPKTPRQLREFLGKAGFCRLFIPGFAEMAAPLYPLTKPGTLFNWGPDQQKAYQEIKQALLTAPALGLPDLTKPFELFVDEKQGYAKGVLTQKLGPWRRPVAYLSKKLDPVAAGWPPCLRMVAAIAVLTKDAGKLTMGQPLVILAPHAVEALVKQPPDRWLSNARMTHYQAMLLDTDRVQFGPVVALNPATLLPLPEKEAPHDCLEILAETHGTRPDLTDQPIPDADYTWYTDGSSFLQEGQRRAGAAVTTETEVIWARALPAGTSAQRAELIALTQALKMAEGKKLNVYTDSRYAFATAHVHGEIYRRRGWLTSEGREIKNKNEILALLKALFLPKRLSIIHCPGHQKGNSAEARGNRMADQAAREAAMKAVLETSTLLAGKRTADGSEFEKRTADGSEFESPKKKAKVE

SEQ ID NO: 1024 - skipped

SEQ ID NO: 1025 - protein, 2094 aa, synthetic construct
MPAAKRVKLDGGDKKYSIGLDIGTNSVGWAVITDEYKVPSKKFKVLGNTDRHSIKKNLIGALLFDSGETAEATRLKRTARRRYTRRKNRICYLQEIFSNEMAKVDDSFFHRLEESFLVEEDKKHERHPIFGNIVDEVAYHEKYPTIYHLRKKLVDSTDKADLRLIYLALAHMIKFRGHFLIEGDLNPDNSDVDKLFIQLVQTYNQLFEENPINASGVDAKAILSARLSKSRRLENLIAQLPGEKKNGLFGNLIALSLGLTPNFKSNFDLAEDAKLQLSKDTYDDDLDNLLAQIGDQYADLFLAAKNLSDAILLSDILRVNTEITKAPLSASMIKRYDEHHQDLTLLKALVRQQLPEKYKEIFFDQSKNGYAGYIDGGASQEEFYKFIKPILEKMDGTEELLVKLNREDLLRKQRTFDNGSIPHQIHLGELHAILRRQEDFYPFLKDNREKIEKILTFRIPYYVGPLARGNSRFAWMTRKSEETITPWNFEEVVDKGASAQSFIERMTNFDKNLPNEKVLPKHSLLYEYFTVYNELTKVKYVTEGMRKPAFLSGEQKKAIVDLLFKTNRKVTVKQLKEDYFKKIECFDSVEISGVEDRFNASLGTYHDLLKIIKDKDFLDNEENEDILEDIVLTLTLFEDREMIEERLKTYAHLFDDKVMKQLKRRRYTGWGRLSRKLINGIRDKQSGKTILDFLKSDGFANRNFMQLIHDDSLTFKEDIQKAQVSGQGDSLHEHIANLAGSPAIKKGILQTVKVVDELVKVMGRHKPENIVIEMARENQTTQKGQKNSRERMKRIEEGIKELGSQILKEHPVENTQLQNEKLYLYYLQNGRDMYVDQELDINRLSDYDVDHIVPQSFLKDDSIDNKVLTRSDKARGKSDNVPSEEVVKKMKNYWRQLLNAKLITQRKFDNLTKAERGGLSELDKAGFIKRQLVETRQITKHVAQILDSRMNTKYDENDKLIREVKVITLKSKLVSDFRKDFQFYKVREINNYHHAHDAYLNAVVGTALIKKYPKLESEFVYGDYKVYDVRKMIAKSEQEIGKATAKYFFYSNIMNFFKTEITLANGEIRKRPLIETNGETGEIVWDKGRDFATVRKVLSMPQVNIVKKTEVQTGGFSKESILPKRNSDKLIARKKDWDPKKYGGFDSPTVAYSVLVVAKVEKGKSKKLKSVKELLGITIMERSSFEKNPIDFLEAKGYKEVKKDLIIKLPKYSLFELENGRKRMLASAGELQKGNELALPSKYVNFLYLASHYEKLKGSPEDNEQKQLFVEQHKHYLDEIIEQISEFSKRVILADANLDKVLSAYNKHRDKPIREQAENIIHLFTLTNLGAPAAFKYFDTTIDRKRYTSTKEVLDATLIHQSITGLYETRIDLSQLGGDGGGGGPAPGGSGGTLNIEDEYRLHETSKEPDVPLGSTWLSDFPQAWAETGGMGLAVRQAPLIIPLKATSTPVSIKQYPMSQEARLGIKPHIQRLLDQGILVPCQSPWNTPLLPVKKPGTNDYRPVQDLREVNKRVEDIHPTVPNPYNLLSGLPPSHQWYTVLDLKDAFFCLRLHPTSQPLFAFEWRDPEMGISGQLTWTRLPQGFKNSPTLFNEALHRDLADFRIQHPDLILLQYVDDLLLAATSEQDCQRGTRALLQTLGNLGYRASAKKAQICQKQVKYLGYLLKEGQRWLTEARKETVMGQPTPKTPRQLREFLGKAGFCRLFIPGFAEMAAPLYPLTKPGTLFNWGPDQQKAYQEIKQALLTAPALGLPDLTKPFELFVDEKQGYAKGVLTQKLGPWRRPVAYLSKKLDPVAAGWPPCLRMVAAIAVLTKDAGKLTMGQPLVILAPHAVEALVKQPPDRWLSNARMTHYQAMLLDTDRVQFGPVVALNPATLLPLPEKEAPHDCLEILAETHGTRPDLTDQPIPDADYTWYTDGSSFLQEGQRRAGAAVTTETEVIWARALPAGTSAQRAELIALTQALKMAEGKKLNVYTDSRYAFATAHVHGEIYRRRGWLTSEGREIKNKNEILALLKALFLPKRLSIIHCPGHQKGNSAEARGNRMADQAAREAAMKAVLETSTLLAGKRTADGSEFEKRTADGSEFESPKKKAKVE

SEQ ID NO: 1026-1028 - skipped (3 entries)

SEQ ID NO: 1029 - protein, 2110 aa, synthetic construct
MPAAKRVKLDGGDKKYSIGLDIGTNSVGWAVITDEYKVPSKKFKVLGNTDRHSIKKNLIGALLFDSGETAEATRLKRTARRRYTRRKNRICYLQEIFSNEMAKVDDSFFHRLEESFLVEEDKKHERHPIFGNIVDEVAYHEKYPTIYHLRKKLVDSTDKADLRLIYLALAHMIKFRGHFLIEGDLNPDNSDVDKLFIQLVQTYNQLFEENPINASGVDAKAILSARLSKSRRLENLIAQLPGEKKNGLFGNLIALSLGLTPNFKSNFDLAEDAKLQLSKDTYDDDLDNLLAQIGDQYADLFLAAKNLSDAILLSDILRVNTEITKAPLSASMIKRYDEHHQDLTLLKALVRQQLPEKYKEIFFDQSKNGYAGYIDGGASQEEFYKFIKPILEKMDGTEELLVKLNREDLLRKQRTFDNGSIPHQIHLGELHAILRRQEDFYPFLKDNREKIEKILTFRIPYYVGPLARGNSRFAWMTRKSEETITPWNFEEVVDKGASAQSFIERMTNFDKNLPNEKVLPKHSLLYEYFTVYNELTKVKYVTEGMRKPAFLSGEQKKAIVDLLFKTNRKVTVKQLKEDYFKKIECFDSVEISGVEDRFNASLGTYHDLLKIIKDKDFLDNEENEDILEDIVLTLTLFEDREMIEERLKTYAHLFDDKVMKQLKRRRYTGWGRLSRKLINGIRDKQSGKTILDFLKSDGFANRNFMQLIHDDSLTFKEDIQKAQVSGQGDSLHEHIANLAGSPAIKKGILQTVKVVDELVKVMGRHKPENIVIEMARENQTTQKGQKNSRERMKRIEEGIKELGSQILKEHPVENTQLQNEKLYLYYLQNGRDMYVDQELDINRLSDYDVDHIVPQSFLKDDSIDNKVLTRSDKARGKSDNVPSEEVVKKMKNYWRQLLNAKLITQRKFDNLTKAERGGLSELDKAGFIKRQLVETRQITKHVAQILDSRMNTKYDENDKLIREVKVITLKSKLVSDFRKDFQFYKVREINNYHHAHDAYLNAVVGTALIKKYPKLESEFVYGDYKVYDVRKMIAKSEQEIGKATAKYFFYSNIMNFFKTEITLANGEIRKRPLIETNGETGEIVWDKGRDFATVRKVLSMPQVNIVKKTEVQTGGFSKESILPKRNSDKLIARKKDWDPKKYGGFDSPTVAYSVLVVAKVEKGKSKKLKSVKELLGITIMERSSFEKNPIDFLEAKGYKEVKKDLIIKLPKYSLFELENGRKRMLASAGELQKGNELALPSKYVNFLYLASHYEKLKGSPEDNEQKQLFVEQHKHYLDEIIEQISEFSKRVILADANLDKVLSAYNKHRDKPIREQAENIIHLFTLTNLGAPAAFKYFDTTIDRKRYTSTKEVLDATLIHQSITGLYETRIDLSQLGGDGGEAAAKEAAAKEAAAKEAAAKEAAAKGGTLNIEDEYRLHETSKEPDVPLGSTWLSDFPQAWAETGGMGLAVRQAPLIIPLKATSTPVSIKQYPMSQEARLGIKPHIQRLLDQGILVPCQSPWNTPLLPVKKPGTNDYRPVQDLREVNKRVEDIHPTVPNPYNLLSGLPPSHQWYTVLDLKDAFFCLRLHPTSQPLFAFEWRDPEMGISGQLTWTRLPQGFKNSPTLFNEALHRDLADFRIQHPDLILLQYVDDLLLAATSEQDCQRGTRALLQTLGNLGYRASAKKAQICQKQVKYLGYLLKEGQRWLTEARKETVMGQPTPKTPRQLREFLGKAGFCRLFIPGFAEMAAPLYPLTKPGTLFNWGPDQQKAYQEIKQALLTAPALGLPDLTKPFELFVDEKQGYAKGVLTQKLGPWRRPVAYLSKKLDPVAAGWPPCLRMVAAIAVLTKDAGKLTMGQPLVILAPHAVEALVKQPPDRWLSNARMTHYQAMLLDTDRVQFGPVVALNPATLLPLPEKEAPHDCLEILAETHGTRPDLTDQPIPDADYTWYTDGSSFLQEGQRRAGAAVTTETEVIWARALPAGTSAQRAELIALTQALKMAEGKKLNVYTDSRYAFATAHVHGEIYRRRGWLTSEGREIKNKNEILALLKALFLPKRLSIIHCPGHQKGNSAEARGNRMADQAAREAAMKAVLETSTLLAGKRTADGSEFEKRTADGSEFESPKKKAKVE

SEQ ID NO: 1030-1032 - skipped (3 entries)

SEQ ID NO: 1033 - protein, 2094 aa, synthetic construct
MPAAKRVKLDGGDKKYSIGLDIGTNSVGWAVITDEYKVPSKKFKVLGNTDRHSIKKNLIGALLFDSGETAEATRLKRTARRRYTRRKNRICYLQEIFSNEMAKVDDSFFHRLEESFLVEEDKKHERHPIFGNIVDEVAYHEKYPTIYHLRKKLVDSTDKADLRLIYLALAHMIKFRGHFLIEGDLNPDNSDVDKLFIQLVQTYNQLFEENPINASGVDAKAILSARLSKSRRLENLIAQLPGEKKNGLFGNLIALSLGLTPNFKSNFDLAEDAKLQLSKDTYDDDLDNLLAQIGDQYADLFLAAKNLSDAILLSDILRVNTEITKAPLSASMIKRYDEHHQDLTLLKALVRQQLPEKYKEIFFDQSKNGYAGYIDGGASQEEFYKFIKPILEKMDGTEELLVKLNREDLLRKQRTFDNGSIPHQIHLGELHAILRRQEDFYPFLKDNREKIEKILTFRIPYYVGPLARGNSRFAWMTRKSEETITPWNFEEVVDKGASAQSFIERMTNFDKNLPNEKVLPKHSLLYEYFTVYNELTKVKYVTEGMRKPAFLSGEQKKAIVDLLFKTNRKVTVKQLKEDYFKKIECFDSVEISGVEDRFNASLGTYHDLLKIIKDKDFLDNEENEDILEDIVLTLTLFEDREMIEERLKTYAHLFDDKVMKQLKRRRYTGWGRLSRKLINGIRDKQSGKTILDFLKSDGFANRNFMQLIHDDSLTFKEDIQKAQVSGQGDSLHEHIANLAGSPAIKKGILQTVKVVDELVKVMGRHKPENIVIEMARENQTTQKGQKNSRERMKRIEEGIKELGSQILKEHPVENTQLQNEKLYLYYLQNGRDMYVDQELDINRLSDYDVDHIVPQSFLKDDSIDNKVLTRSDKARGKSDNVPSEEVVKKMKNYWRQLLNAKLITQRKFDNLTKAERGGLSELDKAGFIKRQLVETRQITKHVAQILDSRMNTKYDENDKLIREVKVITLKSKLVSDFRKDFQFYKVREINNYHHAHDAYLNAVVGTALIKKYPKLESEFVYGDYKVYDVRKMIAKSEQEIGKATAKYFFYSNIMNFFKTEITLANGEIRKRPLIETNGETGEIVWDKGRDFATVRKVLSMPQVNIVKKTEVQTGGFSKESILPKRNSDKLIARKKDWDPKKYGGFDSPTVAYSVLVVAKVEKGKSKKLKSVKELLGITIMERSSFEKNPIDFLEAKGYKEVKKDLIIKLPKYSLFELENGRKRMLASAGELQKGNELALPSKYVNFLYLASHYEKLKGSPEDNEQKQLFVEQHKHYLDEIIEQISEFSKRVILADANLDKVLSAYNKHRDKPIREQAENIIHLFTLTNLGAPAAFKYFDTTIDRKRYTSTKEVLDATLIHQSITGLYETRIDLSQLGGDGGPAPGSSGGGGGTLNIEDEYRLHETSKEPDVPLGSTWLSDFPQAWAETGGMGLAVRQAPLIIPLKATSTPVSIKQYPMSQEARLGIKPHIQRLLDQGILVPCQSPWNTPLLPVKKPGTNDYRPVQDLREVNKRVEDIHPTVPNPYNLLSGLPPSHQWYTVLDLKDAFFCLRLHPTSQPLFAFEWRDPEMGISGQLTWTRLPQGFKNSPTLFNEALHRDLADFRIQHPDLILLQYVDDLLLAATSEQDCQRGTRALLQTLGNLGYRASAKKAQICQKQVKYLGYLLKEGQRWLTEARKETVMGQPTPKTPRQLREFLGKAGFCRLFIPGFAEMAAPLYPLTKPGTLFNWGPDQQKAYQEIKQALLTAPALGLPDLTKPFELFVDEKQGYAKGVLTQKLGPWRRPVAYLSKKLDPVAAGWPPCLRMVAAIAVLTKDAGKLTMGQPLVILAPHAVEALVKQPPDRWLSNARMTHYQAMLLDTDRVQFGPVVALNPATLLPLPEKEAPHDCLEILAETHGTRPDLTDQPIPDADYTWYTDGSSFLQEGQRRAGAAVTTETEVIWARALPAGTSAQRAELIALTQALKMAEGKKLNVYTDSRYAFATAHVHGEIYRRRGWLTSEGREIKNKNEILALLKALFLPKRLSIIHCPGHQKGNSAEARGNRMADQAAREAAMKAVLETSTLLAGKRTADGSEFEKRTADGSEFESPKKKAKVE

SEQ ID NO: 1034 - protein, 2096 aa, synthetic construct
MPAAKRVKLDGGDKKYSIGLDIGTNSVGWAVITDEYKVPSKKFKVLGNTDRHSIKKNLIGALLFDSGETAEATRLKRTARRRYTRRKNRICYLQEIFSNEMAKVDDSFFHRLEESFLVEEDKKHERHPIFGNIVDEVAYHEKYPTIYHLRKKLVDSTDKADLRLIYLALAHMIKFRGHFLIEGDLNPDNSDVDKLFIQLVQTYNQLFEENPINASGVDAKAILSARLSKSRRLENLIAQLPGEKKNGLFGNLIALSLGLTPNFKSNFDLAEDAKLQLSKDTYDDDLDNLLAQIGDQYADLFLAAKNLSDAILLSDILRVNTEITKAPLSASMIKRYDEHHQDLTLLKALVRQQLPEKYKEIFFDQSKNGYAGYIDGGASQEEFYKFIKPILEKMDGTEELLVKLNREDLLRKQRTFDNGSIPHQIHLGELHAILRRQEDFYPFLKDNREKIEKILTFRIPYYVGPLARGNSRFAWMTRKSEETITPWNFEEVVDKGASAQSFIERMTNFDKNLPNEKVLPKHSLLYEYFTVYNELTKVKYVTEGMRKPAFLSGEQKKAIVDLLFKTNRKVTVKQLKEDYFKKIECFDSVEISGVEDRFNASLGTYHDLLKIIKDKDFLDNEENEDILEDIVLTLTLFEDREMIEERLKTYAHLFDDKVMKQLKRRRYTGWGRLSRKLINGIRDKQSGKTILDFLKSDGFANRNFMQLIHDDSLTFKEDIQKAQVSGQGDSLHEHIANLAGSPAIKKGILQTVKVVDELVKVMGRHKPENIVIEMARENQTTQKGQKNSRERMKRIEEGIKELGSQILKEHPVENTQLQNEKLYLYYLQNGRDMYVDQELDINRLSDYDVDHIVPQSFLKDDSIDNKVLTRSDKARGKSDNVPSEEVVKKMKNYWRQLLNAKLITQRKFDNLTKAERGGLSELDKAGFIKRQLVETRQITKHVAQILDSRMNTKYDENDKLIREVKVITLKSKLVSDFRKDFQFYKVREINNYHHAHDAYLNAVVGTALIKKYPKLESEFVYGDYKVYDVRKMIAKSEQEIGKATAKYFFYSNIMNFFKTEITLANGEIRKRPLIETNGETGEIVWDKGRDFATVRKVLSMPQVNIVKKTEVQTGGFSKESILPKRNSDKLIARKKDWDPKKYGGFDSPTVAYSVLVVAKVEKGKSKKLKSVKELLGITIMERSSFEKNPIDFLEAKGYKEVKKDLIIKLPKYSLFELENGRKRMLASAGELQKGNELALPSKYVNFLYLASHYEKLKGSPEDNEQKQLFVEQHKHYLDEIIEQISEFSKRVILADANLDKVLSAYNKHRDKPIREQAENIIHLFTLTNLGAPAAFKYFDTTIDRKRYTSTKEVLDATLIHQSITGLYETRIDLSQLGGDGGPAPGGSEAAAKGGTLNIEDEYRLHETSKEPDVPLGSTWLSDFPQAWAETGGMGLAVRQAPLIIPLKATSTPVSIKQYPMSQEARLGIKPHIQRLLDQGILVPCQSPWNTPLLPVKKPGTNDYRPVQDLREVNKRVEDIHPTVPNPYNLLSGLPPSHQWYTVLDLKDAFFCLRLHPTSQPLFAFEWRDPEMGISGQLTWTRLPQGFKNSPTLFNEALHRDLADFRIQHPDLILLQYVDDLLLAATSEQDCQRGTRALLQTLGNLGYRASAKKAQICQKQVKYLGYLLKEGQRWLTEARKETVMGQPTPKTPRQLREFLGKAGFCRLFIPGFAEMAAPLYPLTKPGTLFNWGPDQQKAYQEIKQALLTAPALGLPDLTKPFELFVDEKQGYAKGVLTQKLGPWRRPVAYLSKKLDPVAAGWPPCLRMVAAIAVLTKDAGKLTMGQPLVILAPHAVEALVKQPPDRWLSNARMTHYQAMLLDTDRVQFGPVVALNPATLLPLPEKEAPHDCLEILAETHGTRPDLTDQPIPDADYTWYTDGSSFLQEGQRRAGAAVTTETEVIWARALPAGTSAQRAELIALTQALKMAEGKKLNVYTDSRYAFATAHVHGEIYRRRGWLTSEGREIKNKNEILALLKALFLPKRLSIIHCPGHQKGNSAEARGNRMADQAAREAAMKAVLETSTLLAGKRTADGSEFEKRTADGSEFESPKKKAKVE

SEQ ID NO: 1035-1036 - skipped (2 entries)

SEQ ID NO: 1037 - protein, 2100 aa, synthetic construct
MPAAKRVKLDGGDKKYSIGLDIGTNSVGWAVITDEYKVPSKKFKVLGNTDRHSIKKNLIGALLFDSGETAEATRLKRTARRRYTRRKNRICYLQEIFSNEMAKVDDSFFHRLEESFLVEEDKKHERHPIFGNIVDEVAYHEKYPTIYHLRKKLVDSTDKADLRLIYLALAHMIKFRGHFLIEGDLNPDNSDVDKLFIQLVQTYNQLFEENPINASGVDAKAILSARLSKSRRLENLIAQLPGEKKNGLFGNLIALSLGLTPNFKSNFDLAEDAKLQLSKDTYDDDLDNLLAQIGDQYADLFLAAKNLSDAILLSDILRVNTEITKAPLSASMIKRYDEHHQDLTLLKALVRQQLPEKYKEIFFDQSKNGYAGYIDGGASQEEFYKFIKPILEKMDGTEELLVKLNREDLLRKQRTFDNGSIPHQIHLGELHAILRRQEDFYPFLKDNREKIEKILTFRIPYYVGPLARGNSRFAWMTRKSEETITPWNFEEVVDKGASAQSFIERMTNFDKNLPNEKVLPKHSLLYEYFTVYNELTKVKYVTEGMRKPAFLSGEQKKAIVDLLFKTNRKVTVKQLKEDYFKKIECFDSVEISGVEDRFNASLGTYHDLLKIIKDKDFLDNEENEDILEDIVLTLTLFEDREMIEERLKTYAHLFDDKVMKQLKRRRYTGWGRLSRKLINGIRDKQSGKTILDFLKSDGFANRNFMQLIHDDSLTFKEDIQKAQVSGQGDSLHEHIANLAGSPAIKKGILQTVKVVDELVKVMGRHKPENIVIEMARENQTTQKGQKNSRERMKRIEEGIKELGSQILKEHPVENTQLQNEKLYLYYLQNGRDMYVDQELDINRLSDYDVDHIVPQSFLKDDSIDNKVLTRSDKARGKSDNVPSEEVVKKMKNYWRQLLNAKLITQRKFDNLTKAERGGLSELDKAGFIKRQLVETRQITKHVAQILDSRMNTKYDENDKLIREVKVITLKSKLVSDFRKDFQFYKVREINNYHHAHDAYLNAVVGTALIKKYPKLESEFVYGDYKVYDVRKMIAKSEQEIGKATAKYFFYSNIMNFFKTEITLANGEIRKRPLIETNGETGEIVWDKGRDFATVRKVLSMPQVNIVKKTEVQTGGFSKESILPKRNSDKLIARKKDWDPKKYGGFDSPTVAYSVLVVAKVEKGKSKKLKSVKELLGITIMERSSFEKNPIDFLEAKGYKEVKKDLIIKLPKYSLFELENGRKRMLASAGELQKGNELALPSKYVNFLYLASHYEKLKGSPEDNEQKQLFVEQHKHYLDEIIEQISEFSKRVILADANLDKVLSAYNKHRDKPIREQAENIIHLFTLTNLGAPAAFKYFDTTIDRKRYTSTKEVLDATLIHQSITGLYETRIDLSQLGGDGGEAAAKGGGGSEAAAKGGTLNIEDEYRLHETSKEPDVPLGSTWLSDFPQAWAETGGMGLAVRQAPLIIPLKATSTPVSIKQYPMSQEARLGIKPHIQRLLDQGILVPCQSPWNTPLLPVKKPGTNDYRPVQDLREVNKRVEDIHPTVPNPYNLLSGLPPSHQWYTVLDLKDAFFCLRLHPTSQPLFAFEWRDPEMGISGQLTWTRLPQGFKNSPTLFNEALHRDLADFRIQHPDLILLQYVDDLLLAATSEQDCQRGTRALLQTLGNLGYRASAKKAQICQKQVKYLGYLLKEGQRWLTEARKETVMGQPTPKTPRQLREFLGKAGFCRLFIPGFAEMAAPLYPLTKPGTLFNWGPDQQKAYQEIKQALLTAPALGLPDLTKPFELFVDEKQGYAKGVLTQKLGPWRRPVAYLSKKLDPVAAGWPPCLRMVAAIAVLTKDAGKLTMGQPLVILAPHAVEALVKQPPDRWLSNARMTHYQAMLLDTDRVQFGPVVALNPATLLPLPEKEAPHDCLEILAETHGTRPDLTDQPIPDADYTWYTDGSSFLQEGQRRAGAAVTTETEVIWARALPAGTSAQRAELIALTQALKMAEGKKLNVYTDSRYAFATAHVHGEIYRRRGWLTSEGREIKNKNEILALLKALFLPKRLSIIHCPGHQKGNSAEARGNRMADQAAREAAMKAVLETSTLLAGKRTADGSEFEKRTADGSEFESPKKKAKVE

SEQ ID NO: 1038 - protein, 2094 aa, synthetic construct
MPAAKRVKLDGGDKKYSIGLDIGTNSVGWAVITDEYKVPSKKFKVLGNTDRHSIKKNLIGALLFDSGETAEATRLKRTARRRYTRRKNRICYLQEIFSNEMAKVDDSFFHRLEESFLVEEDKKHERHPIFGNIVDEVAYHEKYPTIYHLRKKLVDSTDKADLRLIYLALAHMIKFRGHFLIEGDLNPDNSDVDKLFIQLVQTYNQLFEENPINASGVDAKAILSARLSKSRRLENLIAQLPGEKKNGLFGNLIALSLGLTPNFKSNFDLAEDAKLQLSKDTYDDDLDNLLAQIGDQYADLFLAAKNLSDAILLSDILRVNTEITKAPLSASMIKRYDEHHQDLTLLKALVRQQLPEKYKEIFFDQSKNGYAGYIDGGASQEEFYKFIKPILEKMDGTEELLVKLNREDLLRKQRTFDNGSIPHQIHLGELHAILRRQEDFYPFLKDNREKIEKILTFRIPYYVGPLARGNSRFAWMTRKSEETITPWNFEEVVDKGASAQSFIERMTNFDKNLPNEKVLPKHSLLYEYFTVYNELTKVKYVTEGMRKPAFLSGEQKKAIVDLLFKTNRKVTVKQLKEDYFKKIECFDSVEISGVEDRFNASLGTYHDLLKIIKDKDFLDNEENEDILEDIVLTLTLFEDREMIEERLKTYAHLFDDKVMKQLKRRRYTGWGRLSRKLINGIRDKQSGKTILDFLKSDGFANRNFMQLIHDDSLTFKEDIQKAQVSGQGDSLHEHIANLAGSPAIKKGILQTVKVVDELVKVMGRHKPENIVIEMARENQTTQKGQKNSRERMKRIEEGIKELGSQILKEHPVENTQLQNEKLYLYYLQNGRDMYVDQELDINRLSDYDVDHIVPQSFLKDDSIDNKVLTRSDKARGKSDNVPSEEVVKKMKNYWRQLLNAKLITQRKFDNLTKAERGGLSELDKAGFIKRQLVETRQITKHVAQILDSRMNTKYDENDKLIREVKVITLKSKLVSDFRKDFQFYKVREINNYHHAHDAYLNAVVGTALIKKYPKLESEFVYGDYKVYDVRKMIAKSEQEIGKATAKYFFYSNIMNFFKTEITLANGEIRKRPLIETNGETGEIVWDKGRDFATVRKVLSMPQVNIVKKTEVQTGGFSKESILPKRNSDKLIARKKDWDPKKYGGFDSPTVAYSVLVVAKVEKGKSKKLKSVKELLGITIMERSSFEKNPIDFLEAKGYKEVKKDLIIKLPKYSLFELENGRKRMLASAGELQKGNELALPSKYVNFLYLASHYEKLKGSPEDNEQKQLFVEQHKHYLDEIIEQISEFSKRVILADANLDKVLSAYNKHRDKPIREQAENIIHLFTLTNLGAPAAFKYFDTTIDRKRYTSTKEVLDATLIHQSITGLYETRIDLSQLGGDGGGSSPAPGGGGGTLNIEDEYRLHETSKEPDVPLGSTWLSDFPQAWAETGGMGLAVRQAPLIIPLKATSTPVSIKQYPMSQEARLGIKPHIQRLLDQGILVPCQSPWNTPLLPVKKPGTNDYRPVQDLREVNKRVEDIHPTVPNPYNLLSGLPPSHQWYTVLDLKDAFFCLRLHPTSQPLFAFEWRDPEMGISGQLTWTRLPQGFKNSPTLFNEALHRDLADFRIQHPDLILLQYVDDLLLAATSEQDCQRGTRALLQTLGNLGYRASAKKAQICQKQVKYLGYLLKEGQRWLTEARKETVMGQPTPKTPRQLREFLGKAGFCRLFIPGFAEMAAPLYPLTKPGTLFNWGPDQQKAYQEIKQALLTAPALGLPDLTKPFELFVDEKQGYAKGVLTQKLGPWRRPVAYLSKKLDPVAAGWPPCLRMVAAIAVLTKDAGKLTMGQPLVILAPHAVEALVKQPPDRWLSNARMTHYQAMLLDTDRVQFGPVVALNPATLLPLPEKEAPHDCLEILAETHGTRPDLTDQPIPDADYTWYTDGSSFLQEGQRRAGAAVTTETEVIWARALPAGTSAQRAELIALTQALKMAEGKKLNVYTDSRYAFATAHVHGEIYRRRGWLTSEGREIKNKNEILALLKALFLPKRLSIIHCPGHQKGNSAEARGNRMADQAAREAAMKAVLETSTLLAGKRTADGSEFEKRTADGSEFESPKKKAKVE

SEQ ID NO: 1039 - protein, 2096 aa, synthetic construct
MPAAKRVKLDGGDKKYSIGLDIGTNSVGWAVITDEYKVPSKKFKVLGNTDRHSIKKNLIGALLFDSGETAEATRLKRTARRRYTRRKNRICYLQEIFSNEMAKVDDSFFHRLEESFLVEEDKKHERHPIFGNIVDEVAYHEKYPTIYHLRKKLVDSTDKADLRLIYLALAHMIKFRGHFLIEGDLNPDNSDVDKLFIQLVQTYNQLFEENPINASGVDAKAILSARLSKSRRLENLIAQLPGEKKNGLFGNLIALSLGLTPNFKSNFDLAEDAKLQLSKDTYDDDLDNLLAQIGDQYADLFLAAKNLSDAILLSDILRVNTEITKAPLSASMIKRYDEHHQDLTLLKALVRQQLPEKYKEIFFDQSKNGYAGYIDGGASQEEFYKFIKPILEKMDGTEELLVKLNREDLLRKQRTFDNGSIPHQIHLGELHAILRRQEDFYPFLKDNREKIEKILTFRIPYYVGPLARGNSRFAWMTRKSEETITPWNFEEVVDKGASAQSFIERMTNFDKNLPNEKVLPKHSLLYEYFTVYNELTKVKYVTEGMRKPAFLSGEQKKAIVDLLFKTNRKVTVKQLKEDYFKKIECFDSVEISGVEDRFNASLGTYHDLLKIIKDKDFLDNEENEDILEDIVLTLTLFEDREMIEERLKTYAHLFDDKVMKQLKRRRYTGWGRLSRKLINGIRDKQSGKTILDFLKSDGFANRNFMQLIHDDSLTFKEDIQKAQVSGQGDSLHEHIANLAGSPAIKKGILQTVKVVDELVKVMGRHKPENIVIEMARENQTTQKGQKNSRERMKRIEEGIKELGSQILKEHPVENTQLQNEKLYLYYLQNGRDMYVDQELDINRLSDYDVDHIVPQSFLKDDSIDNKVLTRSDKARGKSDNVPSEEVVKKMKNYWRQLLNAKLITQRKFDNLTKAERGGLSELDKAGFIKRQLVETRQITKHVAQILDSRMNTKYDENDKLIREVKVITLKSKLVSDFRKDFQFYKVREINNYHHAHDAYLNAVVGTALIKKYPKLESEFVYGDYKVYDVRKMIAKSEQEIGKATAKYFFYSNIMNFFKTEITLANGEIRKRPLIETNGETGEIVWDKGRDFATVRKVLSMPQVNIVKKTEVQTGGFSKESILPKRNSDKLIARKKDWDPKKYGGFDSPTVAYSVLVVAKVEKGKSKKLKSVKELLGITIMERSSFEKNPIDFLEAKGYKEVKKDLIIKLPKYSLFELENGRKRMLASAGELQKGNELALPSKYVNFLYLASHYEKLKGSPEDNEQKQLFVEQHKHYLDEIIEQISEFSKRVILADANLDKVLSAYNKHRDKPIREQAENIIHLFTLTNLGAPAAFKYFDTTIDRKRYTSTKEVLDATLIHQSITGLYETRIDLSQLGGDGGEAAAKGSSPAPGGTLNIEDEYRLHETSKEPDVPLGSTWLSDFPQAWAETGGMGLAVRQAPLIIPLKATSTPVSIKQYPMSQEARLGIKPHIQRLLDQGILVPCQSPWNTPLLPVKKPGTNDYRPVQDLREVNKRVEDIHPTVPNPYNLLSGLPPSHQWYTVLDLKDAFFCLRLHPTSQPLFAFEWRDPEMGISGQLTWTRLPQGFKNSPTLFNEALHRDLADFRIQHPDLILLQYVDDLLLAATSEQDCQRGTRALLQTLGNLGYRASAKKAQICQKQVKYLGYLLKEGQRWLTEARKETVMGQPTPKTPRQLREFLGKAGFCRLFIPGFAEMAAPLYPLTKPGTLFNWGPDQQKAYQEIKQALLTAPALGLPDLTKPFELFVDEKQGYAKGVLTQKLGPWRRPVAYLSKKLDPVAAGWPPCLRMVAAIAVLTKDAGKLTMGQPLVILAPHAVEALVKQPPDRWLSNARMTHYQAMLLDTDRVQFGPVVALNPATLLPLPEKEAPHDCLEILAETHGTRPDLTDQPIPDADYTWYTDGSSFLQEGQRRAGAAVTTETEVIWARALPAGTSAQRAELIALTQALKMAEGKKLNVYTDSRYAFATAHVHGEIYRRRGWLTSEGREIKNKNEILALLKALFLPKRLSIIHCPGHQKGNSAEARGNRMADQAAREAAMKAVLETSTLLAGKRTADGSEFEKRTADGSEFESPKKKAKVE

SEQ ID NO: 1040-1042 - skipped (3 entries)

SEQ ID NO: 1043 - protein, 2094 aa, synthetic construct
MPAAKRVKLDGGDKKYSIGLDIGTNSVGWAVITDEYKVPSKKFKVLGNTDRHSIKKNLIGALLFDSGETAEATRLKRTARRRYTRRKNRICYLQEIFSNEMAKVDDSFFHRLEESFLVEEDKKHERHPIFGNIVDEVAYHEKYPTIYHLRKKLVDSTDKADLRLIYLALAHMIKFRGHFLIEGDLNPDNSDVDKLFIQLVQTYNQLFEENPINASGVDAKAILSARLSKSRRLENLIAQLPGEKKNGLFGNLIALSLGLTPNFKSNFDLAEDAKLQLSKDTYDDDLDNLLAQIGDQYADLFLAAKNLSDAILLSDILRVNTEITKAPLSASMIKRYDEHHQDLTLLKALVRQQLPEKYKEIFFDQSKNGYAGYIDGGASQEEFYKFIKPILEKMDGTEELLVKLNREDLLRKQRTFDNGSIPHQIHLGELHAILRRQEDFYPFLKDNREKIEKILTFRIPYYVGPLARGNSRFAWMTRKSEETITPWNFEEVVDKGASAQSFIERMTNFDKNLPNEKVLPKHSLLYEYFTVYNELTKVKYVTEGMRKPAFLSGEQKKAIVDLLFKTNRKVTVKQLKEDYFKKIECFDSVEISGVEDRFNASLGTYHDLLKIIKDKDFLDNEENEDILEDIVLTLTLFEDREMIEERLKTYAHLFDDKVMKQLKRRRYTGWGRLSRKLINGIRDKQSGKTILDFLKSDGFANRNFMQLIHDDSLTFKEDIQKAQVSGQGDSLHEHIANLAGSPAIKKGILQTVKVVDELVKVMGRHKPENIVIEMARENQTTQKGQKNSRERMKRIEEGIKELGSQILKEHPVENTQLQNEKLYLYYLQNGRDMYVDQELDINRLSDYDVDHIVPQSFLKDDSIDNKVLTRSDKARGKSDNVPSEEVVKKMKNYWRQLLNAKLITQRKFDNLTKAERGGLSELDKAGFIKRQLVETRQITKHVAQILDSRMNTKYDENDKLIREVKVITLKSKLVSDFRKDFQFYKVREINNYHHAHDAYLNAVVGTALIKKYPKLESEFVYGDYKVYDVRKMIAKSEQEIGKATAKYFFYSNIMNFFKTEITLANGEIRKRPLIETNGETGEIVWDKGRDFATVRKVLSMPQVNIVKKTEVQTGGFSKESILPKRNSDKLIARKKDWDPKKYGGFDSPTVAYSVLVVAKVEKGKSKKLKSVKELLGITIMERSSFEKNPIDFLEAKGYKEVKKDLIIKLPKYSLFELENGRKRMLASAGELQKGNELALPSKYVNFLYLASHYEKLKGSPEDNEQKQLFVEQHKHYLDEIIEQISEFSKRVILADANLDKVLSAYNKHRDKPIREQAENIIHLFTLTNLGAPAAFKYFDTTIDRKRYTSTKEVLDATLIHQSITGLYETRIDLSQLGGDGGPAPGSSGGSGGTLNIEDEYRLHETSKEPDVPLGSTWLSDFPQAWAETGGMGLAVRQAPLIIPLKATSTPVSIKQYPMSQEARLGIKPHIQRLLDQGILVPCQSPWNTPLLPVKKPGTNDYRPVQDLREVNKRVEDIHPTVPNPYNLLSGLPPSHQWYTVLDLKDAFFCLRLHPTSQPLFAFEWRDPEMGISGQLTWTRLPQGFKNSPTLFNEALHRDLADFRIQHPDLILLQYVDDLLLAATSEQDCQRGTRALLQTLGNLGYRASAKKAQICQKQVKYLGYLLKEGQRWLTEARKETVMGQPTPKTPRQLREFLGKAGFCRLFIPGFAEMAAPLYPLTKPGTLFNWGPDQQKAYQEIKQALLTAPALGLPDLTKPFELFVDEKQGYAKGVLTQKLGPWRRPVAYLSKKLDPVAAGWPPCLRMVAAIAVLTKDAGKLTMGQPLVILAPHAVEALVKQPPDRWLSNARMTHYQAMLLDTDRVQFGPVVALNPATLLPLPEKEAPHDCLEILAETHGTRPDLTDQPIPDADYTWYTDGSSFLQEGQRRAGAAVTTETEVIWARALPAGTSAQRAELIALTQALKMAEGKKLNVYTDSRYAFATAHVHGEIYRRRGWLTSEGREIKNKNEILALLKALFLPKRLSIIHCPGHQKGNSAEARGNRMADQAAREAAMKAVLETSTLLAGKRTADGSEFEKRTADGSEFESPKKKAKVE

SEQ ID NO: 1044 - protein, 2093 aa, synthetic construct
MPAAKRVKLDGGDKKYSIGLDIGTNSVGWAVITDEYKVPSKKFKVLGNTDRHSIKKNLIGALLFDSGETAEATRLKRTARRRYTRRKNRICYLQEIFSNEMAKVDDSFFHRLEESFLVEEDKKHERHPIFGNIVDEVAYHEKYPTIYHLRKKLVDSTDKADLRLIYLALAHMIKFRGHFLIEGDLNPDNSDVDKLFIQLVQTYNQLFEENPINASGVDAKAILSARLSKSRRLENLIAQLPGEKKNGLFGNLIALSLGLTPNFKSNFDLAEDAKLQLSKDTYDDDLDNLLAQIGDQYADLFLAAKNLSDAILLSDILRVNTEITKAPLSASMIKRYDEHHQDLTLLKALVRQQLPEKYKEIFFDQSKNGYAGYIDGGASQEEFYKFIKPILEKMDGTEELLVKLNREDLLRKQRTFDNGSIPHQIHLGELHAILRRQEDFYPFLKDNREKIEKILTFRIPYYVGPLARGNSRFAWMTRKSEETITPWNFEEVVDKGASAQSFIERMTNFDKNLPNEKVLPKHSLLYEYFTVYNELTKVKYVTEGMRKPAFLSGEQKKAIVDLLFKTNRKVTVKQLKEDYFKKIECFDSVEISGVEDRFNASLGTYHDLLKIIKDKDFLDNEENEDILEDIVLTLTLFEDREMIEERLKTYAHLFDDKVMKQLKRRRYTGWGRLSRKLINGIRDKQSGKTILDFLKSDGFANRNFMQLIHDDSLTFKEDIQKAQVSGQGDSLHEHIANLAGSPAIKKGILQTVKVVDELVKVMGRHKPENIVIEMARENQTTQKGQKNSRERMKRIEEGIKELGSQILKEHPVENTQLQNEKLYLYYLQNGRDMYVDQELDINRLSDYDVDHIVPQSFLKDDSIDNKVLTRSDKARGKSDNVPSEEVVKKMKNYWRQLLNAKLITQRKFDNLTKAERGGLSELDKAGFIKRQLVETRQITKHVAQILDSRMNTKYDENDKLIREVKVITLKSKLVSDFRKDFQFYKVREINNYHHAHDAYLNAVVGTALIKKYPKLESEFVYGDYKVYDVRKMIAKSEQEIGKATAKYFFYSNIMNFFKTEITLANGEIRKRPLIETNGETGEIVWDKGRDFATVRKVLSMPQVNIVKKTEVQTGGFSKESILPKRNSDKLIARKKDWDPKKYGGFDSPTVAYSVLVVAKVEKGKSKKLKSVKELLGITIMERSSFEKNPIDFLEAKGYKEVKKDLIIKLPKYSLFELENGRKRMLASAGELQKGNELALPSKYVNFLYLASHYEKLKGSPEDNEQKQLFVEQHKHYLDEIIEQISEFSKRVILADANLDKVLSAYNKHRDKPIREQAENIIHLFTLTNLGAPAAFKYFDTTIDRKRYTSTKEVLDATLIHQSITGLYETRIDLSQLGGDGGGGGEAAAKGGTLNIEDEYRLHETSKEPDVPLGSTWLSDFPQAWAETGGMGLAVRQAPLIIPLKATSTPVSIKQYPMSQEARLGIKPHIQRLLDQGILVPCQSPWNTPLLPVKKPGTNDYRPVQDLREVNKRVEDIHPTVPNPYNLLSGLPPSHQWYTVLDLKDAFFCLRLHPTSQPLFAFEWRDPEMGISGQLTWTRLPQGFKNSPTLFNEALHRDLADFRIQHPDLILLQYVDDLLLAATSEQDCQRGTRALLQTLGNLGYRASAKKAQICQKQVKYLGYLLKEGQRWLTEARKETVMGQPTPKTPRQLREFLGKAGFCRLFIPGFAEMAAPLYPLTKPGTLFNWGPDQQKAYQEIKQALLTAPALGLPDLTKPFELFVDEKQGYAKGVLTQKLGPWRRPVAYLSKKLDPVAAGWPPCLRMVAAIAVLTKDAGKLTMGQPLVILAPHAVEALVKQPPDRWLSNARMTHYQAMLLDTDRVQFGPVVALNPATLLPLPEKEAPHDCLEILAETHGTRPDLTDQPIPDADYTWYTDGSSFLQEGQRRAGAAVTTETEVIWARALPAGTSAQRAELIALTQALKMAEGKKLNVYTDSRYAFATAHVHGEIYRRRGWLTSEGREIKNKNEILALLKALFLPKRLSIIHCPGHQKGNSAEARGNRMADQAAREAAMKAVLETSTLLAGKRTADGSEFEKRTADGSEFESPKKKAKVE

SEQ ID NO: 1045 - skipped

SEQ ID NO: 1046 - protein, 2096 aa, synthetic construct
MPAAKRVKLDGGDKKYSIGLDIGTNSVGWAVITDEYKVPSKKFKVLGNTDRHSIKKNLIGALLFDSGETAEATRLKRTARRRYTRRKNRICYLQEIFSNEMAKVDDSFFHRLEESFLVEEDKKHERHPIFGNIVDEVAYHEKYPTIYHLRKKLVDSTDKADLRLIYLALAHMIKFRGHFLIEGDLNPDNSDVDKLFIQLVQTYNQLFEENPINASGVDAKAILSARLSKSRRLENLIAQLPGEKKNGLFGNLIALSLGLTPNFKSNFDLAEDAKLQLSKDTYDDDLDNLLAQIGDQYADLFLAAKNLSDAILLSDILRVNTEITKAPLSASMIKRYDEHHQDLTLLKALVRQQLPEKYKEIFFDQSKNGYAGYIDGGASQEEFYKFIKPILEKMDGTEELLVKLNREDLLRKQRTFDNGSIPHQIHLGELHAILRRQEDFYPFLKDNREKIEKILTFRIPYYVGPLARGNSRFAWMTRKSEETITPWNFEEVVDKGASAQSFIERMTNFDKNLPNEKVLPKHSLLYEYFTVYNELTKVKYVTEGMRKPAFLSGEQKKAIVDLLFKTNRKVTVKQLKEDYFKKIECFDSVEISGVEDRFNASLGTYHDLLKIIKDKDFLDNEENEDILEDIVLTLTLFEDREMIEERLKTYAHLFDDKVMKQLKRRRYTGWGRLSRKLINGIRDKQSGKTILDFLKSDGFANRNFMQLIHDDSLTFKEDIQKAQVSGQGDSLHEHIANLAGSPAIKKGILQTVKVVDELVKVMGRHKPENIVIEMARENQTTQKGQKNSRERMKRIEEGIKELGSQILKEHPVENTQLQNEKLYLYYLQNGRDMYVDQELDINRLSDYDVDHIVPQSFLKDDSIDNKVLTRSDKARGKSDNVPSEEVVKKMKNYWRQLLNAKLITQRKFDNLTKAERGGLSELDKAGFIKRQLVETRQITKHVAQILDSRMNTKYDENDKLIREVKVITLKSKLVSDFRKDFQFYKVREINNYHHAHDAYLNAVVGTALIKKYPKLESEFVYGDYKVYDVRKMIAKSEQEIGKATAKYFFYSNIMNFFKTEITLANGEIRKRPLIETNGETGEIVWDKGRDFATVRKVLSMPQVNIVKKTEVQTGGFSKESILPKRNSDKLIARKKDWDPKKYGGFDSPTVAYSVLVVAKVEKGKSKKLKSVKELLGITIMERSSFEKNPIDFLEAKGYKEVKKDLIIKLPKYSLFELENGRKRMLASAGELQKGNELALPSKYVNFLYLASHYEKLKGSPEDNEQKQLFVEQHKHYLDEIIEQISEFSKRVILADANLDKVLSAYNKHRDKPIREQAENIIHLFTLTNLGAPAAFKYFDTTIDRKRYTSTKEVLDATLIHQSITGLYETRIDLSQLGGDGGGGSGGGEAAAKGGTLNIEDEYRLHETSKEPDVPLGSTWLSDFPQAWAETGGMGLAVRQAPLIIPLKATSTPVSIKQYPMSQEARLGIKPHIQRLLDQGILVPCQSPWNTPLLPVKKPGTNDYRPVQDLREVNKRVEDIHPTVPNPYNLLSGLPPSHQWYTVLDLKDAFFCLRLHPTSQPLFAFEWRDPEMGISGQLTWTRLPQGFKNSPTLFNEALHRDLADFRIQHPDLILLQYVDDLLLAATSEQDCQRGTRALLQTLGNLGYRASAKKAQICQKQVKYLGYLLKEGQRWLTEARKETVMGQPTPKTPRQLREFLGKAGFCRLFIPGFAEMAAPLYPLTKPGTLFNWGPDQQKAYQEIKQALLTAPALGLPDLTKPFELFVDEKQGYAKGVLTQKLGPWRRPVAYLSKKLDPVAAGWPPCLRMVAAIAVLTKDAGKLTMGQPLVILAPHAVEALVKQPPDRWLSNARMTHYQAMLLDTDRVQFGPVVALNPATLLPLPEKEAPHDCLEILAETHGTRPDLTDQPIPDADYTWYTDGSSFLQEGQRRAGAAVTTETEVIWARALPAGTSAQRAELIALTQALKMAEGKKLNVYTDSRYAFATAHVHGEIYRRRGWLTSEGREIKNKNEILALLKALFLPKRLSIIHCPGHQKGNSAEARGNRMADQAAREAAMKAVLETSTLLAGKRTADGSEFEKRTADGSEFESPKKKAKVE

SEQ ID NO: 1047 - protein, 2091 aa, synthetic construct
MPAAKRVKLDGGDKKYSIGLDIGTNSVGWAVITDEYKVPSKKFKVLGNTDRHSIKKNLIGALLFDSGETAEATRLKRTARRRYTRRKNRICYLQEIFSNEMAKVDDSFFHRLEESFLVEEDKKHERHPIFGNIVDEVAYHEKYPTIYHLRKKLVDSTDKADLRLIYLALAHMIKFRGHFLIEGDLNPDNSDVDKLFIQLVQTYNQLFEENPINASGVDAKAILSARLSKSRRLENLIAQLPGEKKNGLFGNLIALSLGLTPNFKSNFDLAEDAKLQLSKDTYDDDLDNLLAQIGDQYADLFLAAKNLSDAILLSDILRVNTEITKAPLSASMIKRYDEHHQDLTLLKALVRQQLPEKYKEIFFDQSKNGYAGYIDGGASQEEFYKFIKPILEKMDGTEELLVKLNREDLLRKQRTFDNGSIPHQIHLGELHAILRRQEDFYPFLKDNREKIEKILTFRIPYYVGPLARGNSRFAWMTRKSEETITPWNFEEVVDKGASAQSFIERMTNFDKNLPNEKVLPKHSLLYEYFTVYNELTKVKYVTEGMRKPAFLSGEQKKAIVDLLFKTNRKVTVKQLKEDYFKKIECFDSVEISGVEDRFNASLGTYHDLLKIIKDKDFLDNEENEDILEDIVLTLTLFEDREMIEERLKTYAHLFDDKVMKQLKRRRYTGWGRLSRKLINGIRDKQSGKTILDFLKSDGFANRNFMQLIHDDSLTFKEDIQKAQVSGQGDSLHEHIANLAGSPAIKKGILQTVKVVDELVKVMGRHKPENIVIEMARENQTTQKGQKNSRERMKRIEEGIKELGSQILKEHPVENTQLQNEKLYLYYLQNGRDMYVDQELDINRLSDYDVDHIVPQSFLKDDSIDNKVLTRSDKARGKSDNVPSEEVVKKMKNYWRQLLNAKLITQRKFDNLTKAERGGLSELDKAGFIKRQLVETRQITKHVAQILDSRMNTKYDENDKLIREVKVITLKSKLVSDFRKDFQFYKVREINNYHHAHDAYLNAVVGTALIKKYPKLESEFVYGDYKVYDVRKMIAKSEQEIGKATAKYFFYSNIMNFFKTEITLANGEIRKRPLIETNGETGEIVWDKGRDFATVRKVLSMPQVNIVKKTEVQTGGFSKESILPKRNSDKLIARKKDWDPKKYGGFDSPTVAYSVLVVAKVEKGKSKKLKSVKELLGITIMERSSFEKNPIDFLEAKGYKEVKKDLIIKLPKYSLFELENGRKRMLASAGELQKGNELALPSKYVNFLYLASHYEKLKGSPEDNEQKQLFVEQHKHYLDEIIEQISEFSKRVILADANLDKVLSAYNKHRDKPIREQAENIIHLFTLTNLGAPAAFKYFDTTIDRKRYTSTKEVLDATLIHQSITGLYETRIDLSQLGGDGGGSSGSSGGTLNIEDEYRLHETSKEPDVPLGSTWLSDFPQAWAETGGMGLAVRQAPLIIPLKATSTPVSIKQYPMSQEARLGIKPHIQRLLDQGILVPCQSPWNTPLLPVKKPGTNDYRPVQDLREVNKRVEDIHPTVPNPYNLLSGLPPSHQWYTVLDLKDAFFCLRLHPTSQPLFAFEWRDPEMGISGQLTWTRLPQGFKNSPTLFNEALHRDLADFRIQHPDLILLQYVDDLLLAATSEQDCQRGTRALLQTLGNLGYRASAKKAQICQKQVKYLGYLLKEGQRWLTEARKETVMGQPTPKTPRQLREFLGKAGFCRLFIPGFAEMAAPLYPLTKPGTLFNWGPDQQKAYQEIKQALLTAPALGLPDLTKPFELFVDEKQGYAKGVLTQKLGPWRRPVAYLSKKLDPVAAGWPPCLRMVAAIAVLTKDAGKLTMGQPLVILAPHAVEALVKQPPDRWLSNARMTHYQAMLLDTDRVQFGPVVALNPATLLPLPEKEAPHDCLEILAETHGTRPDLTDQPIPDADYTWYTDGSSFLQEGQRRAGAAVTTETEVIWARALPAGTSAQRAELIALTQALKMAEGKKLNVYTDSRYAFATAHVHGEIYRRRGWLTSEGREIKNKNEILALLKALFLPKRLSIIHCPGHQKGNSAEARGNRMADQAAREAAMKAVLETSTLLAGKRTADGSEFEKRTADGSEFESPKKKAKVE

SEQ ID NO: 1048 - skipped

SEQ ID NO: 1049 - protein, 2105 aa, synthetic construct
MPAAKRVKLDGGDKKYSIGLDIGTNSVGWAVITDEYKVPSKKFKVLGNTDRHSIKKNLIGALLFDSGETAEATRLKRTARRRYTRRKNRICYLQEIFSNEMAKVDDSFFHRLEESFLVEEDKKHERHPIFGNIVDEVAYHEKYPTIYHLRKKLVDSTDKADLRLIYLALAHMIKFRGHFLIEGDLNPDNSDVDKLFIQLVQTYNQLFEENPINASGVDAKAILSARLSKSRRLENLIAQLPGEKKNGLFGNLIALSLGLTPNFKSNFDLAEDAKLQLSKDTYDDDLDNLLAQIGDQYADLFLAAKNLSDAILLSDILRVNTEITKAPLSASMIKRYDEHHQDLTLLKALVRQQLPEKYKEIFFDQSKNGYAGYIDGGASQEEFYKFIKPILEKMDGTEELLVKLNREDLLRKQRTFDNGSIPHQIHLGELHAILRRQEDFYPFLKDNREKIEKILTFRIPYYVGPLARGNSRFAWMTRKSEETITPWNFEEVVDKGASAQSFIERMTNFDKNLPNEKVLPKHSLLYEYFTVYNELTKVKYVTEGMRKPAFLSGEQKKAIVDLLFKTNRKVTVKQLKEDYFKKIECFDSVEISGVEDRFNASLGTYHDLLKIIKDKDFLDNEENEDILEDIVLTLTLFEDREMIEERLKTYAHLFDDKVMKQLKRRRYTGWGRLSRKLINGIRDKQSGKTILDFLKSDGFANRNFMQLIHDDSLTFKEDIQKAQVSGQGDSLHEHIANLAGSPAIKKGILQTVKVVDELVKVMGRHKPENIVIEMARENQTTQKGQKNSRERMKRIEEGIKELGSQILKEHPVENTQLQNEKLYLYYLQNGRDMYVDQELDINRLSDYDVDHIVPQSFLKDDSIDNKVLTRSDKARGKSDNVPSEEVVKKMKNYWRQLLNAKLITQRKFDNLTKAERGGLSELDKAGFIKRQLVETRQITKHVAQILDSRMNTKYDENDKLIREVKVITLKSKLVSDFRKDFQFYKVREINNYHHAHDAYLNAVVGTALIKKYPKLESEFVYGDYKVYDVRKMIAKSEQEIGKATAKYFFYSNIMNFFKTEITLANGEIRKRPLIETNGETGEIVWDKGRDFATVRKVLSMPQVNIVKKTEVQTGGFSKESILPKRNSDKLIARKKDWDPKKYGGFDSPTVAYSVLVVAKVEKGKSKKLKSVKELLGITIMERSSFEKNPIDFLEAKGYKEVKKDLIIKLPKYSLFELENGRKRMLASAGELQKGNELALPSKYVNFLYLASHYEKLKGSPEDNEQKQLFVEQHKHYLDEIIEQISEFSKRVILADANLDKVLSAYNKHRDKPIREQAENIIHLFTLTNLGAPAAFKYFDTTIDRKRYTSTKEVLDATLIHQSITGLYETRIDLSQLGGDGGGGGGSGGGGSGGGGSGGGGSGGTLNIEDEYRLHETSKEPDVPLGSTWLSDFPQAWAETGGMGLAVRQAPLIIPLKATSTPVSIKQYPMSQEARLGIKPHIQRLLDQGILVPCQSPWNTPLLPVKKPGTNDYRPVQDLREVNKRVEDIHPTVPNPYNLLSGLPPSHQWYTVLDLKDAFFCLRLHPTSQPLFAFEWRDPEMGISGQLTWTRLPQGFKNSPTLFNEALHRDLADFRIQHPDLILLQYVDDLLLAATSEQDCQRGTRALLQTLGNLGYRASAKKAQICQKQVKYLGYLLKEGQRWLTEARKETVMGQPTPKTPRQLREFLGKAGFCRLFIPGFAEMAAPLYPLTKPGTLFNWGPDQQKAYQEIKQALLTAPALGLPDLTKPFELFVDEKQGYAKGVLTQKLGPWRRPVAYLSKKLDPVAAGWPPCLRMVAAIAVLTKDAGKLTMGQPLVILAPHAVEALVKQPPDRWLSNARMTHYQAMLLDTDRVQFGPVVALNPATLLPLPEKEAPHDCLEILAETHGTRPDLTDQPIPDADYTWYTDGSSFLQEGQRRAGAAVTTETEVIWARALPAGTSAQRAELIALTQALKMAEGKKLNVYTDSRYAFATAHVHGEIYRRRGWLTSEGREIKNKNEILALLKALFLPKRLSIIHCPGHQKGNSAEARGNRMADQAAREAAMKAVLETSTLLAGKRTADGSEFEKRTADGSEFESPKKKAKVE

SEQ ID NO: 1050-1051 - skipped (2 entries)

SEQ ID NO: 1052 - protein, 2115 aa, synthetic construct
MPAAKRVKLDGGDKKYSIGLDIGTNSVGWAVITDEYKVPSKKFKVLGNTDRHSIKKNLIGALLFDSGETAEATRLKRTARRRYTRRKNRICYLQEIFSNEMAKVDDSFFHRLEESFLVEEDKKHERHPIFGNIVDEVAYHEKYPTIYHLRKKLVDSTDKADLRLIYLALAHMIKFRGHFLIEGDLNPDNSDVDKLFIQLVQTYNQLFEENPINASGVDAKAILSARLSKSRRLENLIAQLPGEKKNGLFGNLIALSLGLTPNFKSNFDLAEDAKLQLSKDTYDDDLDNLLAQIGDQYADLFLAAKNLSDAILLSDILRVNTEITKAPLSASMIKRYDEHHQDLTLLKALVRQQLPEKYKEIFFDQSKNGYAGYIDGGASQEEFYKFIKPILEKMDGTEELLVKLNREDLLRKQRTFDNGSIPHQIHLGELHAILRRQEDFYPFLKDNREKIEKILTFRIPYYVGPLARGNSRFAWMTRKSEETITPWNFEEVVDKGASAQSFIERMTNFDKNLPNEKVLPKHSLLYEYFTVYNELTKVKYVTEGMRKPAFLSGEQKKAIVDLLFKTNRKVTVKQLKEDYFKKIECFDSVEISGVEDRFNASLGTYHDLLKIIKDKDFLDNEENEDILEDIVLTLTLFEDREMIEERLKTYAHLFDDKVMKQLKRRRYTGWGRLSRKLINGIRDKQSGKTILDFLKSDGFANRNFMQLIHDDSLTFKEDIQKAQVSGQGDSLHEHIANLAGSPAIKKGILQTVKVVDELVKVMGRHKPENIVIEMARENQTTQKGQKNSRERMKRIEEGIKELGSQILKEHPVENTQLQNEKLYLYYLQNGRDMYVDQELDINRLSDYDVDHIVPQSFLKDDSIDNKVLTRSDKARGKSDNVPSEEVVKKMKNYWRQLLNAKLITQRKFDNLTKAERGGLSELDKAGFIKRQLVETRQITKHVAQILDSRMNTKYDENDKLIREVKVITLKSKLVSDFRKDFQFYKVREINNYHHAHDAYLNAVVGTALIKKYPKLESEFVYGDYKVYDVRKMIAKSEQEIGKATAKYFFYSNIMNFFKTEITLANGEIRKRPLIETNGETGEIVWDKGRDFATVRKVLSMPQVNIVKKTEVQTGGFSKESILPKRNSDKLIARKKDWDPKKYGGFDSPTVAYSVLVVAKVEKGKSKKLKSVKELLGITIMERSSFEKNPIDFLEAKGYKEVKKDLIIKLPKYSLFELENGRKRMLASAGELQKGNELALPSKYVNFLYLASHYEKLKGSPEDNEQKQLFVEQHKHYLDEIIEQISEFSKRVILADANLDKVLSAYNKHRDKPIREQAENIIHLFTLTNLGAPAAFKYFDTTIDRKRYTSTKEVLDATLIHQSITGLYETRIDLSQLGGDGGEAAAKEAAAKEAAAKEAAAKEAAAKEAAAKGGTLNIEDEYRLHETSKEPDVPLGSTWLSDFPQAWAETGGMGLAVRQAPLIIPLKATSTPVSIKQYPMSQEARLGIKPHIQRLLDQGILVPCQSPWNTPLLPVKKPGTNDYRPVQDLREVNKRVEDIHPTVPNPYNLLSGLPPSHQWYTVLDLKDAFFCLRLHPTSQPLFAFEWRDPEMGISGQLTWTRLPQGFKNSPTLFNEALHRDLADFRIQHPDLILLQYVDDLLLAATSEQDCQRGTRALLQTLGNLGYRASAKKAQICQKQVKYLGYLLKEGQRWLTEARKETVMGQPTPKTPRQLREFLGKAGFCRLFIPGFAEMAAPLYPLTKPGTLFNWGPDQQKAYQEIKQALLTAPALGLPDLTKPFELFVDEKQGYAKGVLTQKLGPWRRPVAYLSKKLDPVAAGWPPCLRMVAAIAVLTKDAGKLTMGQPLVILAPHAVEALVKQPPDRWLSNARMTHYQAMLLDTDRVQFGPVVALNPATLLPLPEKEAPHDCLEILAETHGTRPDLTDQPIPDADYTWYTDGSSFLQEGQRRAGAAVTTETEVIWARALPAGTSAQRAELIALTQALKMAEGKKLNVYTDSRYAFATAHVHGEIYRRRGWLTSEGREIKNKNEILALLKALFLPKRLSIIHCPGHQKGNSAEARGNRMADQAAREAAMKAVLETSTLLAGKRTADGSEFEKRTADGSEFESPKKKAKVE

SEQ ID NO: 1053-1055 - skipped (3 entries)

SEQ ID NO: 1056 - protein, 2096 aa, synthetic construct
MPAAKRVKLDGGDKKYSIGLDIGTNSVGWAVITDEYKVPSKKFKVLGNTDRHSIKKNLIGALLFDSGETAEATRLKRTARRRYTRRKNRICYLQEIFSNEMAKVDDSFFHRLEESFLVEEDKKHERHPIFGNIVDEVAYHEKYPTIYHLRKKLVDSTDKADLRLIYLALAHMIKFRGHFLIEGDLNPDNSDVDKLFIQLVQTYNQLFEENPINASGVDAKAILSARLSKSRRLENLIAQLPGEKKNGLFGNLIALSLGLTPNFKSNFDLAEDAKLQLSKDTYDDDLDNLLAQIGDQYADLFLAAKNLSDAILLSDILRVNTEITKAPLSASMIKRYDEHHQDLTLLKALVRQQLPEKYKEIFFDQSKNGYAGYIDGGASQEEFYKFIKPILEKMDGTEELLVKLNREDLLRKQRTFDNGSIPHQIHLGELHAILRRQEDFYPFLKDNREKIEKILTFRIPYYVGPLARGNSRFAWMTRKSEETITPWNFEEVVDKGASAQSFIERMTNFDKNLPNEKVLPKHSLLYEYFTVYNELTKVKYVTEGMRKPAFLSGEQKKAIVDLLFKTNRKVTVKQLKEDYFKKIECFDSVEISGVEDRFNASLGTYHDLLKIIKDKDFLDNEENEDILEDIVLTLTLFEDREMIEERLKTYAHLFDDKVMKQLKRRRYTGWGRLSRKLINGIRDKQSGKTILDFLKSDGFANRNFMQLIHDDSLTFKEDIQKAQVSGQGDSLHEHIANLAGSPAIKKGILQTVKVVDELVKVMGRHKPENIVIEMARENQTTQKGQKNSRERMKRIEEGIKELGSQILKEHPVENTQLQNEKLYLYYLQNGRDMYVDQELDINRLSDYDVDHIVPQSFLKDDSIDNKVLTRSDKARGKSDNVPSEEVVKKMKNYWRQLLNAKLITQRKFDNLTKAERGGLSELDKAGFIKRQLVETRQITKHVAQILDSRMNTKYDENDKLIREVKVITLKSKLVSDFRKDFQFYKVREINNYHHAHDAYLNAVVGTALIKKYPKLESEFVYGDYKVYDVRKMIAKSEQEIGKATAKYFFYSNIMNFFKTEITLANGEIRKRPLIETNGETGEIVWDKGRDFATVRKVLSMPQVNIVKKTEVQTGGFSKESILPKRNSDKLIARKKDWDPKKYGGFDSPTVAYSVLVVAKVEKGKSKKLKSVKELLGITIMERSSFEKNPIDFLEAKGYKEVKKDLIIKLPKYSLFELENGRKRMLASAGELQKGNELALPSKYVNFLYLASHYEKLKGSPEDNEQKQLFVEQHKHYLDEIIEQISEFSKRVILADANLDKVLSAYNKHRDKPIREQAENIIHLFTLTNLGAPAAFKYFDTTIDRKRYTSTKEVLDATLIHQSITGLYETRIDLSQLGGDGGEAAAKGGGGSSGGTLNIEDEYRLHETSKEPDVPLGSTWLSDFPQAWAETGGMGLAVRQAPLIIPLKATSTPVSIKQYPMSQEARLGIKPHIQRLLDQGILVPCQSPWNTPLLPVKKPGTNDYRPVQDLREVNKRVEDIHPTVPNPYNLLSGLPPSHQWYTVLDLKDAFFCLRLHPTSQPLFAFEWRDPEMGISGQLTWTRLPQGFKNSPTLFNEALHRDLADFRIQHPDLILLQYVDDLLLAATSEQDCQRGTRALLQTLGNLGYRASAKKAQICQKQVKYLGYLLKEGQRWLTEARKETVMGQPTPKTPRQLREFLGKAGFCRLFIPGFAEMAAPLYPLTKPGTLFNWGPDQQKAYQEIKQALLTAPALGLPDLTKPFELFVDEKQGYAKGVLTQKLGPWRRPVAYLSKKLDPVAAGWPPCLRMVAAIAVLTKDAGKLTMGQPLVILAPHAVEALVKQPPDRWLSNARMTHYQAMLLDTDRVQFGPVVALNPATLLPLPEKEAPHDCLEILAETHGTRPDLTDQPIPDADYTWYTDGSSFLQEGQRRAGAAVTTETEVIWARALPAGTSAQRAELIALTQALKMAEGKKLNVYTDSRYAFATAHVHGEIYRRRGWLTSEGREIKNKNEILALLKALFLPKRLSIIHCPGHQKGNSAEARGNRMADQAAREAAMKAVLETSTLLAGKRTADGSEFEKRTADGSEFESPKKKAKVE

SEQ ID NO: 1057-1058 - skipped (2 entries)

SEQ ID NO: 1059 - protein, 2096 aa, synthetic construct
MPAAKRVKLDGGDKKYSIGLDIGTNSVGWAVITDEYKVPSKKFKVLGNTDRHSIKKNLIGALLFDSGETAEATRLKRTARRRYTRRKNRICYLQEIFSNEMAKVDDSFFHRLEESFLVEEDKKHERHPIFGNIVDEVAYHEKYPTIYHLRKKLVDSTDKADLRLIYLALAHMIKFRGHFLIEGDLNPDNSDVDKLFIQLVQTYNQLFEENPINASGVDAKAILSARLSKSRRLENLIAQLPGEKKNGLFGNLIALSLGLTPNFKSNFDLAEDAKLQLSKDTYDDDLDNLLAQIGDQYADLFLAAKNLSDAILLSDILRVNTEITKAPLSASMIKRYDEHHQDLTLLKALVRQQLPEKYKEIFFDQSKNGYAGYIDGGASQEEFYKFIKPILEKMDGTEELLVKLNREDLLRKQRTFDNGSIPHQIHLGELHAILRRQEDFYPFLKDNREKIEKILTFRIPYYVGPLARGNSRFAWMTRKSEETITPWNFEEVVDKGASAQSFIERMTNFDKNLPNEKVLPKHSLLYEYFTVYNELTKVKYVTEGMRKPAFLSGEQKKAIVDLLFKTNRKVTVKQLKEDYFKKIECFDSVEISGVEDRFNASLGTYHDLLKIIKDKDFLDNEENEDILEDIVLTLTLFEDREMIEERLKTYAHLFDDKVMKQLKRRRYTGWGRLSRKLINGIRDKQSGKTILDFLKSDGFANRNFMQLIHDDSLTFKEDIQKAQVSGQGDSLHEHIANLAGSPAIKKGILQTVKVVDELVKVMGRHKPENIVIEMARENQTTQKGQKNSRERMKRIEEGIKELGSQILKEHPVENTQLQNEKLYLYYLQNGRDMYVDQELDINRLSDYDVDHIVPQSFLKDDSIDNKVLTRSDKARGKSDNVPSEEVVKKMKNYWRQLLNAKLITQRKFDNLTKAERGGLSELDKAGFIKRQLVETRQITKHVAQILDSRMNTKYDENDKLIREVKVITLKSKLVSDFRKDFQFYKVREINNYHHAHDAYLNAVVGTALIKKYPKLESEFVYGDYKVYDVRKMIAKSEQEIGKATAKYFFYSNIMNFFKTEITLANGEIRKRPLIETNGETGEIVWDKGRDFATVRKVLSMPQVNIVKKTEVQTGGFSKESILPKRNSDKLIARKKDWDPKKYGGFDSPTVAYSVLVVAKVEKGKSKKLKSVKELLGITIMERSSFEKNPIDFLEAKGYKEVKKDLIIKLPKYSLFELENGRKRMLASAGELQKGNELALPSKYVNFLYLASHYEKLKGSPEDNEQKQLFVEQHKHYLDEIIEQISEFSKRVILADANLDKVLSAYNKHRDKPIREQAENIIHLFTLTNLGAPAAFKYFDTTIDRKRYTSTKEVLDATLIHQSITGLYETRIDLSQLGGDGGGGSGSSEAAAKGGTLNIEDEYRLHETSKEPDVPLGSTWLSDFPQAWAETGGMGLAVRQAPLIIPLKATSTPVSIKQYPMSQEARLGIKPHIQRLLDQGILVPCQSPWNTPLLPVKKPGTNDYRPVQDLREVNKRVEDIHPTVPNPYNLLSGLPPSHQWYTVLDLKDAFFCLRLHPTSQPLFAFEWRDPEMGISGQLTWTRLPQGFKNSPTLFNEALHRDLADFRIQHPDLILLQYVDDLLLAATSEQDCQRGTRALLQTLGNLGYRASAKKAQICQKQVKYLGYLLKEGQRWLTEARKETVMGQPTPKTPRQLREFLGKAGFCRLFIPGFAEMAAPLYPLTKPGTLFNWGPDQQKAYQEIKQALLTAPALGLPDLTKPFELFVDEKQGYAKGVLTQKLGPWRRPVAYLSKKLDPVAAGWPPCLRMVAAIAVLTKDAGKLTMGQPLVILAPHAVEALVKQPPDRWLSNARMTHYQAMLLDTDRVQFGPVVALNPATLLPLPEKEAPHDCLEILAETHGTRPDLTDQPIPDADYTWYTDGSSFLQEGQRRAGAAVTTETEVIWARALPAGTSAQRAELIALTQALKMAEGKKLNVYTDSRYAFATAHVHGEIYRRRGWLTSEGREIKNKNEILALLKALFLPKRLSIIHCPGHQKGNSAEARGNRMADQAAREAAMKAVLETSTLLAGKRTADGSEFEKRTADGSEFESPKKKAKVE

SEQ ID NO: 1060 - protein, 2096 aa, synthetic construct
MPAAKRVKLDGGDKKYSIGLDIGTNSVGWAVITDEYKVPSKKFKVLGNTDRHSIKKNLIGALLFDSGETAEATRLKRTARRRYTRRKNRICYLQEIFSNEMAKVDDSFFHRLEESFLVEEDKKHERHPIFGNIVDEVAYHEKYPTIYHLRKKLVDSTDKADLRLIYLALAHMIKFRGHFLIEGDLNPDNSDVDKLFIQLVQTYNQLFEENPINASGVDAKAILSARLSKSRRLENLIAQLPGEKKNGLFGNLIALSLGLTPNFKSNFDLAEDAKLQLSKDTYDDDLDNLLAQIGDQYADLFLAAKNLSDAILLSDILRVNTEITKAPLSASMIKRYDEHHQDLTLLKALVRQQLPEKYKEIFFDQSKNGYAGYIDGGASQEEFYKFIKPILEKMDGTEELLVKLNREDLLRKQRTFDNGSIPHQIHLGELHAILRRQEDFYPFLKDNREKIEKILTFRIPYYVGPLARGNSRFAWMTRKSEETITPWNFEEVVDKGASAQSFIERMTNFDKNLPNEKVLPKHSLLYEYFTVYNELTKVKYVTEGMRKPAFLSGEQKKAIVDLLFKTNRKVTVKQLKEDYFKKIECFDSVEISGVEDRFNASLGTYHDLLKIIKDKDFLDNEENEDILEDIVLTLTLFEDREMIEERLKTYAHLFDDKVMKQLKRRRYTGWGRLSRKLINGIRDKQSGKTILDFLKSDGFANRNFMQLIHDDSLTFKEDIQKAQVSGQGDSLHEHIANLAGSPAIKKGILQTVKVVDELVKVMGRHKPENIVIEMARENQTTQKGQKNSRERMKRIEEGIKELGSQILKEHPVENTQLQNEKLYLYYLQNGRDMYVDQELDINRLSDYDVDHIVPQSFLKDDSIDNKVLTRSDKARGKSDNVPSEEVVKKMKNYWRQLLNAKLITQRKFDNLTKAERGGLSELDKAGFIKRQLVETRQITKHVAQILDSRMNTKYDENDKLIREVKVITLKSKLVSDFRKDFQFYKVREINNYHHAHDAYLNAVVGTALIKKYPKLESEFVYGDYKVYDVRKMIAKSEQEIGKATAKYFFYSNIMNFFKTEITLANGEIRKRPLIETNGETGEIVWDKGRDFATVRKVLSMPQVNIVKKTEVQTGGFSKESILPKRNSDKLIARKKDWDPKKYGGFDSPTVAYSVLVVAKVEKGKSKKLKSVKELLGITIMERSSFEKNPIDFLEAKGYKEVKKDLIIKLPKYSLFELENGRKRMLASAGELQKGNELALPSKYVNFLYLASHYEKLKGSPEDNEQKQLFVEQHKHYLDEIIEQISEFSKRVILADANLDKVLSAYNKHRDKPIREQAENIIHLFTLTNLGAPAAFKYFDTTIDRKRYTSTKEVLDATLIHQSITGLYETRIDLSQLGGDGGGSSGGSEAAAKGGTLNIEDEYRLHETSKEPDVPLGSTWLSDFPQAWAETGGMGLAVRQAPLIIPLKATSTPVSIKQYPMSQEARLGIKPHIQRLLDQGILVPCQSPWNTPLLPVKKPGTNDYRPVQDLREVNKRVEDIHPTVPNPYNLLSGLPPSHQWYTVLDLKDAFFCLRLHPTSQPLFAFEWRDPEMGISGQLTWTRLPQGFKNSPTLFNEALHRDLADFRIQHPDLILLQYVDDLLLAATSEQDCQRGTRALLQTLGNLGYRASAKKAQICQKQVKYLGYLLKEGQRWLTEARKETVMGQPTPKTPRQLREFLGKAGFCRLFIPGFAEMAAPLYPLTKPGTLFNWGPDQQKAYQEIKQALLTAPALGLPDLTKPFELFVDEKQGYAKGVLTQKLGPWRRPVAYLSKKLDPVAAGWPPCLRMVAAIAVLTKDAGKLTMGQPLVILAPHAVEALVKQPPDRWLSNARMTHYQAMLLDTDRVQFGPVVALNPATLLPLPEKEAPHDCLEILAETHGTRPDLTDQPIPDADYTWYTDGSSFLQEGQRRAGAAVTTETEVIWARALPAGTSAQRAELIALTQALKMAEGKKLNVYTDSRYAFATAHVHGEIYRRRGWLTSEGREIKNKNEILALLKALFLPKRLSIIHCPGHQKGNSAEARGNRMADQAAREAAMKAVLETSTLLAGKRTADGSEFEKRTADGSEFESPKKKAKVE

SEQ ID NO: 1061 - protein, 2094 aa, synthetic construct
MPAAKRVKLDGGDKKYSIGLDIGTNSVGWAVITDEYKVPSKKFKVLGNTDRHSIKKNLIGALLFDSGETAEATRLKRTARRRYTRRKNRICYLQEIFSNEMAKVDDSFFHRLEESFLVEEDKKHERHPIFGNIVDEVAYHEKYPTIYHLRKKLVDSTDKADLRLIYLALAHMIKFRGHFLIEGDLNPDNSDVDKLFIQLVQTYNQLFEENPINASGVDAKAILSARLSKSRRLENLIAQLPGEKKNGLFGNLIALSLGLTPNFKSNFDLAEDAKLQLSKDTYDDDLDNLLAQIGDQYADLFLAAKNLSDAILLSDILRVNTEITKAPLSASMIKRYDEHHQDLTLLKALVRQQLPEKYKEIFFDQSKNGYAGYIDGGASQEEFYKFIKPILEKMDGTEELLVKLNREDLLRKQRTFDNGSIPHQIHLGELHAILRRQEDFYPFLKDNREKIEKILTFRIPYYVGPLARGNSRFAWMTRKSEETITPWNFEEVVDKGASAQSFIERMTNFDKNLPNEKVLPKHSLLYEYFTVYNELTKVKYVTEGMRKPAFLSGEQKKAIVDLLFKTNRKVTVKQLKEDYFKKIECFDSVEISGVEDRFNASLGTYHDLLKIIKDKDFLDNEENEDILEDIVLTLTLFEDREMIEERLKTYAHLFDDKVMKQLKRRRYTGWGRLSRKLINGIRDKQSGKTILDFLKSDGFANRNFMQLIHDDSLTFKEDIQKAQVSGQGDSLHEHIANLAGSPAIKKGILQTVKVVDELVKVMGRHKPENIVIEMARENQTTQKGQKNSRERMKRIEEGIKELGSQILKEHPVENTQLQNEKLYLYYLQNGRDMYVDQELDINRLSDYDVDHIVPQSFLKDDSIDNKVLTRSDKARGKSDNVPSEEVVKKMKNYWRQLLNAKLITQRKFDNLTKAERGGLSELDKAGFIKRQLVETRQITKHVAQILDSRMNTKYDENDKLIREVKVITLKSKLVSDFRKDFQFYKVREINNYHHAHDAYLNAVVGTALIKKYPKLESEFVYGDYKVYDVRKMIAKSEQEIGKATAKYFFYSNIMNFFKTEITLANGEIRKRPLIETNGETGEIVWDKGRDFATVRKVLSMPQVNIVKKTEVQTGGFSKESILPKRNSDKLIARKKDWDPKKYGGFDSPTVAYSVLVVAKVEKGKSKKLKSVKELLGITIMERSSFEKNPIDFLEAKGYKEVKKDLIIKLPKYSLFELENGRKRMLASAGELQKGNELALPSKYVNFLYLASHYEKLKGSPEDNEQKQLFVEQHKHYLDEIIEQISEFSKRVILADANLDKVLSAYNKHRDKPIREQAENIIHLFTLTNLGAPAAFKYFDTTIDRKRYTSTKEVLDATLIHQSITGLYETRIDLSQLGGDGGGSSGGSPAPGGTLNIEDEYRLHETSKEPDVPLGSTWLSDFPQAWAETGGMGLAVRQAPLIIPLKATSTPVSIKQYPMSQEARLGIKPHIQRLLDQGILVPCQSPWNTPLLPVKKPGTNDYRPVQDLREVNKRVEDIHPTVPNPYNLLSGLPPSHQWYTVLDLKDAFFCLRLHPTSQPLFAFEWRDPEMGISGQLTWTRLPQGFKNSPTLFNEALHRDLADFRIQHPDLILLQYVDDLLLAATSEQDCQRGTRALLQTLGNLGYRASAKKAQICQKQVKYLGYLLKEGQRWLTEARKETVMGQPTPKTPRQLREFLGKAGFCRLFIPGFAEMAAPLYPLTKPGTLFNWGPDQQKAYQEIKQALLTAPALGLPDLTKPFELFVDEKQGYAKGVLTQKLGPWRRPVAYLSKKLDPVAAGWPPCLRMVAAIAVLTKDAGKLTMGQPLVILAPHAVEALVKQPPDRWLSNARMTHYQAMLLDTDRVQFGPVVALNPATLLPLPEKEAPHDCLEILAETHGTRPDLTDQPIPDADYTWYTDGSSFLQEGQRRAGAAVTTETEVIWARALPAGTSAQRAELIALTQALKMAEGKKLNVYTDSRYAFATAHVHGEIYRRRGWLTSEGREIKNKNEILALLKALFLPKRLSIIHCPGHQKGNSAEARGNRMADQAAREAAMKAVLETSTLLAGKRTADGSEFEKRTADGSEFESPKKKAKVE

SEQ ID NO: 1062-1075 - skipped (14 entries)

SEQ ID NO: 1076 - protein, 2096 aa, synthetic construct
MPAAKRVKLDGGDKKYSIGLDIGTNSVGWAVITDEYKVPSKKFKVLGNTDRHSIKKNLIGALLFDSGETAEATRLKRTARRRYTRRKNRICYLQEIFSNEMAKVDDSFFHRLEESFLVEEDKKHERHPIFGNIVDEVAYHEKYPTIYHLRKKLVDSTDKADLRLIYLALAHMIKFRGHFLIEGDLNPDNSDVDKLFIQLVQTYNQLFEENPINASGVDAKAILSARLSKSRRLENLIAQLPGEKKNGLFGNLIALSLGLTPNFKSNFDLAEDAKLQLSKDTYDDDLDNLLAQIGDQYADLFLAAKNLSDAILLSDILRVNTEITKAPLSASMIKRYDEHHQDLTLLKALVRQQLPEKYKEIFFDQSKNGYAGYIDGGASQEEFYKFIKPILEKMDGTEELLVKLNREDLLRKQRTFDNGSIPHQIHLGELHAILRRQEDFYPFLKDNREKIEKILTFRIPYYVGPLARGNSRFAWMTRKSEETITPWNFEEVVDKGASAQSFIERMTNFDKNLPNEKVLPKHSLLYEYFTVYNELTKVKYVTEGMRKPAFLSGEQKKAIVDLLFKTNRKVTVKQLKEDYFKKIECFDSVEISGVEDRFNASLGTYHDLLKIIKDKDFLDNEENEDILEDIVLTLTLFEDREMIEERLKTYAHLFDDKVMKQLKRRRYTGWGRLSRKLINGIRDKQSGKTILDFLKSDGFANRNFMQLIHDDSLTFKEDIQKAQVSGQGDSLHEHIANLAGSPAIKKGILQTVKVVDELVKVMGRHKPENIVIEMARENQTTQKGQKNSRERMKRIEEGIKELGSQILKEHPVENTQLQNEKLYLYYLQNGRDMYVDQELDINRLSDYDVDHIVPQSFLKDDSIDNKVLTRSDKARGKSDNVPSEEVVKKMKNYWRQLLNAKLITQRKFDNLTKAERGGLSELDKAGFIKRQLVETRQITKHVAQILDSRMNTKYDENDKLIREVKVITLKSKLVSDFRKDFQFYKVREINNYHHAHDAYLNAVVGTALIKKYPKLESEFVYGDYKVYDVRKMIAKSEQEIGKATAKYFFYSNIMNFFKTEITLANGEIRKRPLIETNGETGEIVWDKGRDFATVRKVLSMPQVNIVKKTEVQTGGFSKESILPKRNSDKLIARKKDWDPKKYGGFDSPTVAYSVLVVAKVEKGKSKKLKSVKELLGITIMERSSFEKNPIDFLEAKGYKEVKKDLIIKLPKYSLFELENGRKRMLASAGELQKGNELALPSKYVNFLYLASHYEKLKGSPEDNEQKQLFVEQHKHYLDEIIEQISEFSKRVILADANLDKVLSAYNKHRDKPIREQAENIIHLFTLTNLGAPAAFKYFDTTIDRKRYTSTKEVLDATLIHQSITGLYETRIDLSQLGGDGGGGGPAPEAAAKGGTLNIEDEYRLHETSKEPDVPLGSTWLSDFPQAWAETGGMGLAVRQAPLIIPLKATSTPVSIKQYPMSQEARLGIKPHIQRLLDQGILVPCQSPWNTPLLPVKKPGTNDYRPVQDLREVNKRVEDIHPTVPNPYNLLSGLPPSHQWYTVLDLKDAFFCLRLHPTSQPLFAFEWRDPEMGISGQLTWTRLPQGFKNSPTLFNEALHRDLADFRIQHPDLILLQYVDDLLLAATSEQDCQRGTRALLQTLGNLGYRASAKKAQICQKQVKYLGYLLKEGQRWLTEARKETVMGQPTPKTPRQLREFLGKAGFCRLFIPGFAEMAAPLYPLTKPGTLFNWGPDQQKAYQEIKQALLTAPALGLPDLTKPFELFVDEKQGYAKGVLTQKLGPWRRPVAYLSKKLDPVAAGWPPCLRMVAAIAVLTKDAGKLTMGQPLVILAPHAVEALVKQPPDRWLSNARMTHYQAMLLDTDRVQFGPVVALNPATLLPLPEKEAPHDCLEILAETHGTRPDLTDQPIPDADYTWYTDGSSFLQEGQRRAGAAVTTETEVIWARALPAGTSAQRAELIALTQALKMAEGKKLNVYTDSRYAFATAHVHGEIYRRRGWLTSEGREIKNKNEILALLKALFLPKRLSIIHCPGHQKGNSAEARGNRMADQAAREAAMKAVLETSTLLAGKRTADGSEFEKRTADGSEFESPKKKAKVE

SEQ ID NO: 1077-1082 - skipped (6 entries)

SEQ ID NO: 1083 - protein, 2093 aa, synthetic construct
MPAAKRVKLDGGDKKYSIGLDIGTNSVGWAVITDEYKVPSKKFKVLGNTDRHSIKKNLIGALLFDSGETAEATRLKRTARRRYTRRKNRICYLQEIFSNEMAKVDDSFFHRLEESFLVEEDKKHERHPIFGNIVDEVAYHEKYPTIYHLRKKLVDSTDKADLRLIYLALAHMIKFRGHFLIEGDLNPDNSDVDKLFIQLVQTYNQLFEENPINASGVDAKAILSARLSKSRRLENLIAQLPGEKKNGLFGNLIALSLGLTPNFKSNFDLAEDAKLQLSKDTYDDDLDNLLAQIGDQYADLFLAAKNLSDAILLSDILRVNTEITKAPLSASMIKRYDEHHQDLTLLKALVRQQLPEKYKEIFFDQSKNGYAGYIDGGASQEEFYKFIKPILEKMDGTEELLVKLNREDLLRKQRTFDNGSIPHQIHLGELHAILRRQEDFYPFLKDNREKIEKILTFRIPYYVGPLARGNSRFAWMTRKSEETITPWNFEEVVDKGASAQSFIERMTNFDKNLPNEKVLPKHSLLYEYFTVYNELTKVKYVTEGMRKPAFLSGEQKKAIVDLLFKTNRKVTVKQLKEDYFKKIECFDSVEISGVEDRFNASLGTYHDLLKIIKDKDFLDNEENEDILEDIVLTLTLFEDREMIEERLKTYAHLFDDKVMKQLKRRRYTGWGRLSRKLINGIRDKQSGKTILDFLKSDGFANRNFMQLIHDDSLTFKEDIQKAQVSGQGDSLHEHIANLAGSPAIKKGILQTVKVVDELVKVMGRHKPENIVIEMARENQTTQKGQKNSRERMKRIEEGIKELGSQILKEHPVENTQLQNEKLYLYYLQNGRDMYVDQELDINRLSDYDVDHIVPQSFLKDDSIDNKVLTRSDKARGKSDNVPSEEVVKKMKNYWRQLLNAKLITQRKFDNLTKAERGGLSELDKAGFIKRQLVETRQITKHVAQILDSRMNTKYDENDKLIREVKVITLKSKLVSDFRKDFQFYKVREINNYHHAHDAYLNAVVGTALIKKYPKLESEFVYGDYKVYDVRKMIAKSEQEIGKATAKYFFYSNIMNFFKTEITLANGEIRKRPLIETNGETGEIVWDKGRDFATVRKVLSMPQVNIVKKTEVQTGGFSKESILPKRNSDKLIARKKDWDPKKYGGFDSPTVAYSVLVVAKVEKGKSKKLKSVKELLGITIMERSSFEKNPIDFLEAKGYKEVKKDLIIKLPKYSLFELENGRKRMLASAGELQKGNELALPSKYVNFLYLASHYEKLKGSPEDNEQKQLFVEQHKHYLDEIIEQISEFSKRVILADANLDKVLSAYNKHRDKPIREQAENIIHLFTLTNLGAPAAFKYFDTTIDRKRYTSTKEVLDATLIHQSITGLYETRIDLSQLGGDGGGGSEAAAKGGTLNIEDEYRLHETSKEPDVPLGSTWLSDFPQAWAETGGMGLAVRQAPLIIPLKATSTPVSIKQYPMSQEARLGIKPHIQRLLDQGILVPCQSPWNTPLLPVKKPGTNDYRPVQDLREVNKRVEDIHPTVPNPYNLLSGLPPSHQWYTVLDLKDAFFCLRLHPTSQPLFAFEWRDPEMGISGQLTWTRLPQGFKNSPTLFNEALHRDLADFRIQHPDLILLQYVDDLLLAATSEQDCQRGTRALLQTLGNLGYRASAKKAQICQKQVKYLGYLLKEGQRWLTEARKETVMGQPTPKTPRQLREFLGKAGFCRLFIPGFAEMAAPLYPLTKPGTLFNWGPDQQKAYQEIKQALLTAPALGLPDLTKPFELFVDEKQGYAKGVLTQKLGPWRRPVAYLSKKLDPVAAGWPPCLRMVAAIAVLTKDAGKLTMGQPLVILAPHAVEALVKQPPDRWLSNARMTHYQAMLLDTDRVQFGPVVALNPATLLPLPEKEAPHDCLEILAETHGTRPDLTDQPIPDADYTWYTDGSSFLQEGQRRAGAAVTTETEVIWARALPAGTSAQRAELIALTQALKMAEGKKLNVYTDSRYAFATAHVHGEIYRRRGWLTSEGREIKNKNEILALLKALFLPKRLSIIHCPGHQKGNSAEARGNRMADQAAREAAMKAVLETSTLLAGKRTADGSEFEKRTADGSEFESPKKKAKVE

SEQ ID NO: 1084-1092 - skipped (9 entries)

SEQ ID NO: 1093 - protein, 2122 aa, synthetic construct
MPAAKRVKLDGGDKKYSIGLDIGTNSVGWAVITDEYKVPSKKFKVLGNTDRHSIKKNLIGALLFDSGETAEATRLKRTARRRYTRRKNRICYLQEIFSNEMAKVDDSFFHRLEESFLVEEDKKHERHPIFGNIVDEVAYHEKYPTIYHLRKKLVDSTDKADLRLIYLALAHMIKFRGHFLIEGDLNPDNSDVDKLFIQLVQTYNQLFEENPINASGVDAKAILSARLSKSRRLENLIAQLPGEKKNGLFGNLIALSLGLTPNFKSNFDLAEDAKLQLSKDTYDDDLDNLLAQIGDQYADLFLAAKNLSDAILLSDILRVNTEITKAPLSASMIKRYDEHHQDLTLLKALVRQQLPEKYKEIFFDQSKNGYAGYIDGGASQEEFYKFIKPILEKMDGTEELLVKLNREDLLRKQRTFDNGSIPHQIHLGELHAILRRQEDFYPFLKDNREKIEKILTFRIPYYVGPLARGNSRFAWMTRKSEETITPWNFEEVVDKGASAQSFIERMTNFDKNLPNEKVLPKHSLLYEYFTVYNELTKVKYVTEGMRKPAFLSGEQKKAIVDLLFKTNRKVTVKQLKEDYFKKIECFDSVEISGVEDRFNASLGTYHDLLKIIKDKDFLDNEENEDILEDIVLTLTLFEDREMIEERLKTYAHLFDDKVMKQLKRRRYTGWGRLSRKLINGIRDKQSGKTILDFLKSDGFANRNFMQLIHDDSLTFKEDIQKAQVSGQGDSLHEHIANLAGSPAIKKGILQTVKVVDELVKVMGRHKPENIVIEMARENQTTQKGQKNSRERMKRIEEGIKELGSQILKEHPVENTQLQNEKLYLYYLQNGRDMYVDQELDINRLSDYDVDHIVPQSFLKDDSIDNKVLTRSDKARGKSDNVPSEEVVKKMKNYWRQLLNAKLITQRKFDNLTKAERGGLSELDKAGFIKRQLVETRQITKHVAQILDSRMNTKYDENDKLIREVKVITLKSKLVSDFRKDFQFYKVREINNYHHAHDAYLNAVVGTALIKKYPKLESEFVYGDYKVYDVRKMIAKSEQEIGKATAKYFFYSNIMNFFKTEITLANGEIRKRPLIETNGETGEIVWDKGRDFATVRKVLSMPQVNIVKKTEVQTGGFSKESILPKRNSDKLIARKKDWDPKKYGGFDSPTVAYSVLVVAKVEKGKSKKLKSVKELLGITIMERSSFEKNPIDFLEAKGYKEVKKDLIIKLPKYSLFELENGRKRMLASAGELQKGNELALPSKYVNFLYLASHYEKLKGSPEDNEQKQLFVEQHKHYLDEIIEQISEFSKRVILADANLDKVLSAYNKHRDKPIREQAENIIHLFTLTNLGAPAAFKYFDTTIDRKRYTSTKEVLDATLIHQSITGLYETRIDLSQLGGDGGAEAAAKEAAAKEAAAKEAAAKALEAEAAAKEAAAKEAAAKEAAAKAGGVPWILKKPLELTIKLDLEEQQGTLLNNSILSKKGKEELKQLFEKYSALWQSWENQVGHRRIRPHKIATGTVKPTPQKQYHINPKAKPDIQIVINDLLKQGVLIQKESTMNTPVYPVPKPNGRWRMVLDYRAVNKVTPLIAVQNQHSYGILGSLFKGRYKTTIDLSNGFWAHPIVPEDYWITAFTWQGKQYCWTVLPQGFLNSPGLFNGDVVDLLQGIPNVEVYVDDVYISHDSEKEHLEYLDILFNRLKEAGYIISLKKSNIANSIVDFLGFQITNEGRGLTDTFKEKLENITAPTTLKQLQSILGLLNFARNFIPDFTELIAPLYALIPKSPKNYVPWQIEHSTTLETLITKLNGAEYLQGRKGDKTLIMKVNASYTTGYIRYYNEGEKKPISYVSIVFSKTELKFTELEKLLTTVHKGLLKALDLSMGQNIHVYSPIVSMQNIQKTPQTAKKALASRWLSWLSYLEDPRIRFFYDPQMPALKDLPAVDTGKDNKKHPSNFQHIFYTDGSAITSPTKEGHLNAGMGIVYFINKDGNLQKQQEWSISLGNHTAQFAEIAAFEFALKKCLPLGGNILVVTDSNYVAKAYNEELDVWASNGFVNNRKKPLKHISKWKSVADLKRLRPDVVVTHEPGHQKLDSSPHAYGNNLADQLATQASFKVHAGKRTADGSEFEKRTADGSEFESPKKKAKVE

SEQ ID NO: 1094-1100 - skipped (7 entries)

SEQ ID NO: 1101 - protein, 45 aa, synthetic construct
TTTPAPRPPTPAPTIASQPLSLRPEACRPAAGGAVHTRGLDFACD

SEQ ID NO: 1102 - protein, 24 aa, synthetic construct
IYIWAPLAGTCGVLLLSLVITLYC

SEQ ID NO: 1103 - protein, 41 aa, synthetic construct
RSKRSRLLHSDYMNMTPRRPGPTRKHYQPYAPPRDFAAYRS

SEQ ID NO: 1104 - protein, 112 aa, synthetic construct
RVKFSRSADAPAYQQGQNQLYNELNLGRREEYDVLDKRRGRDPEMGGKPRRKNPQEGLYNELQKDKMAEAYSEIGMKGERRRGKGHDGLYQGLSTATKDTYDALHMQALPPR

SEQ ID NO: 1105-1114 - skipped (10 entries)

SEQ ID NO: 1115 - protein, 2208 aa, synthetic construct
MPAAKRVKLDGGDKKYSIGLDIGTNSVGWAVITDEYKVPSKKFKVLGNTDRHSIKKNLIGALLFDSGETAEATRLKRTARRRYTRRKNRICYLQEIFSNEMAKVDDSFFHRLEESFLVEEDKKHERHPIFGNIVDEVAYHEKYPTIYHLRKKLVDSTDKADLRLIYLALAHMIKFRGHFLIEGDLNPDNSDVDKLFIQLVQTYNQLFEENPINASGVDAKAILSARLSKSRRLENLIAQLPGEKKNGLFGNLIALSLGLTPNFKSNFDLAEDAKLQLSKDTYDDDLDNLLAQIGDQYADLFLAAKNLSDAILLSDILRVNTEITKAPLSASMIKRYDEHHQDLTLLKALVRQQLPEKYKEIFFDQSKNGYAGYIDGGASQEEFYKFIKPILEKMDGTEELLVKLNREDLLRKQRTFDNGSIPHQIHLGELHAILRRQEDFYPFLKDNREKIEKILTFRIPYYVGPLARGNSRFAWMTRKSEETITPWNFEEVVDKGASAQSFIERMTNFDKNLPNEKVLPKHSLLYEYFTVYNELTKVKYVTEGMRKPAFLSGEQKKAIVDLLFKTNRKVTVKQLKEDYFKKIECFDSVEISGVEDRFNASLGTYHDLLKIIKDKDFLDNEENEDILEDIVLTLTLFEDREMIEERLKTYAHLFDDKVMKQLKRRRYTGWGRLSRKLINGIRDKQSGKTILDFLKSDGFANRNFMQLIHDDSLTFKEDIQKAQVSGQGDSLHEHIANLAGSPAIKKGILQTVKVVDELVKVMGRHKPENIVIEMARENQTTQKGQKNSRERMKRIEEGIKELGSQILKEHPVENTQLQNEKLYLYYLQNGRDMYVDQELDINRLSDYDVDHIVPQSFLKDDSIDNKVLTRSDKARGKSDNVPSEEVVKKMKNYWRQLLNAKLITQRKFDNLTKAERGGLSELDKAGFIKRQLVETRQITKHVAQILDSRMNTKYDENDKLIREVKVITLKSKLVSDFRKDFQFYKVREINNYHHAHDAYLNAVVGTALIKKYPKLESEFVYGDYKVYDVRKMIAKSEQEIGKATAKYFFYSNIMNFFKTEITLANGEIRKRPLIETNGETGEIVWDKGRDFATVRKVLSMPQVNIVKKTEVQTGGFSKESILPKRNSDKLIARKKDWDPKKYGGFDSPTVAYSVLVVAKVEKGKSKKLKSVKELLGITIMERSSFEKNPIDFLEAKGYKEVKKDLIIKLPKYSLFELENGRKRMLASAGELQKGNELALPSKYVNFLYLASHYEKLKGSPEDNEQKQLFVEQHKHYLDEIIEQISEFSKRVILADANLDKVLSAYNKHRDKPIREQAENIIHLFTLTNLGAPAAFKYFDTTIDRKRYTSTKEVLDATLIHQSITGLYETRIDLSQLGGDGGAEAAAKEAAAKEAAAKEAAAKALEAEAAAKEAAAKEAAAKEAAAKAGGMDLLKPLTVERKGVKIKGYWNSQADITCVPKDLLQGEEPVRQQNVTTIHGTQEGDVYYVNLKIDGRRINTEVIGTTLDYAIITPGDVPWILKKPLELTIKLDLEEQQGTLLNNSILSKKGKEELKQLFEKYSALWQSWENQVGHRRIRPHKIATGTVKPTPQKQYHINPKAKPDIQIVINDLLKQGVLIQKESTMNTPVYPVPKPNGRWRMVLDYRAVNKVTPLIAVQNQHSYGILGSLFKGRYKTTIDLSNGFWAHPIVPEDYWITAFTWQGKQYCWTVLPQGFLNSPGLFNGDVVDLLQGIPNVEVYVDDVYISHDSEKEHLEYLDILFNRLKEAGYIISLKKSNIANSIVDFLGFQITNEGRGLTDTFKEKLENITAPTTLKQLQSILGLLNFARNFIPDFTELIAPLYALIPKSPKNYVPWQIEHSTTLETLITKLNGAEYLQGRKGDKTLIMKVNASYTTGYIRYYNEGEKKPISYVSIVFSKTELKFTELEKLLTTVHKGLLKALDLSMGQNIHVYSPIVSMQNIQKTPQTAKKALASRWLSWLSYLEDPRIRFFYDPQMPALKDLPAVDTGKDNKKHPSNFQHIFYTDGSAITSPTKEGHLNAGMGIVYFINKDGNLQKQQEWSISLGNHTAQFAEIAAFEFALKKCLPLGGNILVVTDSNYVAKAYNEELDVWASNGFVNNRKKPLKHISKWKSVADLKRLRPDVVVTHEPGHQKLDSSPHAYGNNLADQLATQASFKVHAGKRTADGSEFEKRTADGSEFESPKKKAKVE

SEQ ID NO: 1116-1136 - skipped (21 entries)

SEQ ID NO: 1137 - protein, 2107 aa, synthetic construct
MPAAKRVKLDGGDKKYSIGLDIGTNSVGWAVITDEYKVPSKKFKVLGNTDRHSIKKNLIGALLFDSGETAEATRLKRTARRRYTRRKNRICYLQEIFSNEMAKVDDSFFHRLEESFLVEEDKKHERHPIFGNIVDEVAYHEKYPTIYHLRKKLVDSTDKADLRLIYLALAHMIKFRGHFLIEGDLNPDNSDVDKLFIQLVQTYNQLFEENPINASGVDAKAILSARLSKSRRLENLIAQLPGEKKNGLFGNLIALSLGLTPNFKSNFDLAEDAKLQLSKDTYDDDLDNLLAQIGDQYADLFLAAKNLSDAILLSDILRVNTEITKAPLSASMIKRYDEHHQDLTLLKALVRQQLPEKYKEIFFDQSKNGYAGYIDGGASQEEFYKFIKPILEKMDGTEELLVKLNREDLLRKQRTFDNGSIPHQIHLGELHAILRRQEDFYPFLKDNREKIEKILTFRIPYYVGPLARGNSRFAWMTRKSEETITPWNFEEVVDKGASAQSFIERMTNFDKNLPNEKVLPKHSLLYEYFTVYNELTKVKYVTEGMRKPAFLSGEQKKAIVDLLFKTNRKVTVKQLKEDYFKKIECFDSVEISGVEDRFNASLGTYHDLLKIIKDKDFLDNEENEDILEDIVLTLTLFEDREMIEERLKTYAHLFDDKVMKQLKRRRYTGWGRLSRKLINGIRDKQSGKTILDFLKSDGFANRNFMQLIHDDSLTFKEDIQKAQVSGQGDSLHEHIANLAGSPAIKKGILQTVKVVDELVKVMGRHKPENIVIEMARENQTTQKGQKNSRERMKRIEEGIKELGSQILKEHPVENTQLQNEKLYLYYLQNGRDMYVDQELDINRLSDYDVDHIVPQSFLKDDSIDNKVLTRSDKARGKSDNVPSEEVVKKMKNYWRQLLNAKLITQRKFDNLTKAERGGLSELDKAGFIKRQLVETRQITKHVAQILDSRMNTKYDENDKLIREVKVITLKSKLVSDFRKDFQFYKVREINNYHHAHDAYLNAVVGTALIKKYPKLESEFVYGDYKVYDVRKMIAKSEQEIGKATAKYFFYSNIMNFFKTEITLANGEIRKRPLIETNGETGEIVWDKGRDFATVRKVLSMPQVNIVKKTEVQTGGFSKESILPKRNSDKLIARKKDWDPKKYGGFDSPTVAYSVLVVAKVEKGKSKKLKSVKELLGITIMERSSFEKNPIDFLEAKGYKEVKKDLIIKLPKYSLFELENGRKRMLASAGELQKGNELALPSKYVNFLYLASHYEKLKGSPEDNEQKQLFVEQHKHYLDEIIEQISEFSKRVILADANLDKVLSAYNKHRDKPIREQAENIIHLFTLTNLGAPAAFKYFDTTIDRKRYTSTKEVLDATLIHQSITGLYETRIDLSQLGGDGGEAAAKEAAAKEAAAKEAAAKGGTAPLEEEYRLFLEAPIQNVTLLEQWKREIPKVWAEINPPGLASTQAPIHVQLLSTALPVRVRQYPITLEAKRSLRETIRKFRAAGILRPVHSPWNTPLLPVRKSGTSEYRMVQDLREVNKRVETIHPTVPNPYTLLSLLPPDRIWYSVLDLKDAFFCIPLAPESQLIFAFEWADAEEGESGQLTWTRLPQGFKNSPTLFNEALNRDLQGFRLDHPSVSLLQYVDDLLIAADTQAACLSATRDLLMTLAELGYRVSGKKAQLCQEEVTYLGFKIHKGSRSLSNSRTQAILQIPVPKTKRQVREFLGTIGYCRLWIPGFAELAQPLYAATRPGNDPLVWGEKEEEAFQSLKLALTQPPALALPSLDKPFQLFVEETSGAAKGVLTQALGPWKRPVAYLSKRLDPVAAGWPRCLRAIAAAALLTREASKLTFGQDIEITSSHNLESLLRSPPDKWLTNARITQYQVLLLDPPRVRFKQTAALNPATLLPETDDTLPIHHCLDTLDSLTSTRPDLTDQPLAQAEATLFTDGSSYIRDGKRYAGAAVVTLDSVIWAEPLPIGTSAQKAELIALTKALEWSKDKSVNIYTDSRYAFATLHVHGMIYRERGWLTAGGKAIKNAPEILALLTAVWLPKRVAVMHCKGHQKDDAPTSTGNRRADEVAREVAIRPLSTQATISAGKRTADGSEFEKRTADGSEFESPKKKAKVE

SEQ ID NO: 1138-1167 - skipped (30 entries)

SEQ ID NO: 1168 - protein, 2093 aa, synthetic construct
MPAAKRVKLDGGDKKYSIGLDIGTNSVGWAVITDEYKVPSKKFKVLGNTDRHSIKKNLIGALLFDSGETAEATRLKRTARRRYTRRKNRICYLQEIFSNEMAKVDDSFFHRLEESFLVEEDKKHERHPIFGNIVDEVAYHEKYPTIYHLRKKLVDSTDKADLRLIYLALAHMIKFRGHFLIEGDLNPDNSDVDKLFIQLVQTYNQLFEENPINASGVDAKAILSARLSKSRRLENLIAQLPGEKKNGLFGNLIALSLGLTPNFKSNFDLAEDAKLQLSKDTYDDDLDNLLAQIGDQYADLFLAAKNLSDAILLSDILRVNTEITKAPLSASMIKRYDEHHQDLTLLKALVRQQLPEKYKEIFFDQSKNGYAGYIDGGASQEEFYKFIKPILEKMDGTEELLVKLNREDLLRKQRTFDNGSIPHQIHLGELHAILRRQEDFYPFLKDNREKIEKILTFRIPYYVGPLARGNSRFAWMTRKSEETITPWNFEEVVDKGASAQSFIERMTNFDKNLPNEKVLPKHSLLYEYFTVYNELTKVKYVTEGMRKPAFLSGEQKKAIVDLLFKTNRKVTVKQLKEDYFKKIECFDSVEISGVEDRFNASLGTYHDLLKIIKDKDFLDNEENEDILEDIVLTLTLFEDREMIEERLKTYAHLFDDKVMKQLKRRRYTGWGRLSRKLINGIRDKQSGKTILDFLKSDGFANRNFMQLIHDDSLTFKEDIQKAQVSGQGDSLHEHIANLAGSPAIKKGILQTVKVVDELVKVMGRHKPENIVIEMARENQTTQKGQKNSRERMKRIEEGIKELGSQILKEHPVENTQLQNEKLYLYYLQNGRDMYVDQELDINRLSDYDVDHIVPQSFLKDDSIDNKVLTRSDKARGKSDNVPSEEVVKKMKNYWRQLLNAKLITQRKFDNLTKAERGGLSELDKAGFIKRQLVETRQITKHVAQILDSRMNTKYDENDKLIREVKVITLKSKLVSDFRKDFQFYKVREINNYHHAHDAYLNAVVGTALIKKYPKLESEFVYGDYKVYDVRKMIAKSEQEIGKATAKYFFYSNIMNFFKTEITLANGEIRKRPLIETNGETGEIVWDKGRDFATVRKVLSMPQVNIVKKTEVQTGGFSKESILPKRNSDKLIARKKDWDPKKYGGFDSPTVAYSVLVVAKVEKGKSKKLKSVKELLGITIMERSSFEKNPIDFLEAKGYKEVKKDLIIKLPKYSLFELENGRKRMLASAGELQKGNELALPSKYVNFLYLASHYEKLKGSPEDNEQKQLFVEQHKHYLDEIIEQISEFSKRVILADANLDKVLSAYNKHRDKPIREQAENIIHLFTLTNLGAPAAFKYFDTTIDRKRYTSTKEVLDATLIHQSITGLYETRIDLSQLGGDGGGGGGGSPAPGGTLQLEEEYRLFEPESTQKQEMDIWLKNFPQAWAETGGMGTAHCQAPVLIQLKATATPISIRQYPMPHEAYQGIKPHIRRMLDQGILKPCQSPWNTPLLPVKKPGTEDYRPVQDLREVNKRVEDIHPTVPNPYNLLSTLPPSHPWYTVLDLKDAFFCLRLHSESQLLFAFEWRDPEIGLSGQLTWTRLPQGFKNSPTLFNEALHSDLADFRVRYPALVLLQYVDDLLLAAATRTECLEGTKALLETLGNKGYRASAKKAQICLQEVTYLGYSLKDGQRWLTKARKEAILSIPVPKNSRQVREFLGTAGYCRLWIPGFAELAAPLYPLTRPGTLFQWGTEQQLAFEDIKKALLSSPALGLPDITKPFELFIDENSGFAKGVLVQKLGPWKRPVAYLSKKLDTVASGWPPCLRMVAAIAILVKDAGKLTLGQPLTILTSHPVEALVRQPPNKWLSNARMTHYQAMLLDAERVHFGPTVSLNPATLLPLPSGGNHHDCLQILAETHGTRPDLTDQPLPDADLTWYTDGSSFIRNGEREAGAAVTTESEVIWAAPLPPGTSAQRAELIALTQALKMAEGKKLTVYTDSRYAFATTHVHGEIYRRRGWLTSEGKEIKNKNEILALLEALFLPKRLSIIHCPGHQKGDSPQAKGNRLADDTAKKAATETHSSLTVLPAGKRTADGSEFEKRTADGSEFESPKKKAKVE

SEQ ID NO: 1169-1170 - skipped (2 entries)

SEQ ID NO: 1171 - protein, 2114 aa, synthetic construct
MPAAKRVKLDGGDKKYSIGLDIGTNSVGWAVITDEYKVPSKKFKVLGNTDRHSIKKNLIGALLFDSGETAEATRLKRTARRRYTRRKNRICYLQEIFSNEMAKVDDSFFHRLEESFLVEEDKKHERHPIFGNIVDEVAYHEKYPTIYHLRKKLVDSTDKADLRLIYLALAHMIKFRGHFLIEGDLNPDNSDVDKLFIQLVQTYNQLFEENPINASGVDAKAILSARLSKSRRLENLIAQLPGEKKNGLFGNLIALSLGLTPNFKSNFDLAEDAKLQLSKDTYDDDLDNLLAQIGDQYADLFLAAKNLSDAILLSDILRVNTEITKAPLSASMIKRYDEHHQDLTLLKALVRQQLPEKYKEIFFDQSKNGYAGYIDGGASQEEFYKFIKPILEKMDGTEELLVKLNREDLLRKQRTFDNGSIPHQIHLGELHAILRRQEDFYPFLKDNREKIEKILTFRIPYYVGPLARGNSRFAWMTRKSEETITPWNFEEVVDKGASAQSFIERMTNFDKNLPNEKVLPKHSLLYEYFTVYNELTKVKYVTEGMRKPAFLSGEQKKAIVDLLFKTNRKVTVKQLKEDYFKKIECFDSVEISGVEDRFNASLGTYHDLLKIIKDKDFLDNEENEDILEDIVLTLTLFEDREMIEERLKTYAHLFDDKVMKQLKRRRYTGWGRLSRKLINGIRDKQSGKTILDFLKSDGFANRNFMQLIHDDSLTFKEDIQKAQVSGQGDSLHEHIANLAGSPAIKKGILQTVKVVDELVKVMGRHKPENIVIEMARENQTTQKGQKNSRERMKRIEEGIKELGSQILKEHPVENTQLQNEKLYLYYLQNGRDMYVDQELDINRLSDYDVDHIVPQSFLKDDSIDNKVLTRSDKARGKSDNVPSEEVVKKMKNYWRQLLNAKLITQRKFDNLTKAERGGLSELDKAGFIKRQLVETRQITKHVAQILDSRMNTKYDENDKLIREVKVITLKSKLVSDFRKDFQFYKVREINNYHHAHDAYLNAVVGTALIKKYPKLESEFVYGDYKVYDVRKMIAKSEQEIGKATAKYFFYSNIMNFFKTEITLANGEIRKRPLIETNGETGEIVWDKGRDFATVRKVLSMPQVNIVKKTEVQTGGFSKESILPKRNSDKLIARKKDWDPKKYGGFDSPTVAYSVLVVAKVEKGKSKKLKSVKELLGITIMERSSFEKNPIDFLEAKGYKEVKKDLIIKLPKYSLFELENGRKRMLASAGELQKGNELALPSKYVNFLYLASHYEKLKGSPEDNEQKQLFVEQHKHYLDEIIEQISEFSKRVILADANLDKVLSAYNKHRDKPIREQAENIIHLFTLTNLGAPAAFKYFDTTIDRKRYTSTKEVLDATLIHQSITGLYETRIDLSQLGGDGGEAAAKEAAAKEAAAKEAAAKEAAAKEAAAKGGTLQLEEEYRLFEPESTQKQEMDIWLKNFPQAWAETGGMGTAHCQAPVLIQLKATATPISIRQYPMPHEAYQGIKPHIRRMLDQGILKPCQSPWNTPLLPVKKPGTEDYRPVQDLREVNKRVEDIHPTVPNPYNLLSTLPPSHPWYTVLDLKDAFFCLRLHSESQLLFAFEWRDPEIGLSGQLTWTRLPQGFKNSPTLFNEALHSDLADFRVRYPALVLLQYVDDLLLAAATRTECLEGTKALLETLGNKGYRASAKKAQICLQEVTYLGYSLKDGQRWLTKARKEAILSIPVPKNSRQVREFLGTAGYCRLWIPGFAELAAPLYPLTRPGTLFQWGTEQQLAFEDIKKALLSSPALGLPDITKPFELFIDENSGFAKGVLVQKLGPWKRPVAYLSKKLDTVASGWPPCLRMVAAIAILVKDAGKLTLGQPLTILTSHPVEALVRQPPNKWLSNARMTHYQAMLLDAERVHFGPTVSLNPATLLPLPSGGNHHDCLQILAETHGTRPDLTDQPLPDADLTWYTDGSSFIRNGEREAGAAVTTESEVIWAAPLPPGTSAQRAELIALTQALKMAEGKKLTVYTDSRYAFATTHVHGEIYRRRGWLTSEGKEIKNKNEILALLEALFLPKRLSIIHCPGHQKGDSPQAKGNRLADDTAKKAATETHSSLTVLPAGKRTADGSEFEKRTADGSEFESPKKKAKVE

SEQ ID NO: 1172-1196 - skipped (25 entries)

SEQ ID NO: 1197 - protein, 2130 aa, synthetic construct
MPAAKRVKLDGGDKKYSIGLDIGTNSVGWAVITDEYKVPSKKFKVLGNTDRHSIKKNLIGALLFDSGETAEATRLKRTARRRYTRRKNRICYLQEIFSNEMAKVDDSFFHRLEESFLVEEDKKHERHPIFGNIVDEVAYHEKYPTIYHLRKKLVDSTDKADLRLIYLALAHMIKFRGHFLIEGDLNPDNSDVDKLFIQLVQTYNQLFEENPINASGVDAKAILSARLSKSRRLENLIAQLPGEKKNGLFGNLIALSLGLTPNFKSNFDLAEDAKLQLSKDTYDDDLDNLLAQIGDQYADLFLAAKNLSDAILLSDILRVNTEITKAPLSASMIKRYDEHHQDLTLLKALVRQQLPEKYKEIFFDQSKNGYAGYIDGGASQEEFYKFIKPILEKMDGTEELLVKLNREDLLRKQRTFDNGSIPHQIHLGELHAILRRQEDFYPFLKDNREKIEKILTFRIPYYVGPLARGNSRFAWMTRKSEETITPWNFEEVVDKGASAQSFIERMTNFDKNLPNEKVLPKHSLLYEYFTVYNELTKVKYVTEGMRKPAFLSGEQKKAIVDLLFKTNRKVTVKQLKEDYFKKIECFDSVEISGVEDRFNASLGTYHDLLKIIKDKDFLDNEENEDILEDIVLTLTLFEDREMIEERLKTYAHLFDDKVMKQLKRRRYTGWGRLSRKLINGIRDKQSGKTILDFLKSDGFANRNFMQLIHDDSLTFKEDIQKAQVSGQGDSLHEHIANLAGSPAIKKGILQTVKVVDELVKVMGRHKPENIVIEMARENQTTQKGQKNSRERMKRIEEGIKELGSQILKEHPVENTQLQNEKLYLYYLQNGRDMYVDQELDINRLSDYDVDHIVPQSFLKDDSIDNKVLTRSDKARGKSDNVPSEEVVKKMKNYWRQLLNAKLITQRKFDNLTKAERGGLSELDKAGFIKRQLVETRQITKHVAQILDSRMNTKYDENDKLIREVKVITLKSKLVSDFRKDFQFYKVREINNYHHAHDAYLNAVVGTALIKKYPKLESEFVYGDYKVYDVRKMIAKSEQEIGKATAKYFFYSNIMNFFKTEITLANGEIRKRPLIETNGETGEIVWDKGRDFATVRKVLSMPQVNIVKKTEVQTGGFSKESILPKRNSDKLIARKKDWDPKKYGGFDSPTVAYSVLVVAKVEKGKSKKLKSVKELLGITIMERSSFEKNPIDFLEAKGYKEVKKDLIIKLPKYSLFELENGRKRMLASAGELQKGNELALPSKYVNFLYLASHYEKLKGSPEDNEQKQLFVEQHKHYLDEIIEQISEFSKRVILADANLDKVLSAYNKHRDKPIREQAENIIHLFTLTNLGAPAAFKYFDTTIDRKRYTSTKEVLDATLIHQSITGLYETRIDLSQLGGDGGAEAAAKEAAAKEAAAKEAAAKALEAEAAAKEAAAKEAAAKEAAAKAGGTLQLEEEYRLFEPESTQKQEMDIWLKNFPQAWAETGGMGTAHCQAPVLIQLKATATPISIRQYPMPHEAYQGIKPHIRRMLDQGILKPCQSPWNTPLLPVKKPGTEDYRPVQDLREVNKRVEDIHPTVPNPYNLLSTLPPSHPWYTVLDLKDAFFCLRLHSESQLLFAFEWRDPEIGLSGQLTWTRLPQGFKNSPTLFNEALHSDLADFRVRYPALVLLQYVDDLLLAAATRTECLEGTKALLETLGNKGYRASAKKAQICLQEVTYLGYSLKDGQRWLTKARKEAILSIPVPKNSRQVREFLGKAGYCRLFIPGFAELAAPLYPLTRPGTLFQWGTEQQLAFEDIKKALLSSPALGLPDITKPFELFIDENSGFAKGVLVQKLGPWKRPVAYLSKKLDTVASGWPPCLRMVAAIAILVKDAGKLTLGQPLTILTSHPVEALVRQPPNKWLSNARMTHYQAMLLDAERVHFGPTVSLNPATLLPLPSGGNHHDCLQILAETHGTRPDLTDQPLPDADLTWYTDGSSFIRNGEREAGAAVTTESEVIWAAPLPPGTSAQRAELIALTQALKMAEGKKLTVYTDSRYAFATTHVHGEIYRRRGWLTSEGKEIKNKNEILALLEALFLPKRLSIIHCPGHQKGDSPQAKGNRLADDTAKKAATETHSSLTVLPAGKRTADGSEFEKRTADGSEFESPKKKAKVE

SEQ ID NO: 1198 - protein, 2104 aa, synthetic construct
MPAAKRVKLDGGDKKYSIGLDIGTNSVGWAVITDEYKVPSKKFKVLGNTDRHSIKKNLIGALLFDSGETAEATRLKRTARRRYTRRKNRICYLQEIFSNEMAKVDDSFFHRLEESFLVEEDKKHERHPIFGNIVDEVAYHEKYPTIYHLRKKLVDSTDKADLRLIYLALAHMIKFRGHFLIEGDLNPDNSDVDKLFIQLVQTYNQLFEENPINASGVDAKAILSARLSKSRRLENLIAQLPGEKKNGLFGNLIALSLGLTPNFKSNFDLAEDAKLQLSKDTYDDDLDNLLAQIGDQYADLFLAAKNLSDAILLSDILRVNTEITKAPLSASMIKRYDEHHQDLTLLKALVRQQLPEKYKEIFFDQSKNGYAGYIDGGASQEEFYKFIKPILEKMDGTEELLVKLNREDLLRKQRTFDNGSIPHQIHLGELHAILRRQEDFYPFLKDNREKIEKILTFRIPYYVGPLARGNSRFAWMTRKSEETITPWNFEEVVDKGASAQSFIERMTNFDKNLPNEKVLPKHSLLYEYFTVYNELTKVKYVTEGMRKPAFLSGEQKKAIVDLLFKTNRKVTVKQLKEDYFKKIECFDSVEISGVEDRFNASLGTYHDLLKIIKDKDFLDNEENEDILEDIVLTLTLFEDREMIEERLKTYAHLFDDKVMKQLKRRRYTGWGRLSRKLINGIRDKQSGKTILDFLKSDGFANRNFMQLIHDDSLTFKEDIQKAQVSGQGDSLHEHIANLAGSPAIKKGILQTVKVVDELVKVMGRHKPENIVIEMARENQTTQKGQKNSRERMKRIEEGIKELGSQILKEHPVENTQLQNEKLYLYYLQNGRDMYVDQELDINRLSDYDVDHIVPQSFLKDDSIDNKVLTRSDKARGKSDNVPSEEVVKKMKNYWRQLLNAKLITQRKFDNLTKAERGGLSELDKAGFIKRQLVETRQITKHVAQILDSRMNTKYDENDKLIREVKVITLKSKLVSDFRKDFQFYKVREINNYHHAHDAYLNAVVGTALIKKYPKLESEFVYGDYKVYDVRKMIAKSEQEIGKATAKYFFYSNIMNFFKTEITLANGEIRKRPLIETNGETGEIVWDKGRDFATVRKVLSMPQVNIVKKTEVQTGGFSKESILPKRNSDKLIARKKDWDPKKYGGFDSPTVAYSVLVVAKVEKGKSKKLKSVKELLGITIMERSSFEKNPIDFLEAKGYKEVKKDLIIKLPKYSLFELENGRKRMLASAGELQKGNELALPSKYVNFLYLASHYEKLKGSPEDNEQKQLFVEQHKHYLDEIIEQISEFSKRVILADANLDKVLSAYNKHRDKPIREQAENIIHLFTLTNLGAPAAFKYFDTTIDRKRYTSTKEVLDATLIHQSITGLYETRIDLSQLGGDGGEAAAKEAAAKEAAAKEAAAKGGTLQLEEEYRLFEPESTQKQEMDIWLKNFPQAWAETGGMGTAHCQAPVLIQLKATATPISIRQYPMPHEAYQGIKPHIRRMLDQGILKPCQSPWNTPLLPVKKPGTEDYRPVQDLREVNKRVEDIHPTVPNPYNLLSTLPPSHPWYTVLDLKDAFFCLRLHSESQLLFAFEWRDPEIGLSGQLTWTRLPQGFKNSPTLFNEALHSDLADFRVRYPALVLLQYVDDLLLAAATRTECLEGTKALLETLGNKGYRASAKKAQICLQEVTYLGYSLKDGQRWLTKARKEAILSIPVPKNSRQVREFLGKAGYCRLFIPGFAELAAPLYPLTRPGTLFQWGTEQQLAFEDIKKALLSSPALGLPDITKPFELFIDENSGFAKGVLVQKLGPWKRPVAYLSKKLDTVASGWPPCLRMVAAIAILVKDAGKLTLGQPLTILTSHPVEALVRQPPNKWLSNARMTHYQAMLLDAERVHFGPTVSLNPATLLPLPSGGNHHDCLQILAETHGTRPDLTDQPLPDADLTWYTDGSSFIRNGEREAGAAVTTESEVIWAAPLPPGTSAQRAELIALTQALKMAEGKKLTVYTDSRYAFATTHVHGEIYRRRGWLTSEGKEIKNKNEILALLEALFLPKRLSIIHCPGHQKGDSPQAKGNRLADDTAKKAATETHSSLTVLPAGKRTADGSEFEKRTADGSEFESPKKKAKVE

SEQ ID NO: 1199-1201 - skipped (3 entries)

SEQ ID NO: 1202 - protein, 2109 aa, synthetic construct
MPAAKRVKLDGGDKKYSIGLDIGTNSVGWAVITDEYKVPSKKFKVLGNTDRHSIKKNLIGALLFDSGETAEATRLKRTARRRYTRRKNRICYLQEIFSNEMAKVDDSFFHRLEESFLVEEDKKHERHPIFGNIVDEVAYHEKYPTIYHLRKKLVDSTDKADLRLIYLALAHMIKFRGHFLIEGDLNPDNSDVDKLFIQLVQTYNQLFEENPINASGVDAKAILSARLSKSRRLENLIAQLPGEKKNGLFGNLIALSLGLTPNFKSNFDLAEDAKLQLSKDTYDDDLDNLLAQIGDQYADLFLAAKNLSDAILLSDILRVNTEITKAPLSASMIKRYDEHHQDLTLLKALVRQQLPEKYKEIFFDQSKNGYAGYIDGGASQEEFYKFIKPILEKMDGTEELLVKLNREDLLRKQRTFDNGSIPHQIHLGELHAILRRQEDFYPFLKDNREKIEKILTFRIPYYVGPLARGNSRFAWMTRKSEETITPWNFEEVVDKGASAQSFIERMTNFDKNLPNEKVLPKHSLLYEYFTVYNELTKVKYVTEGMRKPAFLSGEQKKAIVDLLFKTNRKVTVKQLKEDYFKKIECFDSVEISGVEDRFNASLGTYHDLLKIIKDKDFLDNEENEDILEDIVLTLTLFEDREMIEERLKTYAHLFDDKVMKQLKRRRYTGWGRLSRKLINGIRDKQSGKTILDFLKSDGFANRNFMQLIHDDSLTFKEDIQKAQVSGQGDSLHEHIANLAGSPAIKKGILQTVKVVDELVKVMGRHKPENIVIEMARENQTTQKGQKNSRERMKRIEEGIKELGSQILKEHPVENTQLQNEKLYLYYLQNGRDMYVDQELDINRLSDYDVDHIVPQSFLKDDSIDNKVLTRSDKARGKSDNVPSEEVVKKMKNYWRQLLNAKLITQRKFDNLTKAERGGLSELDKAGFIKRQLVETRQITKHVAQILDSRMNTKYDENDKLIREVKVITLKSKLVSDFRKDFQFYKVREINNYHHAHDAYLNAVVGTALIKKYPKLESEFVYGDYKVYDVRKMIAKSEQEIGKATAKYFFYSNIMNFFKTEITLANGEIRKRPLIETNGETGEIVWDKGRDFATVRKVLSMPQVNIVKKTEVQTGGFSKESILPKRNSDKLIARKKDWDPKKYGGFDSPTVAYSVLVVAKVEKGKSKKLKSVKELLGITIMERSSFEKNPIDFLEAKGYKEVKKDLIIKLPKYSLFELENGRKRMLASAGELQKGNELALPSKYVNFLYLASHYEKLKGSPEDNEQKQLFVEQHKHYLDEIIEQISEFSKRVILADANLDKVLSAYNKHRDKPIREQAENIIHLFTLTNLGAPAAFKYFDTTIDRKRYTSTKEVLDATLIHQSITGLYETRIDLSQLGGDGGGGGGSGGGGSGGGGSGGGGSGGGGSGGTLQLEEEYRLFEPESTQKQEMDIWLKNFPQAWAETGGMGTAHCQAPVLIQLKATATPISIRQYPMPHEAYQGIKPHIRRMLDQGILKPCQSPWNTPLLPVKKPGTEDYRPVQDLREVNKRVEDIHPTVPNPYNLLSTLPPSHPWYTVLDLKDAFFCLRLHSESQLLFAFEWRDPEIGLSGQLTWTRLPQGFKNSPTLFNEALHSDLADFRVRYPALVLLQYVDDLLLAAATRTECLEGTKALLETLGNKGYRASAKKAQICLQEVTYLGYSLKDGQRWLTKARKEAILSIPVPKNSRQVREFLGKAGYCRLFIPGFAELAAPLYPLTRPGTLFQWGTEQQLAFEDIKKALLSSPALGLPDITKPFELFIDENSGFAKGVLVQKLGPWKRPVAYLSKKLDTVASGWPPCLRMVAAIAILVKDAGKLTLGQPLTILTSHPVEALVRQPPNKWLSNARMTHYQAMLLDAERVHFGPTVSLNPATLLPLPSGGNHHDCLQILAETHGTRPDLTDQPLPDADLTWYTDGSSFIRNGEREAGAAVTTESEVIWAAPLPPGTSAQRAELIALTQALKMAEGKKLTVYTDSRYAFATTHVHGEIYRRRGWLTSEGKEIKNKNEILALLEALFLPKRLSIIHCPGHQKGDSPQAKGNRLADDTAKKAATETHSSLTVLPAGKRTADGSEFEKRTADGSEFESPKKKAKVE

SEQ ID NO: 1203 - protein, 2099 aa, synthetic construct
MPAAKRVKLDGGDKKYSIGLDIGTNSVGWAVITDEYKVPSKKFKVLGNTDRHSIKKNLIGALLFDSGETAEATRLKRTARRRYTRRKNRICYLQEIFSNEMAKVDDSFFHRLEESFLVEEDKKHERHPIFGNIVDEVAYHEKYPTIYHLRKKLVDSTDKADLRLIYLALAHMIKFRGHFLIEGDLNPDNSDVDKLFIQLVQTYNQLFEENPINASGVDAKAILSARLSKSRRLENLIAQLPGEKKNGLFGNLIALSLGLTPNFKSNFDLAEDAKLQLSKDTYDDDLDNLLAQIGDQYADLFLAAKNLSDAILLSDILRVNTEITKAPLSASMIKRYDEHHQDLTLLKALVRQQLPEKYKEIFFDQSKNGYAGYIDGGASQEEFYKFIKPILEKMDGTEELLVKLNREDLLRKQRTFDNGSIPHQIHLGELHAILRRQEDFYPFLKDNREKIEKILTFRIPYYVGPLARGNSRFAWMTRKSEETITPWNFEEVVDKGASAQSFIERMTNFDKNLPNEKVLPKHSLLYEYFTVYNELTKVKYVTEGMRKPAFLSGEQKKAIVDLLFKTNRKVTVKQLKEDYFKKIECFDSVEISGVEDRFNASLGTYHDLLKIIKDKDFLDNEENEDILEDIVLTLTLFEDREMIEERLKTYAHLFDDKVMKQLKRRRYTGWGRLSRKLINGIRDKQSGKTILDFLKSDGFANRNFMQLIHDDSLTFKEDIQKAQVSGQGDSLHEHIANLAGSPAIKKGILQTVKVVDELVKVMGRHKPENIVIEMARENQTTQKGQKNSRERMKRIEEGIKELGSQILKEHPVENTQLQNEKLYLYYLQNGRDMYVDQELDINRLSDYDVDHIVPQSFLKDDSIDNKVLTRSDKARGKSDNVPSEEVVKKMKNYWRQLLNAKLITQRKFDNLTKAERGGLSELDKAGFIKRQLVETRQITKHVAQILDSRMNTKYDENDKLIREVKVITLKSKLVSDFRKDFQFYKVREINNYHHAHDAYLNAVVGTALIKKYPKLESEFVYGDYKVYDVRKMIAKSEQEIGKATAKYFFYSNIMNFFKTEITLANGEIRKRPLIETNGETGEIVWDKGRDFATVRKVLSMPQVNIVKKTEVQTGGFSKESILPKRNSDKLIARKKDWDPKKYGGFDSPTVAYSVLVVAKVEKGKSKKLKSVKELLGITIMERSSFEKNPIDFLEAKGYKEVKKDLIIKLPKYSLFELENGRKRMLASAGELQKGNELALPSKYVNFLYLASHYEKLKGSPEDNEQKQLFVEQHKHYLDEIIEQISEFSKRVILADANLDKVLSAYNKHRDKPIREQAENIIHLFTLTNLGAPAAFKYFDTTIDRKRYTSTKEVLDATLIHQSITGLYETRIDLSQLGGDGGGGGGSEAAAKGGGGSGGTLQLEEEYRLFEPESTQKQEMDIWLKNFPQAWAETGGMGTAHCQAPVLIQLKATATPISIRQYPMPHEAYQGIKPHIRRMLDQGILKPCQSPWNTPLLPVKKPGTEDYRPVQDLREVNKRVEDIHPTVPNPYNLLSTLPPSHPWYTVLDLKDAFFCLRLHSESQLLFAFEWRDPEIGLSGQLTWTRLPQGFKNSPTLFNEALHSDLADFRVRYPALVLLQYVDDLLLAAATRTECLEGTKALLETLGNKGYRASAKKAQICLQEVTYLGYSLKDGQRWLTKARKEAILSIPVPKNSRQVREFLGKAGYCRLFIPGFAELAAPLYPLTRPGTLFQWGTEQQLAFEDIKKALLSSPALGLPDITKPFELFIDENSGFAKGVLVQKLGPWKRPVAYLSKKLDTVASGWPPCLRMVAAIAILVKDAGKLTLGQPLTILTSHPVEALVRQPPNKWLSNARMTHYQAMLLDAERVHFGPTVSLNPATLLPLPSGGNHHDCLQILAETHGTRPDLTDQPLPDADLTWYTDGSSFIRNGEREAGAAVTTESEVIWAAPLPPGTSAQRAELIALTQALKMAEGKKLTVYTDSRYAFATTHVHGEIYRRRGWLTSEGKEIKNKNEILALLEALFLPKRLSIIHCPGHQKGDSPQAKGNRLADDTAKKAATETHSSLTVLPAGKRTADGSEFEKRTADGSEFESPKKKAKVE

SEQ ID NO: 1204-1209 - skipped (6 entries)

SEQ ID NO: 1210 - protein, 2095 aa, synthetic construct
MPAAKRVKLDGGDKKYSIGLDIGTNSVGWAVITDEYKVPSKKFKVLGNTDRHSIKKNLIGALLFDSGETAEATRLKRTARRRYTRRKNRICYLQEIFSNEMAKVDDSFFHRLEESFLVEEDKKHERHPIFGNIVDEVAYHEKYPTIYHLRKKLVDSTDKADLRLIYLALAHMIKFRGHFLIEGDLNPDNSDVDKLFIQLVQTYNQLFEENPINASGVDAKAILSARLSKSRRLENLIAQLPGEKKNGLFGNLIALSLGLTPNFKSNFDLAEDAKLQLSKDTYDDDLDNLLAQIGDQYADLFLAAKNLSDAILLSDILRVNTEITKAPLSASMIKRYDEHHQDLTLLKALVRQQLPEKYKEIFFDQSKNGYAGYIDGGASQEEFYKFIKPILEKMDGTEELLVKLNREDLLRKQRTFDNGSIPHQIHLGELHAILRRQEDFYPFLKDNREKIEKILTFRIPYYVGPLARGNSRFAWMTRKSEETITPWNFEEVVDKGASAQSFIERMTNFDKNLPNEKVLPKHSLLYEYFTVYNELTKVKYVTEGMRKPAFLSGEQKKAIVDLLFKTNRKVTVKQLKEDYFKKIECFDSVEISGVEDRFNASLGTYHDLLKIIKDKDFLDNEENEDILEDIVLTLTLFEDREMIEERLKTYAHLFDDKVMKQLKRRRYTGWGRLSRKLINGIRDKQSGKTILDFLKSDGFANRNFMQLIHDDSLTFKEDIQKAQVSGQGDSLHEHIANLAGSPAIKKGILQTVKVVDELVKVMGRHKPENIVIEMARENQTTQKGQKNSRERMKRIEEGIKELGSQILKEHPVENTQLQNEKLYLYYLQNGRDMYVDQELDINRLSDYDVDHIVPQSFLKDDSIDNKVLTRSDKARGKSDNVPSEEVVKKMKNYWRQLLNAKLITQRKFDNLTKAERGGLSELDKAGFIKRQLVETRQITKHVAQILDSRMNTKYDENDKLIREVKVITLKSKLVSDFRKDFQFYKVREINNYHHAHDAYLNAVVGTALIKKYPKLESEFVYGDYKVYDVRKMIAKSEQEIGKATAKYFFYSNIMNFFKTEITLANGEIRKRPLIETNGETGEIVWDKGRDFATVRKVLSMPQVNIVKKTEVQTGGFSKESILPKRNSDKLIARKKDWDPKKYGGFDSPTVAYSVLVVAKVEKGKSKKLKSVKELLGITIMERSSFEKNPIDFLEAKGYKEVKKDLIIKLPKYSLFELENGRKRMLASAGELQKGNELALPSKYVNFLYLASHYEKLKGSPEDNEQKQLFVEQHKHYLDEIIEQISEFSKRVILADANLDKVLSAYNKHRDKPIREQAENIIHLFTLTNLGAPAAFKYFDTTIDRKRYTSTKEVLDATLIHQSITGLYETRIDLSQLGGDGGEAAAKGSSGGGGGTLQLEEEYRLFEPESTQKQEMDIWLKNFPQAWAETGGMGTAHCQAPVLIQLKATATPISIRQYPMPHEAYQGIKPHIRRMLDQGILKPCQSPWNTPLLPVKKPGTEDYRPVQDLREVNKRVEDIHPTVPNPYNLLSTLPPSHPWYTVLDLKDAFFCLRLHSESQLLFAFEWRDPEIGLSGQLTWTRLPQGFKNSPTLFNEALHSDLADFRVRYPALVLLQYVDDLLLAAATRTECLEGTKALLETLGNKGYRASAKKAQICLQEVTYLGYSLKDGQRWLTKARKEAILSIPVPKNSRQVREFLGKAGYCRLFIPGFAELAAPLYPLTRPGTLFQWGTEQQLAFEDIKKALLSSPALGLPDITKPFELFIDENSGFAKGVLVQKLGPWKRPVAYLSKKLDTVASGWPPCLRMVAAIAILVKDAGKLTLGQPLTILTSHPVEALVRQPPNKWLSNARMTHYQAMLLDAERVHFGPTVSLNPATLLPLPSGGNHHDCLQILAETHGTRPDLTDQPLPDADLTWYTDGSSFIRNGEREAGAAVTTESEVIWAAPLPPGTSAQRAELIALTQALKMAEGKKLTVYTDSRYAFATTHVHGEIYRRRGWLTSEGKEIKNKNEILALLEALFLPKRLSIIHCPGHQKGDSPQAKGNRLADDTAKKAATETHSSLTVLPAGKRTADGSEFEKRTADGSEFESPKKKAKVE

SEQ ID NO: 1211-1215 - skipped (5 entries)

SEQ ID NO: 1216 - protein, 2093 aa, synthetic construct
MPAAKRVKLDGGDKKYSIGLDIGTNSVGWAVITDEYKVPSKKFKVLGNTDRHSIKKNLIGALLFDSGETAEATRLKRTARRRYTRRKNRICYLQEIFSNEMAKVDDSFFHRLEESFLVEEDKKHERHPIFGNIVDEVAYHEKYPTIYHLRKKLVDSTDKADLRLIYLALAHMIKFRGHFLIEGDLNPDNSDVDKLFIQLVQTYNQLFEENPINASGVDAKAILSARLSKSRRLENLIAQLPGEKKNGLFGNLIALSLGLTPNFKSNFDLAEDAKLQLSKDTYDDDLDNLLAQIGDQYADLFLAAKNLSDAILLSDILRVNTEITKAPLSASMIKRYDEHHQDLTLLKALVRQQLPEKYKEIFFDQSKNGYAGYIDGGASQEEFYKFIKPILEKMDGTEELLVKLNREDLLRKQRTFDNGSIPHQIHLGELHAILRRQEDFYPFLKDNREKIEKILTFRIPYYVGPLARGNSRFAWMTRKSEETITPWNFEEVVDKGASAQSFIERMTNFDKNLPNEKVLPKHSLLYEYFTVYNELTKVKYVTEGMRKPAFLSGEQKKAIVDLLFKTNRKVTVKQLKEDYFKKIECFDSVEISGVEDRFNASLGTYHDLLKIIKDKDFLDNEENEDILEDIVLTLTLFEDREMIEERLKTYAHLFDDKVMKQLKRRRYTGWGRLSRKLINGIRDKQSGKTILDFLKSDGFANRNFMQLIHDDSLTFKEDIQKAQVSGQGDSLHEHIANLAGSPAIKKGILQTVKVVDELVKVMGRHKPENIVIEMARENQTTQKGQKNSRERMKRIEEGIKELGSQILKEHPVENTQLQNEKLYLYYLQNGRDMYVDQELDINRLSDYDVDHIVPQSFLKDDSIDNKVLTRSDKARGKSDNVPSEEVVKKMKNYWRQLLNAKLITQRKFDNLTKAERGGLSELDKAGFIKRQLVETRQITKHVAQILDSRMNTKYDENDKLIREVKVITLKSKLVSDFRKDFQFYKVREINNYHHAHDAYLNAVVGTALIKKYPKLESEFVYGDYKVYDVRKMIAKSEQEIGKATAKYFFYSNIMNFFKTEITLANGEIRKRPLIETNGETGEIVWDKGRDFATVRKVLSMPQVNIVKKTEVQTGGFSKESILPKRNSDKLIARKKDWDPKKYGGFDSPTVAYSVLVVAKVEKGKSKKLKSVKELLGITIMERSSFEKNPIDFLEAKGYKEVKKDLIIKLPKYSLFELENGRKRMLASAGELQKGNELALPSKYVNFLYLASHYEKLKGSPEDNEQKQLFVEQHKHYLDEIIEQISEFSKRVILADANLDKVLSAYNKHRDKPIREQAENIIHLFTLTNLGAPAAFKYFDTTIDRKRYTSTKEVLDATLIHQSITGLYETRIDLSQLGGDGGPAPAPAPAPGGTLQLEEEYRLFEPESTQKQEMDIWLKNFPQAWAETGGMGTAHCQAPVLIQLKATATPISIRQYPMPHEAYQGIKPHIRRMLDQGILKPCQSPWNTPLLPVKKPGTEDYRPVQDLREVNKRVEDIHPTVPNPYNLLSTLPPSHPWYTVLDLKDAFFCLRLHSESQLLFAFEWRDPEIGLSGQLTWTRLPQGFKNSPTLFNEALHSDLADFRVRYPALVLLQYVDDLLLAAATRTECLEGTKALLETLGNKGYRASAKKAQICLQEVTYLGYSLKDGQRWLTKARKEAILSIPVPKNSRQVREFLGKAGYCRLFIPGFAELAAPLYPLTRPGTLFQWGTEQQLAFEDIKKALLSSPALGLPDITKPFELFIDENSGFAKGVLVQKLGPWKRPVAYLSKKLDTVASGWPPCLRMVAAIAILVKDAGKLTLGQPLTILTSHPVEALVRQPPNKWLSNARMTHYQAMLLDAERVHFGPTVSLNPATLLPLPSGGNHHDCLQILAETHGTRPDLTDQPLPDADLTWYTDGSSFIRNGEREAGAAVTTESEVIWAAPLPPGTSAQRAELIALTQALKMAEGKKLTVYTDSRYAFATTHVHGEIYRRRGWLTSEGKEIKNKNEILALLEALFLPKRLSIIHCPGHQKGDSPQAKGNRLADDTAKKAATETHSSLTVLPAGKRTADGSEFEKRTADGSEFESPKKKAKVE

SEQ ID NO: 1217-1218 - skipped (2 entries)

SEQ ID NO: 1219 - protein, 2097 aa, synthetic construct
MPAAKRVKLDGGDKKYSIGLDIGTNSVGWAVITDEYKVPSKKFKVLGNTDRHSIKKNLIGALLFDSGETAEATRLKRTARRRYTRRKNRICYLQEIFSNEMAKVDDSFFHRLEESFLVEEDKKHERHPIFGNIVDEVAYHEKYPTIYHLRKKLVDSTDKADLRLIYLALAHMIKFRGHFLIEGDLNPDNSDVDKLFIQLVQTYNQLFEENPINASGVDAKAILSARLSKSRRLENLIAQLPGEKKNGLFGNLIALSLGLTPNFKSNFDLAEDAKLQLSKDTYDDDLDNLLAQIGDQYADLFLAAKNLSDAILLSDILRVNTEITKAPLSASMIKRYDEHHQDLTLLKALVRQQLPEKYKEIFFDQSKNGYAGYIDGGASQEEFYKFIKPILEKMDGTEELLVKLNREDLLRKQRTFDNGSIPHQIHLGELHAILRRQEDFYPFLKDNREKIEKILTFRIPYYVGPLARGNSRFAWMTRKSEETITPWNFEEVVDKGASAQSFIERMTNFDKNLPNEKVLPKHSLLYEYFTVYNELTKVKYVTEGMRKPAFLSGEQKKAIVDLLFKTNRKVTVKQLKEDYFKKIECFDSVEISGVEDRFNASLGTYHDLLKIIKDKDFLDNEENEDILEDIVLTLTLFEDREMIEERLKTYAHLFDDKVMKQLKRRRYTGWGRLSRKLINGIRDKQSGKTILDFLKSDGFANRNFMQLIHDDSLTFKEDIQKAQVSGQGDSLHEHIANLAGSPAIKKGILQTVKVVDELVKVMGRHKPENIVIEMARENQTTQKGQKNSRERMKRIEEGIKELGSQILKEHPVENTQLQNEKLYLYYLQNGRDMYVDQELDINRLSDYDVDHIVPQSFLKDDSIDNKVLTRSDKARGKSDNVPSEEVVKKMKNYWRQLLNAKLITQRKFDNLTKAERGGLSELDKAGFIKRQLVETRQITKHVAQILDSRMNTKYDENDKLIREVKVITLKSKLVSDFRKDFQFYKVREINNYHHAHDAYLNAVVGTALIKKYPKLESEFVYGDYKVYDVRKMIAKSEQEIGKATAKYFFYSNIMNFFKTEITLANGEIRKRPLIETNGETGEIVWDKGRDFATVRKVLSMPQVNIVKKTEVQTGGFSKESILPKRNSDKLIARKKDWDPKKYGGFDSPTVAYSVLVVAKVEKGKSKKLKSVKELLGITIMERSSFEKNPIDFLEAKGYKEVKKDLIIKLPKYSLFELENGRKRMLASAGELQKGNELALPSKYVNFLYLASHYEKLKGSPEDNEQKQLFVEQHKHYLDEIIEQISEFSKRVILADANLDKVLSAYNKHRDKPIREQAENIIHLFTLTNLGAPAAFKYFDTTIDRKRYTSTKEVLDATLIHQSITGLYETRIDLSQLGGDGGPAPAPAPAPAPAPGGTLQLEEEYRLFEPESTQKQEMDIWLKNFPQAWAETGGMGTAHCQAPVLIQLKATATPISIRQYPMPHEAYQGIKPHIRRMLDQGILKPCQSPWNTPLLPVKKPGTEDYRPVQDLREVNKRVEDIHPTVPNPYNLLSTLPPSHPWYTVLDLKDAFFCLRLHSESQLLFAFEWRDPEIGLSGQLTWTRLPQGFKNSPTLFNEALHSDLADFRVRYPALVLLQYVDDLLLAAATRTECLEGTKALLETLGNKGYRASAKKAQICLQEVTYLGYSLKDGQRWLTKARKEAILSIPVPKNSRQVREFLGKAGYCRLFIPGFAELAAPLYPLTRPGTLFQWGTEQQLAFEDIKKALLSSPALGLPDITKPFELFIDENSGFAKGVLVQKLGPWKRPVAYLSKKLDTVASGWPPCLRMVAAIAILVKDAGKLTLGQPLTILTSHPVEALVRQPPNKWLSNARMTHYQAMLLDAERVHFGPTVSLNPATLLPLPSGGNHHDCLQILAETHGTRPDLTDQPLPDADLTWYTDGSSFIRNGEREAGAAVTTESEVIWAAPLPPGTSAQRAELIALTQALKMAEGKKLTVYTDSRYAFATTHVHGEIYRRRGWLTSEGKEIKNKNEILALLEALFLPKRLSIIHCPGHQKGDSPQAKGNRLADDTAKKAATETHSSLTVLPAGKRTADGSEFEKRTADGSEFESPKKKAKVE

SEQ ID NO: 1220-1224 - skipped (5 entries)

SEQ ID NO: 1225 - protein, 2095 aa, synthetic construct
MPAAKRVKLDGGDKKYSIGLDIGTNSVGWAVITDEYKVPSKKFKVLGNTDRHSIKKNLIGALLFDSGETAEATRLKRTARRRYTRRKNRICYLQEIFSNEMAKVDDSFFHRLEESFLVEEDKKHERHPIFGNIVDEVAYHEKYPTIYHLRKKLVDSTDKADLRLIYLALAHMIKFRGHFLIEGDLNPDNSDVDKLFIQLVQTYNQLFEENPINASGVDAKAILSARLSKSRRLENLIAQLPGEKKNGLFGNLIALSLGLTPNFKSNFDLAEDAKLQLSKDTYDDDLDNLLAQIGDQYADLFLAAKNLSDAILLSDILRVNTEITKAPLSASMIKRYDEHHQDLTLLKALVRQQLPEKYKEIFFDQSKNGYAGYIDGGASQEEFYKFIKPILEKMDGTEELLVKLNREDLLRKQRTFDNGSIPHQIHLGELHAILRRQEDFYPFLKDNREKIEKILTFRIPYYVGPLARGNSRFAWMTRKSEETITPWNFEEVVDKGASAQSFIERMTNFDKNLPNEKVLPKHSLLYEYFTVYNELTKVKYVTEGMRKPAFLSGEQKKAIVDLLFKTNRKVTVKQLKEDYFKKIECFDSVEISGVEDRFNASLGTYHDLLKIIKDKDFLDNEENEDILEDIVLTLTLFEDREMIEERLKTYAHLFDDKVMKQLKRRRYTGWGRLSRKLINGIRDKQSGKTILDFLKSDGFANRNFMQLIHDDSLTFKEDIQKAQVSGQGDSLHEHIANLAGSPAIKKGILQTVKVVDELVKVMGRHKPENIVIEMARENQTTQKGQKNSRERMKRIEEGIKELGSQILKEHPVENTQLQNEKLYLYYLQNGRDMYVDQELDINRLSDYDVDHIVPQSFLKDDSIDNKVLTRSDKARGKSDNVPSEEVVKKMKNYWRQLLNAKLITQRKFDNLTKAERGGLSELDKAGFIKRQLVETRQITKHVAQILDSRMNTKYDENDKLIREVKVITLKSKLVSDFRKDFQFYKVREINNYHHAHDAYLNAVVGTALIKKYPKLESEFVYGDYKVYDVRKMIAKSEQEIGKATAKYFFYSNIMNFFKTEITLANGEIRKRPLIETNGETGEIVWDKGRDFATVRKVLSMPQVNIVKKTEVQTGGFSKESILPKRNSDKLIARKKDWDPKKYGGFDSPTVAYSVLVVAKVEKGKSKKLKSVKELLGITIMERSSFEKNPIDFLEAKGYKEVKKDLIIKLPKYSLFELENGRKRMLASAGELQKGNELALPSKYVNFLYLASHYEKLKGSPEDNEQKQLFVEQHKHYLDEIIEQISEFSKRVILADANLDKVLSAYNKHRDKPIREQAENIIHLFTLTNLGAPAAFKYFDTTIDRKRYTSTKEVLDATLIHQSITGLYETRIDLSQLGGDGGGSSPAPEAAAKGGTLQLEEEYRLFEPESTQKQEMDIWLKNFPQAWAETGGMGTAHCQAPVLIQLKATATPISIRQYPMPHEAYQGIKPHIRRMLDQGILKPCQSPWNTPLLPVKKPGTEDYRPVQDLREVNKRVEDIHPTVPNPYNLLSTLPPSHPWYTVLDLKDAFFCLRLHSESQLLFAFEWRDPEIGLSGQLTWTRLPQGFKNSPTLFNEALHSDLADFRVRYPALVLLQYVDDLLLAAATRTECLEGTKALLETLGNKGYRASAKKAQICLQEVTYLGYSLKDGQRWLTKARKEAILSIPVPKNSRQVREFLGKAGYCRLFIPGFAELAAPLYPLTRPGTLFQWGTEQQLAFEDIKKALLSSPALGLPDITKPFELFIDENSGFAKGVLVQKLGPWKRPVAYLSKKLDTVASGWPPCLRMVAAIAILVKDAGKLTLGQPLTILTSHPVEALVRQPPNKWLSNARMTHYQAMLLDAERVHFGPTVSLNPATLLPLPSGGNHHDCLQILAETHGTRPDLTDQPLPDADLTWYTDGSSFIRNGEREAGAAVTTESEVIWAAPLPPGTSAQRAELIALTQALKMAEGKKLTVYTDSRYAFATTHVHGEIYRRRGWLTSEGKEIKNKNEILALLEALFLPKRLSIIHCPGHQKGDSPQAKGNRLADDTAKKAATETHSSLTVLPAGKRTADGSEFEKRTADGSEFESPKKKAKVE

SEQ ID NO: 1226-1234 - skipped (9 entries)

SEQ ID NO: 1235 - protein, 2095 aa, synthetic construct
MPAAKRVKLDGGDKKYSIGLDIGTNSVGWAVITDEYKVPSKKFKVLGNTDRHSIKKNLIGALLFDSGETAEATRLKRTARRRYTRRKNRICYLQEIFSNEMAKVDDSFFHRLEESFLVEEDKKHERHPIFGNIVDEVAYHEKYPTIYHLRKKLVDSTDKADLRLIYLALAHMIKFRGHFLIEGDLNPDNSDVDKLFIQLVQTYNQLFEENPINASGVDAKAILSARLSKSRRLENLIAQLPGEKKNGLFGNLIALSLGLTPNFKSNFDLAEDAKLQLSKDTYDDDLDNLLAQIGDQYADLFLAAKNLSDAILLSDILRVNTEITKAPLSASMIKRYDEHHQDLTLLKALVRQQLPEKYKEIFFDQSKNGYAGYIDGGASQEEFYKFIKPILEKMDGTEELLVKLNREDLLRKQRTFDNGSIPHQIHLGELHAILRRQEDFYPFLKDNREKIEKILTFRIPYYVGPLARGNSRFAWMTRKSEETITPWNFEEVVDKGASAQSFIERMTNFDKNLPNEKVLPKHSLLYEYFTVYNELTKVKYVTEGMRKPAFLSGEQKKAIVDLLFKTNRKVTVKQLKEDYFKKIECFDSVEISGVEDRFNASLGTYHDLLKIIKDKDFLDNEENEDILEDIVLTLTLFEDREMIEERLKTYAHLFDDKVMKQLKRRRYTGWGRLSRKLINGIRDKQSGKTILDFLKSDGFANRNFMQLIHDDSLTFKEDIQKAQVSGQGDSLHEHIANLAGSPAIKKGILQTVKVVDELVKVMGRHKPENIVIEMARENQTTQKGQKNSRERMKRIEEGIKELGSQILKEHPVENTQLQNEKLYLYYLQNGRDMYVDQELDINRLSDYDVDHIVPQSFLKDDSIDNKVLTRSDKARGKSDNVPSEEVVKKMKNYWRQLLNAKLITQRKFDNLTKAERGGLSELDKAGFIKRQLVETRQITKHVAQILDSRMNTKYDENDKLIREVKVITLKSKLVSDFRKDFQFYKVREINNYHHAHDAYLNAVVGTALIKKYPKLESEFVYGDYKVYDVRKMIAKSEQEIGKATAKYFFYSNIMNFFKTEITLANGEIRKRPLIETNGETGEIVWDKGRDFATVRKVLSMPQVNIVKKTEVQTGGFSKESILPKRNSDKLIARKKDWDPKKYGGFDSPTVAYSVLVVAKVEKGKSKKLKSVKELLGITIMERSSFEKNPIDFLEAKGYKEVKKDLIIKLPKYSLFELENGRKRMLASAGELQKGNELALPSKYVNFLYLASHYEKLKGSPEDNEQKQLFVEQHKHYLDEIIEQISEFSKRVILADANLDKVLSAYNKHRDKPIREQAENIIHLFTLTNLGAPAAFKYFDTTIDRKRYTSTKEVLDATLIHQSITGLYETRIDLSQLGGDGGEAAAKGGGGGSGGTLQLEEEYRLFEPESTQKQEMDIWLKNFPQAWAETGGMGTAHCQAPVLIQLKATATPISIRQYPMPHEAYQGIKPHIRRMLDQGILKPCQSPWNTPLLPVKKPGTEDYRPVQDLREVNKRVEDIHPTVPNPYNLLSTLPPSHPWYTVLDLKDAFFCLRLHSESQLLFAFEWRDPEIGLSGQLTWTRLPQGFKNSPTLFNEALHSDLADFRVRYPALVLLQYVDDLLLAAATRTECLEGTKALLETLGNKGYRASAKKAQICLQEVTYLGYSLKDGQRWLTKARKEAILSIPVPKNSRQVREFLGKAGYCRLFIPGFAELAAPLYPLTRPGTLFQWGTEQQLAFEDIKKALLSSPALGLPDITKPFELFIDENSGFAKGVLVQKLGPWKRPVAYLSKKLDTVASGWPPCLRMVAAIAILVKDAGKLTLGQPLTILTSHPVEALVRQPPNKWLSNARMTHYQAMLLDAERVHFGPTVSLNPATLLPLPSGGNHHDCLQILAETHGTRPDLTDQPLPDADLTWYTDGSSFIRNGEREAGAAVTTESEVIWAAPLPPGTSAQRAELIALTQALKMAEGKKLTVYTDSRYAFATTHVHGEIYRRRGWLTSEGKEIKNKNEILALLEALFLPKRLSIIHCPGHQKGDSPQAKGNRLADDTAKKAATETHSSLTVLPAGKRTADGSEFEKRTADGSEFESPKKKAKVE

SEQ ID NO: 1236-1241 - skipped (6 entries)

SEQ ID NO: 1242 - protein, 2095 aa, synthetic construct
MPAAKRVKLDGGDKKYSIGLDIGTNSVGWAVITDEYKVPSKKFKVLGNTDRHSIKKNLIGALLFDSGETAEATRLKRTARRRYTRRKNRICYLQEIFSNEMAKVDDSFFHRLEESFLVEEDKKHERHPIFGNIVDEVAYHEKYPTIYHLRKKLVDSTDKADLRLIYLALAHMIKFRGHFLIEGDLNPDNSDVDKLFIQLVQTYNQLFEENPINASGVDAKAILSARLSKSRRLENLIAQLPGEKKNGLFGNLIALSLGLTPNFKSNFDLAEDAKLQLSKDTYDDDLDNLLAQIGDQYADLFLAAKNLSDAILLSDILRVNTEITKAPLSASMIKRYDEHHQDLTLLKALVRQQLPEKYKEIFFDQSKNGYAGYIDGGASQEEFYKFIKPILEKMDGTEELLVKLNREDLLRKQRTFDNGSIPHQIHLGELHAILRRQEDFYPFLKDNREKIEKILTFRIPYYVGPLARGNSRFAWMTRKSEETITPWNFEEVVDKGASAQSFIERMTNFDKNLPNEKVLPKHSLLYEYFTVYNELTKVKYVTEGMRKPAFLSGEQKKAIVDLLFKTNRKVTVKQLKEDYFKKIECFDSVEISGVEDRFNASLGTYHDLLKIIKDKDFLDNEENEDILEDIVLTLTLFEDREMIEERLKTYAHLFDDKVMKQLKRRRYTGWGRLSRKLINGIRDKQSGKTILDFLKSDGFANRNFMQLIHDDSLTFKEDIQKAQVSGQGDSLHEHIANLAGSPAIKKGILQTVKVVDELVKVMGRHKPENIVIEMARENQTTQKGQKNSRERMKRIEEGIKELGSQILKEHPVENTQLQNEKLYLYYLQNGRDMYVDQELDINRLSDYDVDHIVPQSFLKDDSIDNKVLTRSDKARGKSDNVPSEEVVKKMKNYWRQLLNAKLITQRKFDNLTKAERGGLSELDKAGFIKRQLVETRQITKHVAQILDSRMNTKYDENDKLIREVKVITLKSKLVSDFRKDFQFYKVREINNYHHAHDAYLNAVVGTALIKKYPKLESEFVYGDYKVYDVRKMIAKSEQEIGKATAKYFFYSNIMNFFKTEITLANGEIRKRPLIETNGETGEIVWDKGRDFATVRKVLSMPQVNIVKKTEVQTGGFSKESILPKRNSDKLIARKKDWDPKKYGGFDSPTVAYSVLVVAKVEKGKSKKLKSVKELLGITIMERSSFEKNPIDFLEAKGYKEVKKDLIIKLPKYSLFELENGRKRMLASAGELQKGNELALPSKYVNFLYLASHYEKLKGSPEDNEQKQLFVEQHKHYLDEIIEQISEFSKRVILADANLDKVLSAYNKHRDKPIREQAENIIHLFTLTNLGAPAAFKYFDTTIDRKRYTSTKEVLDATLIHQSITGLYETRIDLSQLGGDGGGSSGGSEAAAKGGTLQLEEEYRLFEPESTQKQEMDIWLKNFPQAWAETGGMGTAHCQAPVLIQLKATATPISIRQYPMPHEAYQGIKPHIRRMLDQGILKPCQSPWNTPLLPVKKPGTEDYRPVQDLREVNKRVEDIHPTVPNPYNLLSTLPPSHPWYTVLDLKDAFFCLRLHSESQLLFAFEWRDPEIGLSGQLTWTRLPQGFKNSPTLFNEALHSDLADFRVRYPALVLLQYVDDLLLAAATRTECLEGTKALLETLGNKGYRASAKKAQICLQEVTYLGYSLKDGQRWLTKARKEAILSIPVPKNSRQVREFLGKAGYCRLFIPGFAELAAPLYPLTRPGTLFQWGTEQQLAFEDIKKALLSSPALGLPDITKPFELFIDENSGFAKGVLVQKLGPWKRPVAYLSKKLDTVASGWPPCLRMVAAIAILVKDAGKLTLGQPLTILTSHPVEALVRQPPNKWLSNARMTHYQAMLLDAERVHFGPTVSLNPATLLPLPSGGNHHDCLQILAETHGTRPDLTDQPLPDADLTWYTDGSSFIRNGEREAGAAVTTESEVIWAAPLPPGTSAQRAELIALTQALKMAEGKKLTVYTDSRYAFATTHVHGEIYRRRGWLTSEGKEIKNKNEILALLEALFLPKRLSIIHCPGHQKGDSPQAKGNRLADDTAKKAATETHSSLTVLPAGKRTADGSEFEKRTADGSEFESPKKKAKVE

SEQ ID NO: 1243-1261 - skipped (19 entries)

SEQ ID NO: 1262 - protein, 2095 aa, synthetic construct
MPAAKRVKLDGGDKKYSIGLDIGTNSVGWAVITDEYKVPSKKFKVLGNTDRHSIKKNLIGALLFDSGETAEATRLKRTARRRYTRRKNRICYLQEIFSNEMAKVDDSFFHRLEESFLVEEDKKHERHPIFGNIVDEVAYHEKYPTIYHLRKKLVDSTDKADLRLIYLALAHMIKFRGHFLIEGDLNPDNSDVDKLFIQLVQTYNQLFEENPINASGVDAKAILSARLSKSRRLENLIAQLPGEKKNGLFGNLIALSLGLTPNFKSNFDLAEDAKLQLSKDTYDDDLDNLLAQIGDQYADLFLAAKNLSDAILLSDILRVNTEITKAPLSASMIKRYDEHHQDLTLLKALVRQQLPEKYKEIFFDQSKNGYAGYIDGGASQEEFYKFIKPILEKMDGTEELLVKLNREDLLRKQRTFDNGSIPHQIHLGELHAILRRQEDFYPFLKDNREKIEKILTFRIPYYVGPLARGNSRFAWMTRKSEETITPWNFEEVVDKGASAQSFIERMTNFDKNLPNEKVLPKHSLLYEYFTVYNELTKVKYVTEGMRKPAFLSGEQKKAIVDLLFKTNRKVTVKQLKEDYFKKIECFDSVEISGVEDRFNASLGTYHDLLKIIKDKDFLDNEENEDILEDIVLTLTLFEDREMIEERLKTYAHLFDDKVMKQLKRRRYTGWGRLSRKLINGIRDKQSGKTILDFLKSDGFANRNFMQLIHDDSLTFKEDIQKAQVSGQGDSLHEHIANLAGSPAIKKGILQTVKVVDELVKVMGRHKPENIVIEMARENQTTQKGQKNSRERMKRIEEGIKELGSQILKEHPVENTQLQNEKLYLYYLQNGRDMYVDQELDINRLSDYDVDHIVPQSFLKDDSIDNKVLTRSDKARGKSDNVPSEEVVKKMKNYWRQLLNAKLITQRKFDNLTKAERGGLSELDKAGFIKRQLVETRQITKHVAQILDSRMNTKYDENDKLIREVKVITLKSKLVSDFRKDFQFYKVREINNYHHAHDAYLNAVVGTALIKKYPKLESEFVYGDYKVYDVRKMIAKSEQEIGKATAKYFFYSNIMNFFKTEITLANGEIRKRPLIETNGETGEIVWDKGRDFATVRKVLSMPQVNIVKKTEVQTGGFSKESILPKRNSDKLIARKKDWDPKKYGGFDSPTVAYSVLVVAKVEKGKSKKLKSVKELLGITIMERSSFEKNPIDFLEAKGYKEVKKDLIIKLPKYSLFELENGRKRMLASAGELQKGNELALPSKYVNFLYLASHYEKLKGSPEDNEQKQLFVEQHKHYLDEIIEQISEFSKRVILADANLDKVLSAYNKHRDKPIREQAENIIHLFTLTNLGAPAAFKYFDTTIDRKRYTSTKEVLDATLIHQSITGLYETRIDLSQLGGDGGGGGEAAAKPAPGGTLQLEEEYRLFEPESTQKQEMDIWLKNFPQAWAETGGMGTAHCQAPVLIQLKATATPISIRQYPMPHEAYQGIKPHIRRMLDQGILKPCQSPWNTPLLPVKKPGTEDYRPVQDLREVNKRVEDIHPTVPNPYNLLSTLPPSHPWYTVLDLKDAFFCLRLHSESQLLFAFEWRDPEIGLSGQLTWTRLPQGFKNSPTLFNEALHSDLADFRVRYPALVLLQYVDDLLLAAATRTECLEGTKALLETLGNKGYRASAKKAQICLQEVTYLGYSLKDGQRWLTKARKEAILSIPVPKNSRQVREFLGKAGYCRLFIPGFAELAAPLYPLTRPGTLFQWGTEQQLAFEDIKKALLSSPALGLPDITKPFELFIDENSGFAKGVLVQKLGPWKRPVAYLSKKLDTVASGWPPCLRMVAAIAILVKDAGKLTLGQPLTILTSHPVEALVRQPPNKWLSNARMTHYQAMLLDAERVHFGPTVSLNPATLLPLPSGGNHHDCLQILAETHGTRPDLTDQPLPDADLTWYTDGSSFIRNGEREAGAAVTTESEVIWAAPLPPGTSAQRAELIALTQALKMAEGKKLTVYTDSRYAFATTHVHGEIYRRRGWLTSEGKEIKNKNEILALLEALFLPKRLSIIHCPGHQKGDSPQAKGNRLADDTAKKAATETHSSLTVLPAGKRTADGSEFEKRTADGSEFESPKKKAKVE

SEQ ID NO: 1263-1370 - skipped (108 entries)

SEQ ID NO: 1371 - protein, 2098 aa, synthetic construct
MPAAKRVKLDGGDKKYSIGLDIGTNSVGWAVITDEYKVPSKKFKVLGNTDRHSIKKNLIGALLFDSGETAEATRLKRTARRRYTRRKNRICYLQEIFSNEMAKVDDSFFHRLEESFLVEEDKKHERHPIFGNIVDEVAYHEKYPTIYHLRKKLVDSTDKADLRLIYLALAHMIKFRGHFLIEGDLNPDNSDVDKLFIQLVQTYNQLFEENPINASGVDAKAILSARLSKSRRLENLIAQLPGEKKNGLFGNLIALSLGLTPNFKSNFDLAEDAKLQLSKDTYDDDLDNLLAQIGDQYADLFLAAKNLSDAILLSDILRVNTEITKAPLSASMIKRYDEHHQDLTLLKALVRQQLPEKYKEIFFDQSKNGYAGYIDGGASQEEFYKFIKPILEKMDGTEELLVKLNREDLLRKQRTFDNGSIPHQIHLGELHAILRRQEDFYPFLKDNREKIEKILTFRIPYYVGPLARGNSRFAWMTRKSEETITPWNFEEVVDKGASAQSFIERMTNFDKNLPNEKVLPKHSLLYEYFTVYNELTKVKYVTEGMRKPAFLSGEQKKAIVDLLFKTNRKVTVKQLKEDYFKKIECFDSVEISGVEDRFNASLGTYHDLLKIIKDKDFLDNEENEDILEDIVLTLTLFEDREMIEERLKTYAHLFDDKVMKQLKRRRYTGWGRLSRKLINGIRDKQSGKTILDFLKSDGFANRNFMQLIHDDSLTFKEDIQKAQVSGQGDSLHEHIANLAGSPAIKKGILQTVKVVDELVKVMGRHKPENIVIEMARENQTTQKGQKNSRERMKRIEEGIKELGSQILKEHPVENTQLQNEKLYLYYLQNGRDMYVDQELDINRLSDYDVDHIVPQSFLKDDSIDNKVLTRSDKARGKSDNVPSEEVVKKMKNYWRQLLNAKLITQRKFDNLTKAERGGLSELDKAGFIKRQLVETRQITKHVAQILDSRMNTKYDENDKLIREVKVITLKSKLVSDFRKDFQFYKVREINNYHHAHDAYLNAVVGTALIKKYPKLESEFVYGDYKVYDVRKMIAKSEQEIGKATAKYFFYSNIMNFFKTEITLANGEIRKRPLIETNGETGEIVWDKGRDFATVRKVLSMPQVNIVKKTEVQTGGFSKESILPKRNSDKLIARKKDWDPKKYGGFDSPTVAYSVLVVAKVEKGKSKKLKSVKELLGITIMERSSFEKNPIDFLEAKGYKEVKKDLIIKLPKYSLFELENGRKRMLASAGELQKGNELALPSKYVNFLYLASHYEKLKGSPEDNEQKQLFVEQHKHYLDEIIEQISEFSKRVILADANLDKVLSAYNKHRDKPIREQAENIIHLFTLTNLGAPAAFKYFDTTIDRKRYTSTKEVLDATLIHQSITGLYETRIDLSQLGGDGGPAPGGSEAAAKGGTAPLEEEYRLFLEAPIQNVTLLEQWKREIPKVWAEINPPGLASTQAPIHVQLLSTALPVRVRQYPITLEAKRSLRETIRKFRAAGILRPVHSPWNTPLLPVRKSGTSEYRMVQDLREVNKRVETIHPTVPNPYTLLSLLPPDRIWYSVLDLKDAFFCIPLAPESQLIFAFEWADAEEGESGQLTWTRLPQGFKNSPTLFNEALNRDLQGFRLDHPSVSLLQYVDDLLIAADTQAACLSATRDLLMTLAELGYRVSGKKAQLCQEEVTYLGFKIHKGSRSLSNSRTQAILQIPVPKTKRQVREFLGKIGYCRLFIPGFAELAQPLYAATRPGNDPLVWGEKEEEAFQSLKLALTQPPALALPSLDKPFQLFVEETSGAAKGVLTQALGPWKRPVAYLSKRLDPVAAGWPRCLRAIAAAALLTREASKLTFGQDIEITSSHNLESLLRSPPDKWLTNARITQYQVLLLDPPRVRFKQTAALNPATLLPETDDTLPIHHCLDTLDSLTSTRPDLTDQPLAQAEATLFTDGSSYIRDGKRYAGAAVVTLDSVIWAEPLPIGTSAQKAELIALTKALEWSKDKSVNIYTDSRYAFATLHVHGMIYRERGWLTAGGKAIKNAPEILALLTAVWLPKRVAVMHCKGHQKDDAPTSTGNRRADEVAREVAIRPLSTQATISAGKRTADGSEFEKRTADGSEFESPKKKAKVE

SEQ ID NO: 1372 - protein, 2133 aa, synthetic construct
MPAAKRVKLDGGDKKYSIGLDIGTNSVGWAVITDEYKVPSKKFKVLGNTDRHSIKKNLIGALLFDSGETAEATRLKRTARRRYTRRKNRICYLQEIFSNEMAKVDDSFFHRLEESFLVEEDKKHERHPIFGNIVDEVAYHEKYPTIYHLRKKLVDSTDKADLRLIYLALAHMIKFRGHFLIEGDLNPDNSDVDKLFIQLVQTYNQLFEENPINASGVDAKAILSARLSKSRRLENLIAQLPGEKKNGLFGNLIALSLGLTPNFKSNFDLAEDAKLQLSKDTYDDDLDNLLAQIGDQYADLFLAAKNLSDAILLSDILRVNTEITKAPLSASMIKRYDEHHQDLTLLKALVRQQLPEKYKEIFFDQSKNGYAGYIDGGASQEEFYKFIKPILEKMDGTEELLVKLNREDLLRKQRTFDNGSIPHQIHLGELHAILRRQEDFYPFLKDNREKIEKILTFRIPYYVGPLARGNSRFAWMTRKSEETITPWNFEEVVDKGASAQSFIERMTNFDKNLPNEKVLPKHSLLYEYFTVYNELTKVKYVTEGMRKPAFLSGEQKKAIVDLLFKTNRKVTVKQLKEDYFKKIECFDSVEISGVEDRFNASLGTYHDLLKIIKDKDFLDNEENEDILEDIVLTLTLFEDREMIEERLKTYAHLFDDKVMKQLKRRRYTGWGRLSRKLINGIRDKQSGKTILDFLKSDGFANRNFMQLIHDDSLTFKEDIQKAQVSGQGDSLHEHIANLAGSPAIKKGILQTVKVVDELVKVMGRHKPENIVIEMARENQTTQKGQKNSRERMKRIEEGIKELGSQILKEHPVENTQLQNEKLYLYYLQNGRDMYVDQELDINRLSDYDVDHIVPQSFLKDDSIDNKVLTRSDKARGKSDNVPSEEVVKKMKNYWRQLLNAKLITQRKFDNLTKAERGGLSELDKAGFIKRQLVETRQITKHVAQILDSRMNTKYDENDKLIREVKVITLKSKLVSDFRKDFQFYKVREINNYHHAHDAYLNAVVGTALIKKYPKLESEFVYGDYKVYDVRKMIAKSEQEIGKATAKYFFYSNIMNFFKTEITLANGEIRKRPLIETNGETGEIVWDKGRDFATVRKVLSMPQVNIVKKTEVQTGGFSKESILPKRNSDKLIARKKDWDPKKYGGFDSPTVAYSVLVVAKVEKGKSKKLKSVKELLGITIMERSSFEKNPIDFLEAKGYKEVKKDLIIKLPKYSLFELENGRKRMLASAGELQKGNELALPSKYVNFLYLASHYEKLKGSPEDNEQKQLFVEQHKHYLDEIIEQISEFSKRVILADANLDKVLSAYNKHRDKPIREQAENIIHLFTLTNLGAPAAFKYFDTTIDRKRYTSTKEVLDATLIHQSITGLYETRIDLSQLGGDGGAEAAAKEAAAKEAAAKEAAAKALEAEAAAKEAAAKEAAAKEAAAKAGGTAPLEEEYRLFLEAPIQNVTLLEQWKREIPKVWAEINPPGLASTQAPIHVQLLSTALPVRVRQYPITLEAKRSLRETIRKFRAAGILRPVHSPWNTPLLPVRKSGTSEYRMVQDLREVNKRVETIHPTVPNPYTLLSLLPPDRIWYSVLDLKDAFFCIPLAPESQLIFAFEWADAEEGESGQLTWTRLPQGFKNSPTLFNEALNRDLQGFRLDHPSVSLLQYVDDLLIAADTQAACLSATRDLLMTLAELGYRVSGKKAQLCQEEVTYLGFKIHKGSRSLSNSRTQAILQIPVPKTKRQVREFLGKIGYCRLFIPGFAELAQPLYAATRPGNDPLVWGEKEEEAFQSLKLALTQPPALALPSLDKPFQLFVEETSGAAKGVLTQALGPWKRPVAYLSKRLDPVAAGWPRCLRAIAAAALLTREASKLTFGQDIEITSSHNLESLLRSPPDKWLTNARITQYQVLLLDPPRVRFKQTAALNPATLLPETDDTLPIHHCLDTLDSLTSTRPDLTDQPLAQAEATLFTDGSSYIRDGKRYAGAAVVTLDSVIWAEPLPIGTSAQKAELIALTKALEWSKDKSVNIYTDSRYAFATLHVHGMIYRERGWLTAGGKAIKNAPEILALLTAVWLPKRVAVMHCKGHQKDDAPTSTGNRRADEVAREVAIRPLSTQATISAGKRTADGSEFEKRTADGSEFESPKKKAKVE

SEQ ID NO: 1373 - protein, 2117 aa, synthetic construct
MPAAKRVKLDGGDKKYSIGLDIGTNSVGWAVITDEYKVPSKKFKVLGNTDRHSIKKNLIGALLFDSGETAEATRLKRTARRRYTRRKNRICYLQEIFSNEMAKVDDSFFHRLEESFLVEEDKKHERHPIFGNIVDEVAYHEKYPTIYHLRKKLVDSTDKADLRLIYLALAHMIKFRGHFLIEGDLNPDNSDVDKLFIQLVQTYNQLFEENPINASGVDAKAILSARLSKSRRLENLIAQLPGEKKNGLFGNLIALSLGLTPNFKSNFDLAEDAKLQLSKDTYDDDLDNLLAQIGDQYADLFLAAKNLSDAILLSDILRVNTEITKAPLSASMIKRYDEHHQDLTLLKALVRQQLPEKYKEIFFDQSKNGYAGYIDGGASQEEFYKFIKPILEKMDGTEELLVKLNREDLLRKQRTFDNGSIPHQIHLGELHAILRRQEDFYPFLKDNREKIEKILTFRIPYYVGPLARGNSRFAWMTRKSEETITPWNFEEVVDKGASAQSFIERMTNFDKNLPNEKVLPKHSLLYEYFTVYNELTKVKYVTEGMRKPAFLSGEQKKAIVDLLFKTNRKVTVKQLKEDYFKKIECFDSVEISGVEDRFNASLGTYHDLLKIIKDKDFLDNEENEDILEDIVLTLTLFEDREMIEERLKTYAHLFDDKVMKQLKRRRYTGWGRLSRKLINGIRDKQSGKTILDFLKSDGFANRNFMQLIHDDSLTFKEDIQKAQVSGQGDSLHEHIANLAGSPAIKKGILQTVKVVDELVKVMGRHKPENIVIEMARENQTTQKGQKNSRERMKRIEEGIKELGSQILKEHPVENTQLQNEKLYLYYLQNGRDMYVDQELDINRLSDYDVDHIVPQSFLKDDSIDNKVLTRSDKARGKSDNVPSEEVVKKMKNYWRQLLNAKLITQRKFDNLTKAERGGLSELDKAGFIKRQLVETRQITKHVAQILDSRMNTKYDENDKLIREVKVITLKSKLVSDFRKDFQFYKVREINNYHHAHDAYLNAVVGTALIKKYPKLESEFVYGDYKVYDVRKMIAKSEQEIGKATAKYFFYSNIMNFFKTEITLANGEIRKRPLIETNGETGEIVWDKGRDFATVRKVLSMPQVNIVKKTEVQTGGFSKESILPKRNSDKLIARKKDWDPKKYGGFDSPTVAYSVLVVAKVEKGKSKKLKSVKELLGITIMERSSFEKNPIDFLEAKGYKEVKKDLIIKLPKYSLFELENGRKRMLASAGELQKGNELALPSKYVNFLYLASHYEKLKGSPEDNEQKQLFVEQHKHYLDEIIEQISEFSKRVILADANLDKVLSAYNKHRDKPIREQAENIIHLFTLTNLGAPAAFKYFDTTIDRKRYTSTKEVLDATLIHQSITGLYETRIDLSQLGGDGGGGGGSGGGGSGGGGSGGGGSGGGGSGGGGSGGTAPLEEEYRLFLEAPIQNVTLLEQWKREIPKVWAEINPPGLASTQAPIHVQLLSTALPVRVRQYPITLEAKRSLRETIRKFRAAGILRPVHSPWNTPLLPVRKSGTSEYRMVQDLREVNKRVETIHPTVPNPYTLLSLLPPDRIWYSVLDLKDAFFCIPLAPESQLIFAFEWADAEEGESGQLTWTRLPQGFKNSPTLFNEALNRDLQGFRLDHPSVSLLQYVDDLLIAADTQAACLSATRDLLMTLAELGYRVSGKKAQLCQEEVTYLGFKIHKGSRSLSNSRTQAILQIPVPKTKRQVREFLGKIGYCRLFIPGFAELAQPLYAATRPGNDPLVWGEKEEEAFQSLKLALTQPPALALPSLDKPFQLFVEETSGAAKGVLTQALGPWKRPVAYLSKRLDPVAAGWPRCLRAIAAAALLTREASKLTFGQDIEITSSHNLESLLRSPPDKWLTNARITQYQVLLLDPPRVRFKQTAALNPATLLPETDDTLPIHHCLDTLDSLTSTRPDLTDQPLAQAEATLFTDGSSYIRDGKRYAGAAVVTLDSVIWAEPLPIGTSAQKAELIALTKALEWSKDKSVNIYTDSRYAFATLHVHGMIYRERGWLTAGGKAIKNAPEILALLTAVWLPKRVAVMHCKGHQKDDAPTSTGNRRADEVAREVAIRPLSTQATISAGKRTADGSEFEKRTADGSEFESPKKKAKVE

SEQ ID NO: 1374 - protein, 2107 aa, synthetic construct
MPAAKRVKLDGGDKKYSIGLDIGTNSVGWAVITDEYKVPSKKFKVLGNTDRHSIKKNLIGALLFDSGETAEATRLKRTARRRYTRRKNRICYLQEIFSNEMAKVDDSFFHRLEESFLVEEDKKHERHPIFGNIVDEVAYHEKYPTIYHLRKKLVDSTDKADLRLIYLALAHMIKFRGHFLIEGDLNPDNSDVDKLFIQLVQTYNQLFEENPINASGVDAKAILSARLSKSRRLENLIAQLPGEKKNGLFGNLIALSLGLTPNFKSNFDLAEDAKLQLSKDTYDDDLDNLLAQIGDQYADLFLAAKNLSDAILLSDILRVNTEITKAPLSASMIKRYDEHHQDLTLLKALVRQQLPEKYKEIFFDQSKNGYAGYIDGGASQEEFYKFIKPILEKMDGTEELLVKLNREDLLRKQRTFDNGSIPHQIHLGELHAILRRQEDFYPFLKDNREKIEKILTFRIPYYVGPLARGNSRFAWMTRKSEETITPWNFEEVVDKGASAQSFIERMTNFDKNLPNEKVLPKHSLLYEYFTVYNELTKVKYVTEGMRKPAFLSGEQKKAIVDLLFKTNRKVTVKQLKEDYFKKIECFDSVEISGVEDRFNASLGTYHDLLKIIKDKDFLDNEENEDILEDIVLTLTLFEDREMIEERLKTYAHLFDDKVMKQLKRRRYTGWGRLSRKLINGIRDKQSGKTILDFLKSDGFANRNFMQLIHDDSLTFKEDIQKAQVSGQGDSLHEHIANLAGSPAIKKGILQTVKVVDELVKVMGRHKPENIVIEMARENQTTQKGQKNSRERMKRIEEGIKELGSQILKEHPVENTQLQNEKLYLYYLQNGRDMYVDQELDINRLSDYDVDHIVPQSFLKDDSIDNKVLTRSDKARGKSDNVPSEEVVKKMKNYWRQLLNAKLITQRKFDNLTKAERGGLSELDKAGFIKRQLVETRQITKHVAQILDSRMNTKYDENDKLIREVKVITLKSKLVSDFRKDFQFYKVREINNYHHAHDAYLNAVVGTALIKKYPKLESEFVYGDYKVYDVRKMIAKSEQEIGKATAKYFFYSNIMNFFKTEITLANGEIRKRPLIETNGETGEIVWDKGRDFATVRKVLSMPQVNIVKKTEVQTGGFSKESILPKRNSDKLIARKKDWDPKKYGGFDSPTVAYSVLVVAKVEKGKSKKLKSVKELLGITIMERSSFEKNPIDFLEAKGYKEVKKDLIIKLPKYSLFELENGRKRMLASAGELQKGNELALPSKYVNFLYLASHYEKLKGSPEDNEQKQLFVEQHKHYLDEIIEQISEFSKRVILADANLDKVLSAYNKHRDKPIREQAENIIHLFTLTNLGAPAAFKYFDTTIDRKRYTSTKEVLDATLIHQSITGLYETRIDLSQLGGDGGGGGGSGGGGSGGGGSGGGGSGGTAPLEEEYRLFLEAPIQNVTLLEQWKREIPKVWAEINPPGLASTQAPIHVQLLSTALPVRVRQYPITLEAKRSLRETIRKFRAAGILRPVHSPWNTPLLPVRKSGTSEYRMVQDLREVNKRVETIHPTVPNPYTLLSLLPPDRIWYSVLDLKDAFFCIPLAPESQLIFAFEWADAEEGESGQLTWTRLPQGFKNSPTLFNEALNRDLQGFRLDHPSVSLLQYVDDLLIAADTQAACLSATRDLLMTLAELGYRVSGKKAQLCQEEVTYLGFKIHKGSRSLSNSRTQAILQIPVPKTKRQVREFLGKIGYCRLFIPGFAELAQPLYAATRPGNDPLVWGEKEEEAFQSLKLALTQPPALALPSLDKPFQLFVEETSGAAKGVLTQALGPWKRPVAYLSKRLDPVAAGWPRCLRAIAAAALLTREASKLTFGQDIEITSSHNLESLLRSPPDKWLTNARITQYQVLLLDPPRVRFKQTAALNPATLLPETDDTLPIHHCLDTLDSLTSTRPDLTDQPLAQAEATLFTDGSSYIRDGKRYAGAAVVTLDSVIWAEPLPIGTSAQKAELIALTKALEWSKDKSVNIYTDSRYAFATLHVHGMIYRERGWLTAGGKAIKNAPEILALLTAVWLPKRVAVMHCKGHQKDDAPTSTGNRRADEVAREVAIRPLSTQATISAGKRTADGSEFEKRTADGSEFESPKKKAKVE

SEQ ID NO: 1375 - protein, 2093 aa, synthetic construct
MPAAKRVKLDGGDKKYSIGLDIGTNSVGWAVITDEYKVPSKKFKVLGNTDRHSIKKNLIGALLFDSGETAEATRLKRTARRRYTRRKNRICYLQEIFSNEMAKVDDSFFHRLEESFLVEEDKKHERHPIFGNIVDEVAYHEKYPTIYHLRKKLVDSTDKADLRLIYLALAHMIKFRGHFLIEGDLNPDNSDVDKLFIQLVQTYNQLFEENPINASGVDAKAILSARLSKSRRLENLIAQLPGEKKNGLFGNLIALSLGLTPNFKSNFDLAEDAKLQLSKDTYDDDLDNLLAQIGDQYADLFLAAKNLSDAILLSDILRVNTEITKAPLSASMIKRYDEHHQDLTLLKALVRQQLPEKYKEIFFDQSKNGYAGYIDGGASQEEFYKFIKPILEKMDGTEELLVKLNREDLLRKQRTFDNGSIPHQIHLGELHAILRRQEDFYPFLKDNREKIEKILTFRIPYYVGPLARGNSRFAWMTRKSEETITPWNFEEVVDKGASAQSFIERMTNFDKNLPNEKVLPKHSLLYEYFTVYNELTKVKYVTEGMRKPAFLSGEQKKAIVDLLFKTNRKVTVKQLKEDYFKKIECFDSVEISGVEDRFNASLGTYHDLLKIIKDKDFLDNEENEDILEDIVLTLTLFEDREMIEERLKTYAHLFDDKVMKQLKRRRYTGWGRLSRKLINGIRDKQSGKTILDFLKSDGFANRNFMQLIHDDSLTFKEDIQKAQVSGQGDSLHEHIANLAGSPAIKKGILQTVKVVDELVKVMGRHKPENIVIEMARENQTTQKGQKNSRERMKRIEEGIKELGSQILKEHPVENTQLQNEKLYLYYLQNGRDMYVDQELDINRLSDYDVDHIVPQSFLKDDSIDNKVLTRSDKARGKSDNVPSEEVVKKMKNYWRQLLNAKLITQRKFDNLTKAERGGLSELDKAGFIKRQLVETRQITKHVAQILDSRMNTKYDENDKLIREVKVITLKSKLVSDFRKDFQFYKVREINNYHHAHDAYLNAVVGTALIKKYPKLESEFVYGDYKVYDVRKMIAKSEQEIGKATAKYFFYSNIMNFFKTEITLANGEIRKRPLIETNGETGEIVWDKGRDFATVRKVLSMPQVNIVKKTEVQTGGFSKESILPKRNSDKLIARKKDWDPKKYGGFDSPTVAYSVLVVAKVEKGKSKKLKSVKELLGITIMERSSFEKNPIDFLEAKGYKEVKKDLIIKLPKYSLFELENGRKRMLASAGELQKGNELALPSKYVNFLYLASHYEKLKGSPEDNEQKQLFVEQHKHYLDEIIEQISEFSKRVILADANLDKVLSAYNKHRDKPIREQAENIIHLFTLTNLGAPAAFKYFDTTIDRKRYTSTKEVLDATLIHQSITGLYETRIDLSQLGGDGGGSSPAPGGTAPLEEEYRLFLEAPIQNVTLLEQWKREIPKVWAEINPPGLASTQAPIHVQLLSTALPVRVRQYPITLEAKRSLRETIRKFRAAGILRPVHSPWNTPLLPVRKSGTSEYRMVQDLREVNKRVETIHPTVPNPYTLLSLLPPDRIWYSVLDLKDAFFCIPLAPESQLIFAFEWADAEEGESGQLTWTRLPQGFKNSPTLFNEALNRDLQGFRLDHPSVSLLQYVDDLLIAADTQAACLSATRDLLMTLAELGYRVSGKKAQLCQEEVTYLGFKIHKGSRSLSNSRTQAILQIPVPKTKRQVREFLGKIGYCRLFIPGFAELAQPLYAATRPGNDPLVWGEKEEEAFQSLKLALTQPPALALPSLDKPFQLFVEETSGAAKGVLTQALGPWKRPVAYLSKRLDPVAAGWPRCLRAIAAAALLTREASKLTFGQDIEITSSHNLESLLRSPPDKWLTNARITQYQVLLLDPPRVRFKQTAALNPATLLPETDDTLPIHHCLDTLDSLTSTRPDLTDQPLAQAEATLFTDGSSYIRDGKRYAGAAVVTLDSVIWAEPLPIGTSAQKAELIALTKALEWSKDKSVNIYTDSRYAFATLHVHGMIYRERGWLTAGGKAIKNAPEILALLTAVWLPKRVAVMHCKGHQKDDAPTSTGNRRADEVAREVAIRPLSTQATISAGKRTADGSEFEKRTADGSEFESPKKKAKVE

SEQ ID NO: 1376 - protein, 2103 aa, synthetic construct
MPAAKRVKLDGGDKKYSIGLDIGTNSVGWAVITDEYKVPSKKFKVLGNTDRHSIKKNLIGALLFDSGETAEATRLKRTARRRYTRRKNRICYLQEIFSNEMAKVDDSFFHRLEESFLVEEDKKHERHPIFGNIVDEVAYHEKYPTIYHLRKKLVDSTDKADLRLIYLALAHMIKFRGHFLIEGDLNPDNSDVDKLFIQLVQTYNQLFEENPINASGVDAKAILSARLSKSRRLENLIAQLPGEKKNGLFGNLIALSLGLTPNFKSNFDLAEDAKLQLSKDTYDDDLDNLLAQIGDQYADLFLAAKNLSDAILLSDILRVNTEITKAPLSASMIKRYDEHHQDLTLLKALVRQQLPEKYKEIFFDQSKNGYAGYIDGGASQEEFYKFIKPILEKMDGTEELLVKLNREDLLRKQRTFDNGSIPHQIHLGELHAILRRQEDFYPFLKDNREKIEKILTFRIPYYVGPLARGNSRFAWMTRKSEETITPWNFEEVVDKGASAQSFIERMTNFDKNLPNEKVLPKHSLLYEYFTVYNELTKVKYVTEGMRKPAFLSGEQKKAIVDLLFKTNRKVTVKQLKEDYFKKIECFDSVEISGVEDRFNASLGTYHDLLKIIKDKDFLDNEENEDILEDIVLTLTLFEDREMIEERLKTYAHLFDDKVMKQLKRRRYTGWGRLSRKLINGIRDKQSGKTILDFLKSDGFANRNFMQLIHDDSLTFKEDIQKAQVSGQGDSLHEHIANLAGSPAIKKGILQTVKVVDELVKVMGRHKPENIVIEMARENQTTQKGQKNSRERMKRIEEGIKELGSQILKEHPVENTQLQNEKLYLYYLQNGRDMYVDQELDINRLSDYDVDHIVPQSFLKDDSIDNKVLTRSDKARGKSDNVPSEEVVKKMKNYWRQLLNAKLITQRKFDNLTKAERGGLSELDKAGFIKRQLVETRQITKHVAQILDSRMNTKYDENDKLIREVKVITLKSKLVSDFRKDFQFYKVREINNYHHAHDAYLNAVVGTALIKKYPKLESEFVYGDYKVYDVRKMIAKSEQEIGKATAKYFFYSNIMNFFKTEITLANGEIRKRPLIETNGETGEIVWDKGRDFATVRKVLSMPQVNIVKKTEVQTGGFSKESILPKRNSDKLIARKKDWDPKKYGGFDSPTVAYSVLVVAKVEKGKSKKLKSVKELLGITIMERSSFEKNPIDFLEAKGYKEVKKDLIIKLPKYSLFELENGRKRMLASAGELQKGNELALPSKYVNFLYLASHYEKLKGSPEDNEQKQLFVEQHKHYLDEIIEQISEFSKRVILADANLDKVLSAYNKHRDKPIREQAENIIHLFTLTNLGAPAAFKYFDTTIDRKRYTSTKEVLDATLIHQSITGLYETRIDLSQLGGDGGSGSETPGTSESATPESGGTAPLEEEYRLFLEAPIQNVTLLEQWKREIPKVWAEINPPGLASTQAPIHVQLLSTALPVRVRQYPITLEAKRSLRETIRKFRAAGILRPVHSPWNTPLLPVRKSGTSEYRMVQDLREVNKRVETIHPTVPNPYTLLSLLPPDRIWYSVLDLKDAFFCIPLAPESQLIFAFEWADAEEGESGQLTWTRLPQGFKNSPTLFNEALNRDLQGFRLDHPSVSLLQYVDDLLIAADTQAACLSATRDLLMTLAELGYRVSGKKAQLCQEEVTYLGFKIHKGSRSLSNSRTQAILQIPVPKTKRQVREFLGKIGYCRLFIPGFAELAQPLYAATRPGNDPLVWGEKEEEAFQSLKLALTQPPALALPSLDKPFQLFVEETSGAAKGVLTQALGPWKRPVAYLSKRLDPVAAGWPRCLRAIAAAALLTREASKLTFGQDIEITSSHNLESLLRSPPDKWLTNARITQYQVLLLDPPRVRFKQTAALNPATLLPETDDTLPIHHCLDTLDSLTSTRPDLTDQPLAQAEATLFTDGSSYIRDGKRYAGAAVVTLDSVIWAEPLPIGTSAQKAELIALTKALEWSKDKSVNIYTDSRYAFATLHVHGMIYRERGWLTAGGKAIKNAPEILALLTAVWLPKRVAVMHCKGHQKDDAPTSTGNRRADEVAREVAIRPLSTQATISAGKRTADGSEFEKRTADGSEFESPKKKAKVE

SEQ ID NO: 1377 - protein, 2098 aa, synthetic construct
MPAAKRVKLDGGDKKYSIGLDIGTNSVGWAVITDEYKVPSKKFKVLGNTDRHSIKKNLIGALLFDSGETAEATRLKRTARRRYTRRKNRICYLQEIFSNEMAKVDDSFFHRLEESFLVEEDKKHERHPIFGNIVDEVAYHEKYPTIYHLRKKLVDSTDKADLRLIYLALAHMIKFRGHFLIEGDLNPDNSDVDKLFIQLVQTYNQLFEENPINASGVDAKAILSARLSKSRRLENLIAQLPGEKKNGLFGNLIALSLGLTPNFKSNFDLAEDAKLQLSKDTYDDDLDNLLAQIGDQYADLFLAAKNLSDAILLSDILRVNTEITKAPLSASMIKRYDEHHQDLTLLKALVRQQLPEKYKEIFFDQSKNGYAGYIDGGASQEEFYKFIKPILEKMDGTEELLVKLNREDLLRKQRTFDNGSIPHQIHLGELHAILRRQEDFYPFLKDNREKIEKILTFRIPYYVGPLARGNSRFAWMTRKSEETITPWNFEEVVDKGASAQSFIERMTNFDKNLPNEKVLPKHSLLYEYFTVYNELTKVKYVTEGMRKPAFLSGEQKKAIVDLLFKTNRKVTVKQLKEDYFKKIECFDSVEISGVEDRFNASLGTYHDLLKIIKDKDFLDNEENEDILEDIVLTLTLFEDREMIEERLKTYAHLFDDKVMKQLKRRRYTGWGRLSRKLINGIRDKQSGKTILDFLKSDGFANRNFMQLIHDDSLTFKEDIQKAQVSGQGDSLHEHIANLAGSPAIKKGILQTVKVVDELVKVMGRHKPENIVIEMARENQTTQKGQKNSRERMKRIEEGIKELGSQILKEHPVENTQLQNEKLYLYYLQNGRDMYVDQELDINRLSDYDVDHIVPQSFLKDDSIDNKVLTRSDKARGKSDNVPSEEVVKKMKNYWRQLLNAKLITQRKFDNLTKAERGGLSELDKAGFIKRQLVETRQITKHVAQILDSRMNTKYDENDKLIREVKVITLKSKLVSDFRKDFQFYKVREINNYHHAHDAYLNAVVGTALIKKYPKLESEFVYGDYKVYDVRKMIAKSEQEIGKATAKYFFYSNIMNFFKTEITLANGEIRKRPLIETNGETGEIVWDKGRDFATVRKVLSMPQVNIVKKTEVQTGGFSKESILPKRNSDKLIARKKDWDPKKYGGFDSPTVAYSVLVVAKVEKGKSKKLKSVKELLGITIMERSSFEKNPIDFLEAKGYKEVKKDLIIKLPKYSLFELENGRKRMLASAGELQKGNELALPSKYVNFLYLASHYEKLKGSPEDNEQKQLFVEQHKHYLDEIIEQISEFSKRVILADANLDKVLSAYNKHRDKPIREQAENIIHLFTLTNLGAPAAFKYFDTTIDRKRYTSTKEVLDATLIHQSITGLYETRIDLSQLGGDGGPAPEAAAKGGSGGTAPLEEEYRLFLEAPIQNVTLLEQWKREIPKVWAEINPPGLASTQAPIHVQLLSTALPVRVRQYPITLEAKRSLRETIRKFRAAGILRPVHSPWNTPLLPVRKSGTSEYRMVQDLREVNKRVETIHPTVPNPYTLLSLLPPDRIWYSVLDLKDAFFCIPLAPESQLIFAFEWADAEEGESGQLTWTRLPQGFKNSPTLFNEALNRDLQGFRLDHPSVSLLQYVDDLLIAADTQAACLSATRDLLMTLAELGYRVSGKKAQLCQEEVTYLGFKIHKGSRSLSNSRTQAILQIPVPKTKRQVREFLGKIGYCRLFIPGFAELAQPLYAATRPGNDPLVWGEKEEEAFQSLKLALTQPPALALPSLDKPFQLFVEETSGAAKGVLTQALGPWKRPVAYLSKRLDPVAAGWPRCLRAIAAAALLTREASKLTFGQDIEITSSHNLESLLRSPPDKWLTNARITQYQVLLLDPPRVRFKQTAALNPATLLPETDDTLPIHHCLDTLDSLTSTRPDLTDQPLAQAEATLFTDGSSYIRDGKRYAGAAVVTLDSVIWAEPLPIGTSAQKAELIALTKALEWSKDKSVNIYTDSRYAFATLHVHGMIYRERGWLTAGGKAIKNAPEILALLTAVWLPKRVAVMHCKGHQKDDAPTSTGNRRADEVAREVAIRPLSTQATISAGKRTADGSEFEKRTADGSEFESPKKKAKVE

SEQ ID NO: 1378-1379 - skipped (2 entries)

SEQ ID NO: 1380 - protein, 2092 aa, synthetic construct
MPAAKRVKLDGGDKKYSIGLDIGTNSVGWAVITDEYKVPSKKFKVLGNTDRHSIKKNLIGALLFDSGETAEATRLKRTARRRYTRRKNRICYLQEIFSNEMAKVDDSFFHRLEESFLVEEDKKHERHPIFGNIVDEVAYHEKYPTIYHLRKKLVDSTDKADLRLIYLALAHMIKFRGHFLIEGDLNPDNSDVDKLFIQLVQTYNQLFEENPINASGVDAKAILSARLSKSRRLENLIAQLPGEKKNGLFGNLIALSLGLTPNFKSNFDLAEDAKLQLSKDTYDDDLDNLLAQIGDQYADLFLAAKNLSDAILLSDILRVNTEITKAPLSASMIKRYDEHHQDLTLLKALVRQQLPEKYKEIFFDQSKNGYAGYIDGGASQEEFYKFIKPILEKMDGTEELLVKLNREDLLRKQRTFDNGSIPHQIHLGELHAILRRQEDFYPFLKDNREKIEKILTFRIPYYVGPLARGNSRFAWMTRKSEETITPWNFEEVVDKGASAQSFIERMTNFDKNLPNEKVLPKHSLLYEYFTVYNELTKVKYVTEGMRKPAFLSGEQKKAIVDLLFKTNRKVTVKQLKEDYFKKIECFDSVEISGVEDRFNASLGTYHDLLKIIKDKDFLDNEENEDILEDIVLTLTLFEDREMIEERLKTYAHLFDDKVMKQLKRRRYTGWGRLSRKLINGIRDKQSGKTILDFLKSDGFANRNFMQLIHDDSLTFKEDIQKAQVSGQGDSLHEHIANLAGSPAIKKGILQTVKVVDELVKVMGRHKPENIVIEMARENQTTQKGQKNSRERMKRIEEGIKELGSQILKEHPVENTQLQNEKLYLYYLQNGRDMYVDQELDINRLSDYDVDHIVPQSFLKDDSIDNKVLTRSDKARGKSDNVPSEEVVKKMKNYWRQLLNAKLITQRKFDNLTKAERGGLSELDKAGFIKRQLVETRQITKHVAQILDSRMNTKYDENDKLIREVKVITLKSKLVSDFRKDFQFYKVREINNYHHAHDAYLNAVVGTALIKKYPKLESEFVYGDYKVYDVRKMIAKSEQEIGKATAKYFFYSNIMNFFKTEITLANGEIRKRPLIETNGETGEIVWDKGRDFATVRKVLSMPQVNIVKKTEVQTGGFSKESILPKRNSDKLIARKKDWDPKKYGGFDSPTVAYSVLVVAKVEKGKSKKLKSVKELLGITIMERSSFEKNPIDFLEAKGYKEVKKDLIIKLPKYSLFELENGRKRMLASAGELQKGNELALPSKYVNFLYLASHYEKLKGSPEDNEQKQLFVEQHKHYLDEIIEQISEFSKRVILADANLDKVLSAYNKHRDKPIREQAENIIHLFTLTNLGAPAAFKYFDTTIDRKRYTSTKEVLDATLIHQSITGLYETRIDLSQLGGDGGEAAAKGGTAPLEEEYRLFLEAPIQNVTLLEQWKREIPKVWAEINPPGLASTQAPIHVQLLSTALPVRVRQYPITLEAKRSLRETIRKFRAAGILRPVHSPWNTPLLPVRKSGTSEYRMVQDLREVNKRVETIHPTVPNPYTLLSLLPPDRIWYSVLDLKDAFFCIPLAPESQLIFAFEWADAEEGESGQLTWTRLPQGFKNSPTLFNEALNRDLQGFRLDHPSVSLLQYVDDLLIAADTQAACLSATRDLLMTLAELGYRVSGKKAQLCQEEVTYLGFKIHKGSRSLSNSRTQAILQIPVPKTKRQVREFLGKIGYCRLFIPGFAELAQPLYAATRPGNDPLVWGEKEEEAFQSLKLALTQPPALALPSLDKPFQLFVEETSGAAKGVLTQALGPWKRPVAYLSKRLDPVAAGWPRCLRAIAAAALLTREASKLTFGQDIEITSSHNLESLLRSPPDKWLTNARITQYQVLLLDPPRVRFKQTAALNPATLLPETDDTLPIHHCLDTLDSLTSTRPDLTDQPLAQAEATLFTDGSSYIRDGKRYAGAAVVTLDSVIWAEPLPIGTSAQKAELIALTKALEWSKDKSVNIYTDSRYAFATLHVHGMIYRERGWLTAGGKAIKNAPEILALLTAVWLPKRVAVMHCKGHQKDDAPTSTGNRRADEVAREVAIRPLSTQATISAGKRTADGSEFEKRTADGSEFESPKKKAKVE

SEQ ID NO: 1381 - protein, 2098 aa, synthetic construct
MPAAKRVKLDGGDKKYSIGLDIGTNSVGWAVITDEYKVPSKKFKVLGNTDRHSIKKNLIGALLFDSGETAEATRLKRTARRRYTRRKNRICYLQEIFSNEMAKVDDSFFHRLEESFLVEEDKKHERHPIFGNIVDEVAYHEKYPTIYHLRKKLVDSTDKADLRLIYLALAHMIKFRGHFLIEGDLNPDNSDVDKLFIQLVQTYNQLFEENPINASGVDAKAILSARLSKSRRLENLIAQLPGEKKNGLFGNLIALSLGLTPNFKSNFDLAEDAKLQLSKDTYDDDLDNLLAQIGDQYADLFLAAKNLSDAILLSDILRVNTEITKAPLSASMIKRYDEHHQDLTLLKALVRQQLPEKYKEIFFDQSKNGYAGYIDGGASQEEFYKFIKPILEKMDGTEELLVKLNREDLLRKQRTFDNGSIPHQIHLGELHAILRRQEDFYPFLKDNREKIEKILTFRIPYYVGPLARGNSRFAWMTRKSEETITPWNFEEVVDKGASAQSFIERMTNFDKNLPNEKVLPKHSLLYEYFTVYNELTKVKYVTEGMRKPAFLSGEQKKAIVDLLFKTNRKVTVKQLKEDYFKKIECFDSVEISGVEDRFNASLGTYHDLLKIIKDKDFLDNEENEDILEDIVLTLTLFEDREMIEERLKTYAHLFDDKVMKQLKRRRYTGWGRLSRKLINGIRDKQSGKTILDFLKSDGFANRNFMQLIHDDSLTFKEDIQKAQVSGQGDSLHEHIANLAGSPAIKKGILQTVKVVDELVKVMGRHKPENIVIEMARENQTTQKGQKNSRERMKRIEEGIKELGSQILKEHPVENTQLQNEKLYLYYLQNGRDMYVDQELDINRLSDYDVDHIVPQSFLKDDSIDNKVLTRSDKARGKSDNVPSEEVVKKMKNYWRQLLNAKLITQRKFDNLTKAERGGLSELDKAGFIKRQLVETRQITKHVAQILDSRMNTKYDENDKLIREVKVITLKSKLVSDFRKDFQFYKVREINNYHHAHDAYLNAVVGTALIKKYPKLESEFVYGDYKVYDVRKMIAKSEQEIGKATAKYFFYSNIMNFFKTEITLANGEIRKRPLIETNGETGEIVWDKGRDFATVRKVLSMPQVNIVKKTEVQTGGFSKESILPKRNSDKLIARKKDWDPKKYGGFDSPTVAYSVLVVAKVEKGKSKKLKSVKELLGITIMERSSFEKNPIDFLEAKGYKEVKKDLIIKLPKYSLFELENGRKRMLASAGELQKGNELALPSKYVNFLYLASHYEKLKGSPEDNEQKQLFVEQHKHYLDEIIEQISEFSKRVILADANLDKVLSAYNKHRDKPIREQAENIIHLFTLTNLGAPAAFKYFDTTIDRKRYTSTKEVLDATLIHQSITGLYETRIDLSQLGGDGGGSSEAAAKPAPGGTAPLEEEYRLFLEAPIQNVTLLEQWKREIPKVWAEINPPGLASTQAPIHVQLLSTALPVRVRQYPITLEAKRSLRETIRKFRAAGILRPVHSPWNTPLLPVRKSGTSEYRMVQDLREVNKRVETIHPTVPNPYTLLSLLPPDRIWYSVLDLKDAFFCIPLAPESQLIFAFEWADAEEGESGQLTWTRLPQGFKNSPTLFNEALNRDLQGFRLDHPSVSLLQYVDDLLIAADTQAACLSATRDLLMTLAELGYRVSGKKAQLCQEEVTYLGFKIHKGSRSLSNSRTQAILQIPVPKTKRQVREFLGKIGYCRLFIPGFAELAQPLYAATRPGNDPLVWGEKEEEAFQSLKLALTQPPALALPSLDKPFQLFVEETSGAAKGVLTQALGPWKRPVAYLSKRLDPVAAGWPRCLRAIAAAALLTREASKLTFGQDIEITSSHNLESLLRSPPDKWLTNARITQYQVLLLDPPRVRFKQTAALNPATLLPETDDTLPIHHCLDTLDSLTSTRPDLTDQPLAQAEATLFTDGSSYIRDGKRYAGAAVVTLDSVIWAEPLPIGTSAQKAELIALTKALEWSKDKSVNIYTDSRYAFATLHVHGMIYRERGWLTAGGKAIKNAPEILALLTAVWLPKRVAVMHCKGHQKDDAPTSTGNRRADEVAREVAIRPLSTQATISAGKRTADGSEFEKRTADGSEFESPKKKAKVE

SEQ ID NO: 1382 - protein, 2105 aa, synthetic construct
MPAAKRVKLDGGDKKYSIGLDIGTNSVGWAVITDEYKVPSKKFKVLGNTDRHSIKKNLIGALLFDSGETAEATRLKRTARRRYTRRKNRICYLQEIFSNEMAKVDDSFFHRLEESFLVEEDKKHERHPIFGNIVDEVAYHEKYPTIYHLRKKLVDSTDKADLRLIYLALAHMIKFRGHFLIEGDLNPDNSDVDKLFIQLVQTYNQLFEENPINASGVDAKAILSARLSKSRRLENLIAQLPGEKKNGLFGNLIALSLGLTPNFKSNFDLAEDAKLQLSKDTYDDDLDNLLAQIGDQYADLFLAAKNLSDAILLSDILRVNTEITKAPLSASMIKRYDEHHQDLTLLKALVRQQLPEKYKEIFFDQSKNGYAGYIDGGASQEEFYKFIKPILEKMDGTEELLVKLNREDLLRKQRTFDNGSIPHQIHLGELHAILRRQEDFYPFLKDNREKIEKILTFRIPYYVGPLARGNSRFAWMTRKSEETITPWNFEEVVDKGASAQSFIERMTNFDKNLPNEKVLPKHSLLYEYFTVYNELTKVKYVTEGMRKPAFLSGEQKKAIVDLLFKTNRKVTVKQLKEDYFKKIECFDSVEISGVEDRFNASLGTYHDLLKIIKDKDFLDNEENEDILEDIVLTLTLFEDREMIEERLKTYAHLFDDKVMKQLKRRRYTGWGRLSRKLINGIRDKQSGKTILDFLKSDGFANRNFMQLIHDDSLTFKEDIQKAQVSGQGDSLHEHIANLAGSPAIKKGILQTVKVVDELVKVMGRHKPENIVIEMARENQTTQKGQKNSRERMKRIEEGIKELGSQILKEHPVENTQLQNEKLYLYYLQNGRDMYVDQELDINRLSDYDVDHIVPQSFLKDDSIDNKVLTRSDKARGKSDNVPSEEVVKKMKNYWRQLLNAKLITQRKFDNLTKAERGGLSELDKAGFIKRQLVETRQITKHVAQILDSRMNTKYDENDKLIREVKVITLKSKLVSDFRKDFQFYKVREINNYHHAHDAYLNAVVGTALIKKYPKLESEFVYGDYKVYDVRKMIAKSEQEIGKATAKYFFYSNIMNFFKTEITLANGEIRKRPLIETNGETGEIVWDKGRDFATVRKVLSMPQVNIVKKTEVQTGGFSKESILPKRNSDKLIARKKDWDPKKYGGFDSPTVAYSVLVVAKVEKGKSKKLKSVKELLGITIMERSSFEKNPIDFLEAKGYKEVKKDLIIKLPKYSLFELENGRKRMLASAGELQKGNELALPSKYVNFLYLASHYEKLKGSPEDNEQKQLFVEQHKHYLDEIIEQISEFSKRVILADANLDKVLSAYNKHRDKPIREQAENIIHLFTLTNLGAPAAFKYFDTTIDRKRYTSTKEVLDATLIHQSITGLYETRIDLSQLGGDGGGSSGSSGSSGSSGSSGSSGGTAPLEEEYRLFLEAPIQNVTLLEQWKREIPKVWAEINPPGLASTQAPIHVQLLSTALPVRVRQYPITLEAKRSLRETIRKFRAAGILRPVHSPWNTPLLPVRKSGTSEYRMVQDLREVNKRVETIHPTVPNPYTLLSLLPPDRIWYSVLDLKDAFFCIPLAPESQLIFAFEWADAEEGESGQLTWTRLPQGFKNSPTLFNEALNRDLQGFRLDHPSVSLLQYVDDLLIAADTQAACLSATRDLLMTLAELGYRVSGKKAQLCQEEVTYLGFKIHKGSRSLSNSRTQAILQIPVPKTKRQVREFLGKIGYCRLFIPGFAELAQPLYAATRPGNDPLVWGEKEEEAFQSLKLALTQPPALALPSLDKPFQLFVEETSGAAKGVLTQALGPWKRPVAYLSKRLDPVAAGWPRCLRAIAAAALLTREASKLTFGQDIEITSSHNLESLLRSPPDKWLTNARITQYQVLLLDPPRVRFKQTAALNPATLLPETDDTLPIHHCLDTLDSLTSTRPDLTDQPLAQAEATLFTDGSSYIRDGKRYAGAAVVTLDSVIWAEPLPIGTSAQKAELIALTKALEWSKDKSVNIYTDSRYAFATLHVHGMIYRERGWLTAGGKAIKNAPEILALLTAVWLPKRVAVMHCKGHQKDDAPTSTGNRRADEVAREVAIRPLSTQATISAGKRTADGSEFEKRTADGSEFESPKKKAKVE

SEQ ID NO: 1383 - protein, 2096 aa, synthetic construct
MPAAKRVKLDGGDKKYSIGLDIGTNSVGWAVITDEYKVPSKKFKVLGNTDRHSIKKNLIGALLFDSGETAEATRLKRTARRRYTRRKNRICYLQEIFSNEMAKVDDSFFHRLEESFLVEEDKKHERHPIFGNIVDEVAYHEKYPTIYHLRKKLVDSTDKADLRLIYLALAHMIKFRGHFLIEGDLNPDNSDVDKLFIQLVQTYNQLFEENPINASGVDAKAILSARLSKSRRLENLIAQLPGEKKNGLFGNLIALSLGLTPNFKSNFDLAEDAKLQLSKDTYDDDLDNLLAQIGDQYADLFLAAKNLSDAILLSDILRVNTEITKAPLSASMIKRYDEHHQDLTLLKALVRQQLPEKYKEIFFDQSKNGYAGYIDGGASQEEFYKFIKPILEKMDGTEELLVKLNREDLLRKQRTFDNGSIPHQIHLGELHAILRRQEDFYPFLKDNREKIEKILTFRIPYYVGPLARGNSRFAWMTRKSEETITPWNFEEVVDKGASAQSFIERMTNFDKNLPNEKVLPKHSLLYEYFTVYNELTKVKYVTEGMRKPAFLSGEQKKAIVDLLFKTNRKVTVKQLKEDYFKKIECFDSVEISGVEDRFNASLGTYHDLLKIIKDKDFLDNEENEDILEDIVLTLTLFEDREMIEERLKTYAHLFDDKVMKQLKRRRYTGWGRLSRKLINGIRDKQSGKTILDFLKSDGFANRNFMQLIHDDSLTFKEDIQKAQVSGQGDSLHEHIANLAGSPAIKKGILQTVKVVDELVKVMGRHKPENIVIEMARENQTTQKGQKNSRERMKRIEEGIKELGSQILKEHPVENTQLQNEKLYLYYLQNGRDMYVDQELDINRLSDYDVDHIVPQSFLKDDSIDNKVLTRSDKARGKSDNVPSEEVVKKMKNYWRQLLNAKLITQRKFDNLTKAERGGLSELDKAGFIKRQLVETRQITKHVAQILDSRMNTKYDENDKLIREVKVITLKSKLVSDFRKDFQFYKVREINNYHHAHDAYLNAVVGTALIKKYPKLESEFVYGDYKVYDVRKMIAKSEQEIGKATAKYFFYSNIMNFFKTEITLANGEIRKRPLIETNGETGEIVWDKGRDFATVRKVLSMPQVNIVKKTEVQTGGFSKESILPKRNSDKLIARKKDWDPKKYGGFDSPTVAYSVLVVAKVEKGKSKKLKSVKELLGITIMERSSFEKNPIDFLEAKGYKEVKKDLIIKLPKYSLFELENGRKRMLASAGELQKGNELALPSKYVNFLYLASHYEKLKGSPEDNEQKQLFVEQHKHYLDEIIEQISEFSKRVILADANLDKVLSAYNKHRDKPIREQAENIIHLFTLTNLGAPAAFKYFDTTIDRKRYTSTKEVLDATLIHQSITGLYETRIDLSQLGGDGGGGSPAPGGGGGTAPLEEEYRLFLEAPIQNVTLLEQWKREIPKVWAEINPPGLASTQAPIHVQLLSTALPVRVRQYPITLEAKRSLRETIRKFRAAGILRPVHSPWNTPLLPVRKSGTSEYRMVQDLREVNKRVETIHPTVPNPYTLLSLLPPDRIWYSVLDLKDAFFCIPLAPESQLIFAFEWADAEEGESGQLTWTRLPQGFKNSPTLFNEALNRDLQGFRLDHPSVSLLQYVDDLLIAADTQAACLSATRDLLMTLAELGYRVSGKKAQLCQEEVTYLGFKIHKGSRSLSNSRTQAILQIPVPKTKRQVREFLGKIGYCRLFIPGFAELAQPLYAATRPGNDPLVWGEKEEEAFQSLKLALTQPPALALPSLDKPFQLFVEETSGAAKGVLTQALGPWKRPVAYLSKRLDPVAAGWPRCLRAIAAAALLTREASKLTFGQDIEITSSHNLESLLRSPPDKWLTNARITQYQVLLLDPPRVRFKQTAALNPATLLPETDDTLPIHHCLDTLDSLTSTRPDLTDQPLAQAEATLFTDGSSYIRDGKRYAGAAVVTLDSVIWAEPLPIGTSAQKAELIALTKALEWSKDKSVNIYTDSRYAFATLHVHGMIYRERGWLTAGGKAIKNAPEILALLTAVWLPKRVAVMHCKGHQKDDAPTSTGNRRADEVAREVAIRPLSTQATISAGKRTADGSEFEKRTADGSEFESPKKKAKVE

SEQ ID NO: 1384 - protein, 2098 aa, synthetic construct
MPAAKRVKLDGGDKKYSIGLDIGTNSVGWAVITDEYKVPSKKFKVLGNTDRHSIKKNLIGALLFDSGETAEATRLKRTARRRYTRRKNRICYLQEIFSNEMAKVDDSFFHRLEESFLVEEDKKHERHPIFGNIVDEVAYHEKYPTIYHLRKKLVDSTDKADLRLIYLALAHMIKFRGHFLIEGDLNPDNSDVDKLFIQLVQTYNQLFEENPINASGVDAKAILSARLSKSRRLENLIAQLPGEKKNGLFGNLIALSLGLTPNFKSNFDLAEDAKLQLSKDTYDDDLDNLLAQIGDQYADLFLAAKNLSDAILLSDILRVNTEITKAPLSASMIKRYDEHHQDLTLLKALVRQQLPEKYKEIFFDQSKNGYAGYIDGGASQEEFYKFIKPILEKMDGTEELLVKLNREDLLRKQRTFDNGSIPHQIHLGELHAILRRQEDFYPFLKDNREKIEKILTFRIPYYVGPLARGNSRFAWMTRKSEETITPWNFEEVVDKGASAQSFIERMTNFDKNLPNEKVLPKHSLLYEYFTVYNELTKVKYVTEGMRKPAFLSGEQKKAIVDLLFKTNRKVTVKQLKEDYFKKIECFDSVEISGVEDRFNASLGTYHDLLKIIKDKDFLDNEENEDILEDIVLTLTLFEDREMIEERLKTYAHLFDDKVMKQLKRRRYTGWGRLSRKLINGIRDKQSGKTILDFLKSDGFANRNFMQLIHDDSLTFKEDIQKAQVSGQGDSLHEHIANLAGSPAIKKGILQTVKVVDELVKVMGRHKPENIVIEMARENQTTQKGQKNSRERMKRIEEGIKELGSQILKEHPVENTQLQNEKLYLYYLQNGRDMYVDQELDINRLSDYDVDHIVPQSFLKDDSIDNKVLTRSDKARGKSDNVPSEEVVKKMKNYWRQLLNAKLITQRKFDNLTKAERGGLSELDKAGFIKRQLVETRQITKHVAQILDSRMNTKYDENDKLIREVKVITLKSKLVSDFRKDFQFYKVREINNYHHAHDAYLNAVVGTALIKKYPKLESEFVYGDYKVYDVRKMIAKSEQEIGKATAKYFFYSNIMNFFKTEITLANGEIRKRPLIETNGETGEIVWDKGRDFATVRKVLSMPQVNIVKKTEVQTGGFSKESILPKRNSDKLIARKKDWDPKKYGGFDSPTVAYSVLVVAKVEKGKSKKLKSVKELLGITIMERSSFEKNPIDFLEAKGYKEVKKDLIIKLPKYSLFELENGRKRMLASAGELQKGNELALPSKYVNFLYLASHYEKLKGSPEDNEQKQLFVEQHKHYLDEIIEQISEFSKRVILADANLDKVLSAYNKHRDKPIREQAENIIHLFTLTNLGAPAAFKYFDTTIDRKRYTSTKEVLDATLIHQSITGLYETRIDLSQLGGDGGGGGEAAAKPAPGGTAPLEEEYRLFLEAPIQNVTLLEQWKREIPKVWAEINPPGLASTQAPIHVQLLSTALPVRVRQYPITLEAKRSLRETIRKFRAAGILRPVHSPWNTPLLPVRKSGTSEYRMVQDLREVNKRVETIHPTVPNPYTLLSLLPPDRIWYSVLDLKDAFFCIPLAPESQLIFAFEWADAEEGESGQLTWTRLPQGFKNSPTLFNEALNRDLQGFRLDHPSVSLLQYVDDLLIAADTQAACLSATRDLLMTLAELGYRVSGKKAQLCQEEVTYLGFKIHKGSRSLSNSRTQAILQIPVPKTKRQVREFLGKIGYCRLFIPGFAELAQPLYAATRPGNDPLVWGEKEEEAFQSLKLALTQPPALALPSLDKPFQLFVEETSGAAKGVLTQALGPWKRPVAYLSKRLDPVAAGWPRCLRAIAAAALLTREASKLTFGQDIEITSSHNLESLLRSPPDKWLTNARITQYQVLLLDPPRVRFKQTAALNPATLLPETDDTLPIHHCLDTLDSLTSTRPDLTDQPLAQAEATLFTDGSSYIRDGKRYAGAAVVTLDSVIWAEPLPIGTSAQKAELIALTKALEWSKDKSVNIYTDSRYAFATLHVHGMIYRERGWLTAGGKAIKNAPEILALLTAVWLPKRVAVMHCKGHQKDDAPTSTGNRRADEVAREVAIRPLSTQATISAGKRTADGSEFEKRTADGSEFESPKKKAKVE

SEQ ID NO: 1385 - protein, 2096 aa, synthetic construct
MPAAKRVKLDGGDKKYSIGLDIGTNSVGWAVITDEYKVPSKKFKVLGNTDRHSIKKNLIGALLFDSGETAEATRLKRTARRRYTRRKNRICYLQEIFSNEMAKVDDSFFHRLEESFLVEEDKKHERHPIFGNIVDEVAYHEKYPTIYHLRKKLVDSTDKADLRLIYLALAHMIKFRGHFLIEGDLNPDNSDVDKLFIQLVQTYNQLFEENPINASGVDAKAILSARLSKSRRLENLIAQLPGEKKNGLFGNLIALSLGLTPNFKSNFDLAEDAKLQLSKDTYDDDLDNLLAQIGDQYADLFLAAKNLSDAILLSDILRVNTEITKAPLSASMIKRYDEHHQDLTLLKALVRQQLPEKYKEIFFDQSKNGYAGYIDGGASQEEFYKFIKPILEKMDGTEELLVKLNREDLLRKQRTFDNGSIPHQIHLGELHAILRRQEDFYPFLKDNREKIEKILTFRIPYYVGPLARGNSRFAWMTRKSEETITPWNFEEVVDKGASAQSFIERMTNFDKNLPNEKVLPKHSLLYEYFTVYNELTKVKYVTEGMRKPAFLSGEQKKAIVDLLFKTNRKVTVKQLKEDYFKKIECFDSVEISGVEDRFNASLGTYHDLLKIIKDKDFLDNEENEDILEDIVLTLTLFEDREMIEERLKTYAHLFDDKVMKQLKRRRYTGWGRLSRKLINGIRDKQSGKTILDFLKSDGFANRNFMQLIHDDSLTFKEDIQKAQVSGQGDSLHEHIANLAGSPAIKKGILQTVKVVDELVKVMGRHKPENIVIEMARENQTTQKGQKNSRERMKRIEEGIKELGSQILKEHPVENTQLQNEKLYLYYLQNGRDMYVDQELDINRLSDYDVDHIVPQSFLKDDSIDNKVLTRSDKARGKSDNVPSEEVVKKMKNYWRQLLNAKLITQRKFDNLTKAERGGLSELDKAGFIKRQLVETRQITKHVAQILDSRMNTKYDENDKLIREVKVITLKSKLVSDFRKDFQFYKVREINNYHHAHDAYLNAVVGTALIKKYPKLESEFVYGDYKVYDVRKMIAKSEQEIGKATAKYFFYSNIMNFFKTEITLANGEIRKRPLIETNGETGEIVWDKGRDFATVRKVLSMPQVNIVKKTEVQTGGFSKESILPKRNSDKLIARKKDWDPKKYGGFDSPTVAYSVLVVAKVEKGKSKKLKSVKELLGITIMERSSFEKNPIDFLEAKGYKEVKKDLIIKLPKYSLFELENGRKRMLASAGELQKGNELALPSKYVNFLYLASHYEKLKGSPEDNEQKQLFVEQHKHYLDEIIEQISEFSKRVILADANLDKVLSAYNKHRDKPIREQAENIIHLFTLTNLGAPAAFKYFDTTIDRKRYTSTKEVLDATLIHQSITGLYETRIDLSQLGGDGGPAPGGSGSSGGTAPLEEEYRLFLEAPIQNVTLLEQWKREIPKVWAEINPPGLASTQAPIHVQLLSTALPVRVRQYPITLEAKRSLRETIRKFRAAGILRPVHSPWNTPLLPVRKSGTSEYRMVQDLREVNKRVETIHPTVPNPYTLLSLLPPDRIWYSVLDLKDAFFCIPLAPESQLIFAFEWADAEEGESGQLTWTRLPQGFKNSPTLFNEALNRDLQGFRLDHPSVSLLQYVDDLLIAADTQAACLSATRDLLMTLAELGYRVSGKKAQLCQEEVTYLGFKIHKGSRSLSNSRTQAILQIPVPKTKRQVREFLGKIGYCRLFIPGFAELAQPLYAATRPGNDPLVWGEKEEEAFQSLKLALTQPPALALPSLDKPFQLFVEETSGAAKGVLTQALGPWKRPVAYLSKRLDPVAAGWPRCLRAIAAAALLTREASKLTFGQDIEITSSHNLESLLRSPPDKWLTNARITQYQVLLLDPPRVRFKQTAALNPATLLPETDDTLPIHHCLDTLDSLTSTRPDLTDQPLAQAEATLFTDGSSYIRDGKRYAGAAVVTLDSVIWAEPLPIGTSAQKAELIALTKALEWSKDKSVNIYTDSRYAFATLHVHGMIYRERGWLTAGGKAIKNAPEILALLTAVWLPKRVAVMHCKGHQKDDAPTSTGNRRADEVAREVAIRPLSTQATISAGKRTADGSEFEKRTADGSEFESPKKKAKVE

SEQ ID NO: 1386-1388 - skipped (3 entries)

SEQ ID NO: 1389 - protein, 2090 aa, synthetic construct
MPAAKRVKLDGGDKKYSIGLDIGTNSVGWAVITDEYKVPSKKFKVLGNTDRHSIKKNLIGALLFDSGETAEATRLKRTARRRYTRRKNRICYLQEIFSNEMAKVDDSFFHRLEESFLVEEDKKHERHPIFGNIVDEVAYHEKYPTIYHLRKKLVDSTDKADLRLIYLALAHMIKFRGHFLIEGDLNPDNSDVDKLFIQLVQTYNQLFEENPINASGVDAKAILSARLSKSRRLENLIAQLPGEKKNGLFGNLIALSLGLTPNFKSNFDLAEDAKLQLSKDTYDDDLDNLLAQIGDQYADLFLAAKNLSDAILLSDILRVNTEITKAPLSASMIKRYDEHHQDLTLLKALVRQQLPEKYKEIFFDQSKNGYAGYIDGGASQEEFYKFIKPILEKMDGTEELLVKLNREDLLRKQRTFDNGSIPHQIHLGELHAILRRQEDFYPFLKDNREKIEKILTFRIPYYVGPLARGNSRFAWMTRKSEETITPWNFEEVVDKGASAQSFIERMTNFDKNLPNEKVLPKHSLLYEYFTVYNELTKVKYVTEGMRKPAFLSGEQKKAIVDLLFKTNRKVTVKQLKEDYFKKIECFDSVEISGVEDRFNASLGTYHDLLKIIKDKDFLDNEENEDILEDIVLTLTLFEDREMIEERLKTYAHLFDDKVMKQLKRRRYTGWGRLSRKLINGIRDKQSGKTILDFLKSDGFANRNFMQLIHDDSLTFKEDIQKAQVSGQGDSLHEHIANLAGSPAIKKGILQTVKVVDELVKVMGRHKPENIVIEMARENQTTQKGQKNSRERMKRIEEGIKELGSQILKEHPVENTQLQNEKLYLYYLQNGRDMYVDQELDINRLSDYDVDHIVPQSFLKDDSIDNKVLTRSDKARGKSDNVPSEEVVKKMKNYWRQLLNAKLITQRKFDNLTKAERGGLSELDKAGFIKRQLVETRQITKHVAQILDSRMNTKYDENDKLIREVKVITLKSKLVSDFRKDFQFYKVREINNYHHAHDAYLNAVVGTALIKKYPKLESEFVYGDYKVYDVRKMIAKSEQEIGKATAKYFFYSNIMNFFKTEITLANGEIRKRPLIETNGETGEIVWDKGRDFATVRKVLSMPQVNIVKKTEVQTGGFSKESILPKRNSDKLIARKKDWDPKKYGGFDSPTVAYSVLVVAKVEKGKSKKLKSVKELLGITIMERSSFEKNPIDFLEAKGYKEVKKDLIIKLPKYSLFELENGRKRMLASAGELQKGNELALPSKYVNFLYLASHYEKLKGSPEDNEQKQLFVEQHKHYLDEIIEQISEFSKRVILADANLDKVLSAYNKHRDKPIREQAENIIHLFTLTNLGAPAAFKYFDTTIDRKRYTSTKEVLDATLIHQSITGLYETRIDLSQLGGDGGGGGGGTAPLEEEYRLFLEAPIQNVTLLEQWKREIPKVWAEINPPGLASTQAPIHVQLLSTALPVRVRQYPITLEAKRSLRETIRKFRAAGILRPVHSPWNTPLLPVRKSGTSEYRMVQDLREVNKRVETIHPTVPNPYTLLSLLPPDRIWYSVLDLKDAFFCIPLAPESQLIFAFEWADAEEGESGQLTWTRLPQGFKNSPTLFNEALNRDLQGFRLDHPSVSLLQYVDDLLIAADTQAACLSATRDLLMTLAELGYRVSGKKAQLCQEEVTYLGFKIHKGSRSLSNSRTQAILQIPVPKTKRQVREFLGKIGYCRLFIPGFAELAQPLYAATRPGNDPLVWGEKEEEAFQSLKLALTQPPALALPSLDKPFQLFVEETSGAAKGVLTQALGPWKRPVAYLSKRLDPVAAGWPRCLRAIAAAALLTREASKLTFGQDIEITSSHNLESLLRSPPDKWLTNARITQYQVLLLDPPRVRFKQTAALNPATLLPETDDTLPIHHCLDTLDSLTSTRPDLTDQPLAQAEATLFTDGSSYIRDGKRYAGAAVVTLDSVIWAEPLPIGTSAQKAELIALTKALEWSKDKSVNIYTDSRYAFATLHVHGMIYRERGWLTAGGKAIKNAPEILALLTAVWLPKRVAVMHCKGHQKDDAPTSTGNRRADEVAREVAIRPLSTQATISAGKRTADGSEFEKRTADGSEFESPKKKAKVE

SEQ ID NO: 1390 - protein, 2098 aa, synthetic construct
MPAAKRVKLDGGDKKYSIGLDIGTNSVGWAVITDEYKVPSKKFKVLGNTDRHSIKKNLIGALLFDSGETAEATRLKRTARRRYTRRKNRICYLQEIFSNEMAKVDDSFFHRLEESFLVEEDKKHERHPIFGNIVDEVAYHEKYPTIYHLRKKLVDSTDKADLRLIYLALAHMIKFRGHFLIEGDLNPDNSDVDKLFIQLVQTYNQLFEENPINASGVDAKAILSARLSKSRRLENLIAQLPGEKKNGLFGNLIALSLGLTPNFKSNFDLAEDAKLQLSKDTYDDDLDNLLAQIGDQYADLFLAAKNLSDAILLSDILRVNTEITKAPLSASMIKRYDEHHQDLTLLKALVRQQLPEKYKEIFFDQSKNGYAGYIDGGASQEEFYKFIKPILEKMDGTEELLVKLNREDLLRKQRTFDNGSIPHQIHLGELHAILRRQEDFYPFLKDNREKIEKILTFRIPYYVGPLARGNSRFAWMTRKSEETITPWNFEEVVDKGASAQSFIERMTNFDKNLPNEKVLPKHSLLYEYFTVYNELTKVKYVTEGMRKPAFLSGEQKKAIVDLLFKTNRKVTVKQLKEDYFKKIECFDSVEISGVEDRFNASLGTYHDLLKIIKDKDFLDNEENEDILEDIVLTLTLFEDREMIEERLKTYAHLFDDKVMKQLKRRRYTGWGRLSRKLINGIRDKQSGKTILDFLKSDGFANRNFMQLIHDDSLTFKEDIQKAQVSGQGDSLHEHIANLAGSPAIKKGILQTVKVVDELVKVMGRHKPENIVIEMARENQTTQKGQKNSRERMKRIEEGIKELGSQILKEHPVENTQLQNEKLYLYYLQNGRDMYVDQELDINRLSDYDVDHIVPQSFLKDDSIDNKVLTRSDKARGKSDNVPSEEVVKKMKNYWRQLLNAKLITQRKFDNLTKAERGGLSELDKAGFIKRQLVETRQITKHVAQILDSRMNTKYDENDKLIREVKVITLKSKLVSDFRKDFQFYKVREINNYHHAHDAYLNAVVGTALIKKYPKLESEFVYGDYKVYDVRKMIAKSEQEIGKATAKYFFYSNIMNFFKTEITLANGEIRKRPLIETNGETGEIVWDKGRDFATVRKVLSMPQVNIVKKTEVQTGGFSKESILPKRNSDKLIARKKDWDPKKYGGFDSPTVAYSVLVVAKVEKGKSKKLKSVKELLGITIMERSSFEKNPIDFLEAKGYKEVKKDLIIKLPKYSLFELENGRKRMLASAGELQKGNELALPSKYVNFLYLASHYEKLKGSPEDNEQKQLFVEQHKHYLDEIIEQISEFSKRVILADANLDKVLSAYNKHRDKPIREQAENIIHLFTLTNLGAPAAFKYFDTTIDRKRYTSTKEVLDATLIHQSITGLYETRIDLSQLGGDGGEAAAKGGGGGSGGTAPLEEEYRLFLEAPIQNVTLLEQWKREIPKVWAEINPPGLASTQAPIHVQLLSTALPVRVRQYPITLEAKRSLRETIRKFRAAGILRPVHSPWNTPLLPVRKSGTSEYRMVQDLREVNKRVETIHPTVPNPYTLLSLLPPDRIWYSVLDLKDAFFCIPLAPESQLIFAFEWADAEEGESGQLTWTRLPQGFKNSPTLFNEALNRDLQGFRLDHPSVSLLQYVDDLLIAADTQAACLSATRDLLMTLAELGYRVSGKKAQLCQEEVTYLGFKIHKGSRSLSNSRTQAILQIPVPKTKRQVREFLGKIGYCRLFIPGFAELAQPLYAATRPGNDPLVWGEKEEEAFQSLKLALTQPPALALPSLDKPFQLFVEETSGAAKGVLTQALGPWKRPVAYLSKRLDPVAAGWPRCLRAIAAAALLTREASKLTFGQDIEITSSHNLESLLRSPPDKWLTNARITQYQVLLLDPPRVRFKQTAALNPATLLPETDDTLPIHHCLDTLDSLTSTRPDLTDQPLAQAEATLFTDGSSYIRDGKRYAGAAVVTLDSVIWAEPLPIGTSAQKAELIALTKALEWSKDKSVNIYTDSRYAFATLHVHGMIYRERGWLTAGGKAIKNAPEILALLTAVWLPKRVAVMHCKGHQKDDAPTSTGNRRADEVAREVAIRPLSTQATISAGKRTADGSEFEKRTADGSEFESPKKKAKVE

SEQ ID NO: 1391-1393 - skipped (3 entries)

SEQ ID NO: 1394 - protein, 2098 aa, synthetic construct
MPAAKRVKLDGGDKKYSIGLDIGTNSVGWAVITDEYKVPSKKFKVLGNTDRHSIKKNLIGALLFDSGETAEATRLKRTARRRYTRRKNRICYLQEIFSNEMAKVDDSFFHRLEESFLVEEDKKHERHPIFGNIVDEVAYHEKYPTIYHLRKKLVDSTDKADLRLIYLALAHMIKFRGHFLIEGDLNPDNSDVDKLFIQLVQTYNQLFEENPINASGVDAKAILSARLSKSRRLENLIAQLPGEKKNGLFGNLIALSLGLTPNFKSNFDLAEDAKLQLSKDTYDDDLDNLLAQIGDQYADLFLAAKNLSDAILLSDILRVNTEITKAPLSASMIKRYDEHHQDLTLLKALVRQQLPEKYKEIFFDQSKNGYAGYIDGGASQEEFYKFIKPILEKMDGTEELLVKLNREDLLRKQRTFDNGSIPHQIHLGELHAILRRQEDFYPFLKDNREKIEKILTFRIPYYVGPLARGNSRFAWMTRKSEETITPWNFEEVVDKGASAQSFIERMTNFDKNLPNEKVLPKHSLLYEYFTVYNELTKVKYVTEGMRKPAFLSGEQKKAIVDLLFKTNRKVTVKQLKEDYFKKIECFDSVEISGVEDRFNASLGTYHDLLKIIKDKDFLDNEENEDILEDIVLTLTLFEDREMIEERLKTYAHLFDDKVMKQLKRRRYTGWGRLSRKLINGIRDKQSGKTILDFLKSDGFANRNFMQLIHDDSLTFKEDIQKAQVSGQGDSLHEHIANLAGSPAIKKGILQTVKVVDELVKVMGRHKPENIVIEMARENQTTQKGQKNSRERMKRIEEGIKELGSQILKEHPVENTQLQNEKLYLYYLQNGRDMYVDQELDINRLSDYDVDHIVPQSFLKDDSIDNKVLTRSDKARGKSDNVPSEEVVKKMKNYWRQLLNAKLITQRKFDNLTKAERGGLSELDKAGFIKRQLVETRQITKHVAQILDSRMNTKYDENDKLIREVKVITLKSKLVSDFRKDFQFYKVREINNYHHAHDAYLNAVVGTALIKKYPKLESEFVYGDYKVYDVRKMIAKSEQEIGKATAKYFFYSNIMNFFKTEITLANGEIRKRPLIETNGETGEIVWDKGRDFATVRKVLSMPQVNIVKKTEVQTGGFSKESILPKRNSDKLIARKKDWDPKKYGGFDSPTVAYSVLVVAKVEKGKSKKLKSVKELLGITIMERSSFEKNPIDFLEAKGYKEVKKDLIIKLPKYSLFELENGRKRMLASAGELQKGNELALPSKYVNFLYLASHYEKLKGSPEDNEQKQLFVEQHKHYLDEIIEQISEFSKRVILADANLDKVLSAYNKHRDKPIREQAENIIHLFTLTNLGAPAAFKYFDTTIDRKRYTSTKEVLDATLIHQSITGLYETRIDLSQLGGDGGGSSEAAAKGGGGGTAPLEEEYRLFLEAPIQNVTLLEQWKREIPKVWAEINPPGLASTQAPIHVQLLSTALPVRVRQYPITLEAKRSLRETIRKFRAAGILRPVHSPWNTPLLPVRKSGTSEYRMVQDLREVNKRVETIHPTVPNPYTLLSLLPPDRIWYSVLDLKDAFFCIPLAPESQLIFAFEWADAEEGESGQLTWTRLPQGFKNSPTLFNEALNRDLQGFRLDHPSVSLLQYVDDLLIAADTQAACLSATRDLLMTLAELGYRVSGKKAQLCQEEVTYLGFKIHKGSRSLSNSRTQAILQIPVPKTKRQVREFLGKIGYCRLFIPGFAELAQPLYAATRPGNDPLVWGEKEEEAFQSLKLALTQPPALALPSLDKPFQLFVEETSGAAKGVLTQALGPWKRPVAYLSKRLDPVAAGWPRCLRAIAAAALLTREASKLTFGQDIEITSSHNLESLLRSPPDKWLTNARITQYQVLLLDPPRVRFKQTAALNPATLLPETDDTLPIHHCLDTLDSLTSTRPDLTDQPLAQAEATLFTDGSSYIRDGKRYAGAAVVTLDSVIWAEPLPIGTSAQKAELIALTKALEWSKDKSVNIYTDSRYAFATLHVHGMIYRERGWLTAGGKAIKNAPEILALLTAVWLPKRVAVMHCKGHQKDDAPTSTGNRRADEVAREVAIRPLSTQATISAGKRTADGSEFEKRTADGSEFESPKKKAKVE

SEQ ID NO: 1395-1396 - skipped (2 entries)

SEQ ID NO: 1397 - protein, 2093 aa, synthetic construct
MPAAKRVKLDGGDKKYSIGLDIGTNSVGWAVITDEYKVPSKKFKVLGNTDRHSIKKNLIGALLFDSGETAEATRLKRTARRRYTRRKNRICYLQEIFSNEMAKVDDSFFHRLEESFLVEEDKKHERHPIFGNIVDEVAYHEKYPTIYHLRKKLVDSTDKADLRLIYLALAHMIKFRGHFLIEGDLNPDNSDVDKLFIQLVQTYNQLFEENPINASGVDAKAILSARLSKSRRLENLIAQLPGEKKNGLFGNLIALSLGLTPNFKSNFDLAEDAKLQLSKDTYDDDLDNLLAQIGDQYADLFLAAKNLSDAILLSDILRVNTEITKAPLSASMIKRYDEHHQDLTLLKALVRQQLPEKYKEIFFDQSKNGYAGYIDGGASQEEFYKFIKPILEKMDGTEELLVKLNREDLLRKQRTFDNGSIPHQIHLGELHAILRRQEDFYPFLKDNREKIEKILTFRIPYYVGPLARGNSRFAWMTRKSEETITPWNFEEVVDKGASAQSFIERMTNFDKNLPNEKVLPKHSLLYEYFTVYNELTKVKYVTEGMRKPAFLSGEQKKAIVDLLFKTNRKVTVKQLKEDYFKKIECFDSVEISGVEDRFNASLGTYHDLLKIIKDKDFLDNEENEDILEDIVLTLTLFEDREMIEERLKTYAHLFDDKVMKQLKRRRYTGWGRLSRKLINGIRDKQSGKTILDFLKSDGFANRNFMQLIHDDSLTFKEDIQKAQVSGQGDSLHEHIANLAGSPAIKKGILQTVKVVDELVKVMGRHKPENIVIEMARENQTTQKGQKNSRERMKRIEEGIKELGSQILKEHPVENTQLQNEKLYLYYLQNGRDMYVDQELDINRLSDYDVDHIVPQSFLKDDSIDNKVLTRSDKARGKSDNVPSEEVVKKMKNYWRQLLNAKLITQRKFDNLTKAERGGLSELDKAGFIKRQLVETRQITKHVAQILDSRMNTKYDENDKLIREVKVITLKSKLVSDFRKDFQFYKVREINNYHHAHDAYLNAVVGTALIKKYPKLESEFVYGDYKVYDVRKMIAKSEQEIGKATAKYFFYSNIMNFFKTEITLANGEIRKRPLIETNGETGEIVWDKGRDFATVRKVLSMPQVNIVKKTEVQTGGFSKESILPKRNSDKLIARKKDWDPKKYGGFDSPTVAYSVLVVAKVEKGKSKKLKSVKELLGITIMERSSFEKNPIDFLEAKGYKEVKKDLIIKLPKYSLFELENGRKRMLASAGELQKGNELALPSKYVNFLYLASHYEKLKGSPEDNEQKQLFVEQHKHYLDEIIEQISEFSKRVILADANLDKVLSAYNKHRDKPIREQAENIIHLFTLTNLGAPAAFKYFDTTIDRKRYTSTKEVLDATLIHQSITGLYETRIDLSQLGGDGGGGGPAPGGTAPLEEEYRLFLEAPIQNVTLLEQWKREIPKVWAEINPPGLASTQAPIHVQLLSTALPVRVRQYPITLEAKRSLRETIRKFRAAGILRPVHSPWNTPLLPVRKSGTSEYRMVQDLREVNKRVETIHPTVPNPYTLLSLLPPDRIWYSVLDLKDAFFCIPLAPESQLIFAFEWADAEEGESGQLTWTRLPQGFKNSPTLFNEALNRDLQGFRLDHPSVSLLQYVDDLLIAADTQAACLSATRDLLMTLAELGYRVSGKKAQLCQEEVTYLGFKIHKGSRSLSNSRTQAILQIPVPKTKRQVREFLGKIGYCRLFIPGFAELAQPLYAATRPGNDPLVWGEKEEEAFQSLKLALTQPPALALPSLDKPFQLFVEETSGAAKGVLTQALGPWKRPVAYLSKRLDPVAAGWPRCLRAIAAAALLTREASKLTFGQDIEITSSHNLESLLRSPPDKWLTNARITQYQVLLLDPPRVRFKQTAALNPATLLPETDDTLPIHHCLDTLDSLTSTRPDLTDQPLAQAEATLFTDGSSYIRDGKRYAGAAVVTLDSVIWAEPLPIGTSAQKAELIALTKALEWSKDKSVNIYTDSRYAFATLHVHGMIYRERGWLTAGGKAIKNAPEILALLTAVWLPKRVAVMHCKGHQKDDAPTSTGNRRADEVAREVAIRPLSTQATISAGKRTADGSEFEKRTADGSEFESPKKKAKVE

SEQ ID NO: 1398 - skipped

SEQ ID NO: 1399 - protein, 2102 aa, synthetic construct
MPAAKRVKLDGGDKKYSIGLDIGTNSVGWAVITDEYKVPSKKFKVLGNTDRHSIKKNLIGALLFDSGETAEATRLKRTARRRYTRRKNRICYLQEIFSNEMAKVDDSFFHRLEESFLVEEDKKHERHPIFGNIVDEVAYHEKYPTIYHLRKKLVDSTDKADLRLIYLALAHMIKFRGHFLIEGDLNPDNSDVDKLFIQLVQTYNQLFEENPINASGVDAKAILSARLSKSRRLENLIAQLPGEKKNGLFGNLIALSLGLTPNFKSNFDLAEDAKLQLSKDTYDDDLDNLLAQIGDQYADLFLAAKNLSDAILLSDILRVNTEITKAPLSASMIKRYDEHHQDLTLLKALVRQQLPEKYKEIFFDQSKNGYAGYIDGGASQEEFYKFIKPILEKMDGTEELLVKLNREDLLRKQRTFDNGSIPHQIHLGELHAILRRQEDFYPFLKDNREKIEKILTFRIPYYVGPLARGNSRFAWMTRKSEETITPWNFEEVVDKGASAQSFIERMTNFDKNLPNEKVLPKHSLLYEYFTVYNELTKVKYVTEGMRKPAFLSGEQKKAIVDLLFKTNRKVTVKQLKEDYFKKIECFDSVEISGVEDRFNASLGTYHDLLKIIKDKDFLDNEENEDILEDIVLTLTLFEDREMIEERLKTYAHLFDDKVMKQLKRRRYTGWGRLSRKLINGIRDKQSGKTILDFLKSDGFANRNFMQLIHDDSLTFKEDIQKAQVSGQGDSLHEHIANLAGSPAIKKGILQTVKVVDELVKVMGRHKPENIVIEMARENQTTQKGQKNSRERMKRIEEGIKELGSQILKEHPVENTQLQNEKLYLYYLQNGRDMYVDQELDINRLSDYDVDHIVPQSFLKDDSIDNKVLTRSDKARGKSDNVPSEEVVKKMKNYWRQLLNAKLITQRKFDNLTKAERGGLSELDKAGFIKRQLVETRQITKHVAQILDSRMNTKYDENDKLIREVKVITLKSKLVSDFRKDFQFYKVREINNYHHAHDAYLNAVVGTALIKKYPKLESEFVYGDYKVYDVRKMIAKSEQEIGKATAKYFFYSNIMNFFKTEITLANGEIRKRPLIETNGETGEIVWDKGRDFATVRKVLSMPQVNIVKKTEVQTGGFSKESILPKRNSDKLIARKKDWDPKKYGGFDSPTVAYSVLVVAKVEKGKSKKLKSVKELLGITIMERSSFEKNPIDFLEAKGYKEVKKDLIIKLPKYSLFELENGRKRMLASAGELQKGNELALPSKYVNFLYLASHYEKLKGSPEDNEQKQLFVEQHKHYLDEIIEQISEFSKRVILADANLDKVLSAYNKHRDKPIREQAENIIHLFTLTNLGAPAAFKYFDTTIDRKRYTSTKEVLDATLIHQSITGLYETRIDLSQLGGDGGEAAAKGGGGSEAAAKGGTAPLEEEYRLFLEAPIQNVTLLEQWKREIPKVWAEINPPGLASTQAPIHVQLLSTALPVRVRQYPITLEAKRSLRETIRKFRAAGILRPVHSPWNTPLLPVRKSGTSEYRMVQDLREVNKRVETIHPTVPNPYTLLSLLPPDRIWYSVLDLKDAFFCIPLAPESQLIFAFEWADAEEGESGQLTWTRLPQGFKNSPTLFNEALNRDLQGFRLDHPSVSLLQYVDDLLIAADTQAACLSATRDLLMTLAELGYRVSGKKAQLCQEEVTYLGFKIHKGSRSLSNSRTQAILQIPVPKTKRQVREFLGKIGYCRLFIPGFAELAQPLYAATRPGNDPLVWGEKEEEAFQSLKLALTQPPALALPSLDKPFQLFVEETSGAAKGVLTQALGPWKRPVAYLSKRLDPVAAGWPRCLRAIAAAALLTREASKLTFGQDIEITSSHNLESLLRSPPDKWLTNARITQYQVLLLDPPRVRFKQTAALNPATLLPETDDTLPIHHCLDTLDSLTSTRPDLTDQPLAQAEATLFTDGSSYIRDGKRYAGAAVVTLDSVIWAEPLPIGTSAQKAELIALTKALEWSKDKSVNIYTDSRYAFATLHVHGMIYRERGWLTAGGKAIKNAPEILALLTAVWLPKRVAVMHCKGHQKDDAPTSTGNRRADEVAREVAIRPLSTQATISAGKRTADGSEFEKRTADGSEFESPKKKAKVE

SEQ ID NO: 1400 - protein, 2112 aa, synthetic construct
MPAAKRVKLDGGDKKYSIGLDIGTNSVGWAVITDEYKVPSKKFKVLGNTDRHSIKKNLIGALLFDSGETAEATRLKRTARRRYTRRKNRICYLQEIFSNEMAKVDDSFFHRLEESFLVEEDKKHERHPIFGNIVDEVAYHEKYPTIYHLRKKLVDSTDKADLRLIYLALAHMIKFRGHFLIEGDLNPDNSDVDKLFIQLVQTYNQLFEENPINASGVDAKAILSARLSKSRRLENLIAQLPGEKKNGLFGNLIALSLGLTPNFKSNFDLAEDAKLQLSKDTYDDDLDNLLAQIGDQYADLFLAAKNLSDAILLSDILRVNTEITKAPLSASMIKRYDEHHQDLTLLKALVRQQLPEKYKEIFFDQSKNGYAGYIDGGASQEEFYKFIKPILEKMDGTEELLVKLNREDLLRKQRTFDNGSIPHQIHLGELHAILRRQEDFYPFLKDNREKIEKILTFRIPYYVGPLARGNSRFAWMTRKSEETITPWNFEEVVDKGASAQSFIERMTNFDKNLPNEKVLPKHSLLYEYFTVYNELTKVKYVTEGMRKPAFLSGEQKKAIVDLLFKTNRKVTVKQLKEDYFKKIECFDSVEISGVEDRFNASLGTYHDLLKIIKDKDFLDNEENEDILEDIVLTLTLFEDREMIEERLKTYAHLFDDKVMKQLKRRRYTGWGRLSRKLINGIRDKQSGKTILDFLKSDGFANRNFMQLIHDDSLTFKEDIQKAQVSGQGDSLHEHIANLAGSPAIKKGILQTVKVVDELVKVMGRHKPENIVIEMARENQTTQKGQKNSRERMKRIEEGIKELGSQILKEHPVENTQLQNEKLYLYYLQNGRDMYVDQELDINRLSDYDVDHIVPQSFLKDDSIDNKVLTRSDKARGKSDNVPSEEVVKKMKNYWRQLLNAKLITQRKFDNLTKAERGGLSELDKAGFIKRQLVETRQITKHVAQILDSRMNTKYDENDKLIREVKVITLKSKLVSDFRKDFQFYKVREINNYHHAHDAYLNAVVGTALIKKYPKLESEFVYGDYKVYDVRKMIAKSEQEIGKATAKYFFYSNIMNFFKTEITLANGEIRKRPLIETNGETGEIVWDKGRDFATVRKVLSMPQVNIVKKTEVQTGGFSKESILPKRNSDKLIARKKDWDPKKYGGFDSPTVAYSVLVVAKVEKGKSKKLKSVKELLGITIMERSSFEKNPIDFLEAKGYKEVKKDLIIKLPKYSLFELENGRKRMLASAGELQKGNELALPSKYVNFLYLASHYEKLKGSPEDNEQKQLFVEQHKHYLDEIIEQISEFSKRVILADANLDKVLSAYNKHRDKPIREQAENIIHLFTLTNLGAPAAFKYFDTTIDRKRYTSTKEVLDATLIHQSITGLYETRIDLSQLGGDGGEAAAKEAAAKEAAAKEAAAKEAAAKGGTAPLEEEYRLFLEAPIQNVTLLEQWKREIPKVWAEINPPGLASTQAPIHVQLLSTALPVRVRQYPITLEAKRSLRETIRKFRAAGILRPVHSPWNTPLLPVRKSGTSEYRMVQDLREVNKRVETIHPTVPNPYTLLSLLPPDRIWYSVLDLKDAFFCIPLAPESQLIFAFEWADAEEGESGQLTWTRLPQGFKNSPTLFNEALNRDLQGFRLDHPSVSLLQYVDDLLIAADTQAACLSATRDLLMTLAELGYRVSGKKAQLCQEEVTYLGFKIHKGSRSLSNSRTQAILQIPVPKTKRQVREFLGKIGYCRLFIPGFAELAQPLYAATRPGNDPLVWGEKEEEAFQSLKLALTQPPALALPSLDKPFQLFVEETSGAAKGVLTQALGPWKRPVAYLSKRLDPVAAGWPRCLRAIAAAALLTREASKLTFGQDIEITSSHNLESLLRSPPDKWLTNARITQYQVLLLDPPRVRFKQTAALNPATLLPETDDTLPIHHCLDTLDSLTSTRPDLTDQPLAQAEATLFTDGSSYIRDGKRYAGAAVVTLDSVIWAEPLPIGTSAQKAELIALTKALEWSKDKSVNIYTDSRYAFATLHVHGMIYRERGWLTAGGKAIKNAPEILALLTAVWLPKRVAVMHCKGHQKDDAPTSTGNRRADEVAREVAIRPLSTQATISAGKRTADGSEFEKRTADGSEFESPKKKAKVE

SEQ ID NO: 1401 - protein, 2096 aa, synthetic construct
MPAAKRVKLDGGDKKYSIGLDIGTNSVGWAVITDEYKVPSKKFKVLGNTDRHSIKKNLIGALLFDSGETAEATRLKRTARRRYTRRKNRICYLQEIFSNEMAKVDDSFFHRLEESFLVEEDKKHERHPIFGNIVDEVAYHEKYPTIYHLRKKLVDSTDKADLRLIYLALAHMIKFRGHFLIEGDLNPDNSDVDKLFIQLVQTYNQLFEENPINASGVDAKAILSARLSKSRRLENLIAQLPGEKKNGLFGNLIALSLGLTPNFKSNFDLAEDAKLQLSKDTYDDDLDNLLAQIGDQYADLFLAAKNLSDAILLSDILRVNTEITKAPLSASMIKRYDEHHQDLTLLKALVRQQLPEKYKEIFFDQSKNGYAGYIDGGASQEEFYKFIKPILEKMDGTEELLVKLNREDLLRKQRTFDNGSIPHQIHLGELHAILRRQEDFYPFLKDNREKIEKILTFRIPYYVGPLARGNSRFAWMTRKSEETITPWNFEEVVDKGASAQSFIERMTNFDKNLPNEKVLPKHSLLYEYFTVYNELTKVKYVTEGMRKPAFLSGEQKKAIVDLLFKTNRKVTVKQLKEDYFKKIECFDSVEISGVEDRFNASLGTYHDLLKIIKDKDFLDNEENEDILEDIVLTLTLFEDREMIEERLKTYAHLFDDKVMKQLKRRRYTGWGRLSRKLINGIRDKQSGKTILDFLKSDGFANRNFMQLIHDDSLTFKEDIQKAQVSGQGDSLHEHIANLAGSPAIKKGILQTVKVVDELVKVMGRHKPENIVIEMARENQTTQKGQKNSRERMKRIEEGIKELGSQILKEHPVENTQLQNEKLYLYYLQNGRDMYVDQELDINRLSDYDVDHIVPQSFLKDDSIDNKVLTRSDKARGKSDNVPSEEVVKKMKNYWRQLLNAKLITQRKFDNLTKAERGGLSELDKAGFIKRQLVETRQITKHVAQILDSRMNTKYDENDKLIREVKVITLKSKLVSDFRKDFQFYKVREINNYHHAHDAYLNAVVGTALIKKYPKLESEFVYGDYKVYDVRKMIAKSEQEIGKATAKYFFYSNIMNFFKTEITLANGEIRKRPLIETNGETGEIVWDKGRDFATVRKVLSMPQVNIVKKTEVQTGGFSKESILPKRNSDKLIARKKDWDPKKYGGFDSPTVAYSVLVVAKVEKGKSKKLKSVKELLGITIMERSSFEKNPIDFLEAKGYKEVKKDLIIKLPKYSLFELENGRKRMLASAGELQKGNELALPSKYVNFLYLASHYEKLKGSPEDNEQKQLFVEQHKHYLDEIIEQISEFSKRVILADANLDKVLSAYNKHRDKPIREQAENIIHLFTLTNLGAPAAFKYFDTTIDRKRYTSTKEVLDATLIHQSITGLYETRIDLSQLGGDGGPAPGSSGGSGGTAPLEEEYRLFLEAPIQNVTLLEQWKREIPKVWAEINPPGLASTQAPIHVQLLSTALPVRVRQYPITLEAKRSLRETIRKFRAAGILRPVHSPWNTPLLPVRKSGTSEYRMVQDLREVNKRVETIHPTVPNPYTLLSLLPPDRIWYSVLDLKDAFFCIPLAPESQLIFAFEWADAEEGESGQLTWTRLPQGFKNSPTLFNEALNRDLQGFRLDHPSVSLLQYVDDLLIAADTQAACLSATRDLLMTLAELGYRVSGKKAQLCQEEVTYLGFKIHKGSRSLSNSRTQAILQIPVPKTKRQVREFLGKIGYCRLFIPGFAELAQPLYAATRPGNDPLVWGEKEEEAFQSLKLALTQPPALALPSLDKPFQLFVEETSGAAKGVLTQALGPWKRPVAYLSKRLDPVAAGWPRCLRAIAAAALLTREASKLTFGQDIEITSSHNLESLLRSPPDKWLTNARITQYQVLLLDPPRVRFKQTAALNPATLLPETDDTLPIHHCLDTLDSLTSTRPDLTDQPLAQAEATLFTDGSSYIRDGKRYAGAAVVTLDSVIWAEPLPIGTSAQKAELIALTKALEWSKDKSVNIYTDSRYAFATLHVHGMIYRERGWLTAGGKAIKNAPEILALLTAVWLPKRVAVMHCKGHQKDDAPTSTGNRRADEVAREVAIRPLSTQATISAGKRTADGSEFEKRTADGSEFESPKKKAKVE

SEQ ID NO: 1402 - protein, 2096 aa, synthetic construct
MPAAKRVKLDGGDKKYSIGLDIGTNSVGWAVITDEYKVPSKKFKVLGNTDRHSIKKNLIGALLFDSGETAEATRLKRTARRRYTRRKNRICYLQEIFSNEMAKVDDSFFHRLEESFLVEEDKKHERHPIFGNIVDEVAYHEKYPTIYHLRKKLVDSTDKADLRLIYLALAHMIKFRGHFLIEGDLNPDNSDVDKLFIQLVQTYNQLFEENPINASGVDAKAILSARLSKSRRLENLIAQLPGEKKNGLFGNLIALSLGLTPNFKSNFDLAEDAKLQLSKDTYDDDLDNLLAQIGDQYADLFLAAKNLSDAILLSDILRVNTEITKAPLSASMIKRYDEHHQDLTLLKALVRQQLPEKYKEIFFDQSKNGYAGYIDGGASQEEFYKFIKPILEKMDGTEELLVKLNREDLLRKQRTFDNGSIPHQIHLGELHAILRRQEDFYPFLKDNREKIEKILTFRIPYYVGPLARGNSRFAWMTRKSEETITPWNFEEVVDKGASAQSFIERMTNFDKNLPNEKVLPKHSLLYEYFTVYNELTKVKYVTEGMRKPAFLSGEQKKAIVDLLFKTNRKVTVKQLKEDYFKKIECFDSVEISGVEDRFNASLGTYHDLLKIIKDKDFLDNEENEDILEDIVLTLTLFEDREMIEERLKTYAHLFDDKVMKQLKRRRYTGWGRLSRKLINGIRDKQSGKTILDFLKSDGFANRNFMQLIHDDSLTFKEDIQKAQVSGQGDSLHEHIANLAGSPAIKKGILQTVKVVDELVKVMGRHKPENIVIEMARENQTTQKGQKNSRERMKRIEEGIKELGSQILKEHPVENTQLQNEKLYLYYLQNGRDMYVDQELDINRLSDYDVDHIVPQSFLKDDSIDNKVLTRSDKARGKSDNVPSEEVVKKMKNYWRQLLNAKLITQRKFDNLTKAERGGLSELDKAGFIKRQLVETRQITKHVAQILDSRMNTKYDENDKLIREVKVITLKSKLVSDFRKDFQFYKVREINNYHHAHDAYLNAVVGTALIKKYPKLESEFVYGDYKVYDVRKMIAKSEQEIGKATAKYFFYSNIMNFFKTEITLANGEIRKRPLIETNGETGEIVWDKGRDFATVRKVLSMPQVNIVKKTEVQTGGFSKESILPKRNSDKLIARKKDWDPKKYGGFDSPTVAYSVLVVAKVEKGKSKKLKSVKELLGITIMERSSFEKNPIDFLEAKGYKEVKKDLIIKLPKYSLFELENGRKRMLASAGELQKGNELALPSKYVNFLYLASHYEKLKGSPEDNEQKQLFVEQHKHYLDEIIEQISEFSKRVILADANLDKVLSAYNKHRDKPIREQAENIIHLFTLTNLGAPAAFKYFDTTIDRKRYTSTKEVLDATLIHQSITGLYETRIDLSQLGGDGGGGGPAPGGSGGTAPLEEEYRLFLEAPIQNVTLLEQWKREIPKVWAEINPPGLASTQAPIHVQLLSTALPVRVRQYPITLEAKRSLRETIRKFRAAGILRPVHSPWNTPLLPVRKSGTSEYRMVQDLREVNKRVETIHPTVPNPYTLLSLLPPDRIWYSVLDLKDAFFCIPLAPESQLIFAFEWADAEEGESGQLTWTRLPQGFKNSPTLFNEALNRDLQGFRLDHPSVSLLQYVDDLLIAADTQAACLSATRDLLMTLAELGYRVSGKKAQLCQEEVTYLGFKIHKGSRSLSNSRTQAILQIPVPKTKRQVREFLGKIGYCRLFIPGFAELAQPLYAATRPGNDPLVWGEKEEEAFQSLKLALTQPPALALPSLDKPFQLFVEETSGAAKGVLTQALGPWKRPVAYLSKRLDPVAAGWPRCLRAIAAAALLTREASKLTFGQDIEITSSHNLESLLRSPPDKWLTNARITQYQVLLLDPPRVRFKQTAALNPATLLPETDDTLPIHHCLDTLDSLTSTRPDLTDQPLAQAEATLFTDGSSYIRDGKRYAGAAVVTLDSVIWAEPLPIGTSAQKAELIALTKALEWSKDKSVNIYTDSRYAFATLHVHGMIYRERGWLTAGGKAIKNAPEILALLTAVWLPKRVAVMHCKGHQKDDAPTSTGNRRADEVAREVAIRPLSTQATISAGKRTADGSEFEKRTADGSEFESPKKKAKVE

SEQ ID NO: 1403 - skipped

SEQ ID NO: 1404 - protein, 2098 aa, synthetic construct
MPAAKRVKLDGGDKKYSIGLDIGTNSVGWAVITDEYKVPSKKFKVLGNTDRHSIKKNLIGALLFDSGETAEATRLKRTARRRYTRRKNRICYLQEIFSNEMAKVDDSFFHRLEESFLVEEDKKHERHPIFGNIVDEVAYHEKYPTIYHLRKKLVDSTDKADLRLIYLALAHMIKFRGHFLIEGDLNPDNSDVDKLFIQLVQTYNQLFEENPINASGVDAKAILSARLSKSRRLENLIAQLPGEKKNGLFGNLIALSLGLTPNFKSNFDLAEDAKLQLSKDTYDDDLDNLLAQIGDQYADLFLAAKNLSDAILLSDILRVNTEITKAPLSASMIKRYDEHHQDLTLLKALVRQQLPEKYKEIFFDQSKNGYAGYIDGGASQEEFYKFIKPILEKMDGTEELLVKLNREDLLRKQRTFDNGSIPHQIHLGELHAILRRQEDFYPFLKDNREKIEKILTFRIPYYVGPLARGNSRFAWMTRKSEETITPWNFEEVVDKGASAQSFIERMTNFDKNLPNEKVLPKHSLLYEYFTVYNELTKVKYVTEGMRKPAFLSGEQKKAIVDLLFKTNRKVTVKQLKEDYFKKIECFDSVEISGVEDRFNASLGTYHDLLKIIKDKDFLDNEENEDILEDIVLTLTLFEDREMIEERLKTYAHLFDDKVMKQLKRRRYTGWGRLSRKLINGIRDKQSGKTILDFLKSDGFANRNFMQLIHDDSLTFKEDIQKAQVSGQGDSLHEHIANLAGSPAIKKGILQTVKVVDELVKVMGRHKPENIVIEMARENQTTQKGQKNSRERMKRIEEGIKELGSQILKEHPVENTQLQNEKLYLYYLQNGRDMYVDQELDINRLSDYDVDHIVPQSFLKDDSIDNKVLTRSDKARGKSDNVPSEEVVKKMKNYWRQLLNAKLITQRKFDNLTKAERGGLSELDKAGFIKRQLVETRQITKHVAQILDSRMNTKYDENDKLIREVKVITLKSKLVSDFRKDFQFYKVREINNYHHAHDAYLNAVVGTALIKKYPKLESEFVYGDYKVYDVRKMIAKSEQEIGKATAKYFFYSNIMNFFKTEITLANGEIRKRPLIETNGETGEIVWDKGRDFATVRKVLSMPQVNIVKKTEVQTGGFSKESILPKRNSDKLIARKKDWDPKKYGGFDSPTVAYSVLVVAKVEKGKSKKLKSVKELLGITIMERSSFEKNPIDFLEAKGYKEVKKDLIIKLPKYSLFELENGRKRMLASAGELQKGNELALPSKYVNFLYLASHYEKLKGSPEDNEQKQLFVEQHKHYLDEIIEQISEFSKRVILADANLDKVLSAYNKHRDKPIREQAENIIHLFTLTNLGAPAAFKYFDTTIDRKRYTSTKEVLDATLIHQSITGLYETRIDLSQLGGDGGGGGGSSEAAAKGGTAPLEEEYRLFLEAPIQNVTLLEQWKREIPKVWAEINPPGLASTQAPIHVQLLSTALPVRVRQYPITLEAKRSLRETIRKFRAAGILRPVHSPWNTPLLPVRKSGTSEYRMVQDLREVNKRVETIHPTVPNPYTLLSLLPPDRIWYSVLDLKDAFFCIPLAPESQLIFAFEWADAEEGESGQLTWTRLPQGFKNSPTLFNEALNRDLQGFRLDHPSVSLLQYVDDLLIAADTQAACLSATRDLLMTLAELGYRVSGKKAQLCQEEVTYLGFKIHKGSRSLSNSRTQAILQIPVPKTKRQVREFLGKIGYCRLFIPGFAELAQPLYAATRPGNDPLVWGEKEEEAFQSLKLALTQPPALALPSLDKPFQLFVEETSGAAKGVLTQALGPWKRPVAYLSKRLDPVAAGWPRCLRAIAAAALLTREASKLTFGQDIEITSSHNLESLLRSPPDKWLTNARITQYQVLLLDPPRVRFKQTAALNPATLLPETDDTLPIHHCLDTLDSLTSTRPDLTDQPLAQAEATLFTDGSSYIRDGKRYAGAAVVTLDSVIWAEPLPIGTSAQKAELIALTKALEWSKDKSVNIYTDSRYAFATLHVHGMIYRERGWLTAGGKAIKNAPEILALLTAVWLPKRVAVMHCKGHQKDDAPTSTGNRRADEVAREVAIRPLSTQATISAGKRTADGSEFEKRTADGSEFESPKKKAKVE

SEQ ID NO: 1405 - protein, 2095 aa, synthetic construct
MPAAKRVKLDGGDKKYSIGLDIGTNSVGWAVITDEYKVPSKKFKVLGNTDRHSIKKNLIGALLFDSGETAEATRLKRTARRRYTRRKNRICYLQEIFSNEMAKVDDSFFHRLEESFLVEEDKKHERHPIFGNIVDEVAYHEKYPTIYHLRKKLVDSTDKADLRLIYLALAHMIKFRGHFLIEGDLNPDNSDVDKLFIQLVQTYNQLFEENPINASGVDAKAILSARLSKSRRLENLIAQLPGEKKNGLFGNLIALSLGLTPNFKSNFDLAEDAKLQLSKDTYDDDLDNLLAQIGDQYADLFLAAKNLSDAILLSDILRVNTEITKAPLSASMIKRYDEHHQDLTLLKALVRQQLPEKYKEIFFDQSKNGYAGYIDGGASQEEFYKFIKPILEKMDGTEELLVKLNREDLLRKQRTFDNGSIPHQIHLGELHAILRRQEDFYPFLKDNREKIEKILTFRIPYYVGPLARGNSRFAWMTRKSEETITPWNFEEVVDKGASAQSFIERMTNFDKNLPNEKVLPKHSLLYEYFTVYNELTKVKYVTEGMRKPAFLSGEQKKAIVDLLFKTNRKVTVKQLKEDYFKKIECFDSVEISGVEDRFNASLGTYHDLLKIIKDKDFLDNEENEDILEDIVLTLTLFEDREMIEERLKTYAHLFDDKVMKQLKRRRYTGWGRLSRKLINGIRDKQSGKTILDFLKSDGFANRNFMQLIHDDSLTFKEDIQKAQVSGQGDSLHEHIANLAGSPAIKKGILQTVKVVDELVKVMGRHKPENIVIEMARENQTTQKGQKNSRERMKRIEEGIKELGSQILKEHPVENTQLQNEKLYLYYLQNGRDMYVDQELDINRLSDYDVDHIVPQSFLKDDSIDNKVLTRSDKARGKSDNVPSEEVVKKMKNYWRQLLNAKLITQRKFDNLTKAERGGLSELDKAGFIKRQLVETRQITKHVAQILDSRMNTKYDENDKLIREVKVITLKSKLVSDFRKDFQFYKVREINNYHHAHDAYLNAVVGTALIKKYPKLESEFVYGDYKVYDVRKMIAKSEQEIGKATAKYFFYSNIMNFFKTEITLANGEIRKRPLIETNGETGEIVWDKGRDFATVRKVLSMPQVNIVKKTEVQTGGFSKESILPKRNSDKLIARKKDWDPKKYGGFDSPTVAYSVLVVAKVEKGKSKKLKSVKELLGITIMERSSFEKNPIDFLEAKGYKEVKKDLIIKLPKYSLFELENGRKRMLASAGELQKGNELALPSKYVNFLYLASHYEKLKGSPEDNEQKQLFVEQHKHYLDEIIEQISEFSKRVILADANLDKVLSAYNKHRDKPIREQAENIIHLFTLTNLGAPAAFKYFDTTIDRKRYTSTKEVLDATLIHQSITGLYETRIDLSQLGGDGGGSSEAAAKGGTAPLEEEYRLFLEAPIQNVTLLEQWKREIPKVWAEINPPGLASTQAPIHVQLLSTALPVRVRQYPITLEAKRSLRETIRKFRAAGILRPVHSPWNTPLLPVRKSGTSEYRMVQDLREVNKRVETIHPTVPNPYTLLSLLPPDRIWYSVLDLKDAFFCIPLAPESQLIFAFEWADAEEGESGQLTWTRLPQGFKNSPTLFNEALNRDLQGFRLDHPSVSLLQYVDDLLIAADTQAACLSATRDLLMTLAELGYRVSGKKAQLCQEEVTYLGFKIHKGSRSLSNSRTQAILQIPVPKTKRQVREFLGKIGYCRLFIPGFAELAQPLYAATRPGNDPLVWGEKEEEAFQSLKLALTQPPALALPSLDKPFQLFVEETSGAAKGVLTQALGPWKRPVAYLSKRLDPVAAGWPRCLRAIAAAALLTREASKLTFGQDIEITSSHNLESLLRSPPDKWLTNARITQYQVLLLDPPRVRFKQTAALNPATLLPETDDTLPIHHCLDTLDSLTSTRPDLTDQPLAQAEATLFTDGSSYIRDGKRYAGAAVVTLDSVIWAEPLPIGTSAQKAELIALTKALEWSKDKSVNIYTDSRYAFATLHVHGMIYRERGWLTAGGKAIKNAPEILALLTAVWLPKRVAVMHCKGHQKDDAPTSTGNRRADEVAREVAIRPLSTQATISAGKRTADGSEFEKRTADGSEFESPKKKAKVE

SEQ ID NO: 1406 - protein, 2098 aa, synthetic construct
MPAAKRVKLDGGDKKYSIGLDIGTNSVGWAVITDEYKVPSKKFKVLGNTDRHSIKKNLIGALLFDSGETAEATRLKRTARRRYTRRKNRICYLQEIFSNEMAKVDDSFFHRLEESFLVEEDKKHERHPIFGNIVDEVAYHEKYPTIYHLRKKLVDSTDKADLRLIYLALAHMIKFRGHFLIEGDLNPDNSDVDKLFIQLVQTYNQLFEENPINASGVDAKAILSARLSKSRRLENLIAQLPGEKKNGLFGNLIALSLGLTPNFKSNFDLAEDAKLQLSKDTYDDDLDNLLAQIGDQYADLFLAAKNLSDAILLSDILRVNTEITKAPLSASMIKRYDEHHQDLTLLKALVRQQLPEKYKEIFFDQSKNGYAGYIDGGASQEEFYKFIKPILEKMDGTEELLVKLNREDLLRKQRTFDNGSIPHQIHLGELHAILRRQEDFYPFLKDNREKIEKILTFRIPYYVGPLARGNSRFAWMTRKSEETITPWNFEEVVDKGASAQSFIERMTNFDKNLPNEKVLPKHSLLYEYFTVYNELTKVKYVTEGMRKPAFLSGEQKKAIVDLLFKTNRKVTVKQLKEDYFKKIECFDSVEISGVEDRFNASLGTYHDLLKIIKDKDFLDNEENEDILEDIVLTLTLFEDREMIEERLKTYAHLFDDKVMKQLKRRRYTGWGRLSRKLINGIRDKQSGKTILDFLKSDGFANRNFMQLIHDDSLTFKEDIQKAQVSGQGDSLHEHIANLAGSPAIKKGILQTVKVVDELVKVMGRHKPENIVIEMARENQTTQKGQKNSRERMKRIEEGIKELGSQILKEHPVENTQLQNEKLYLYYLQNGRDMYVDQELDINRLSDYDVDHIVPQSFLKDDSIDNKVLTRSDKARGKSDNVPSEEVVKKMKNYWRQLLNAKLITQRKFDNLTKAERGGLSELDKAGFIKRQLVETRQITKHVAQILDSRMNTKYDENDKLIREVKVITLKSKLVSDFRKDFQFYKVREINNYHHAHDAYLNAVVGTALIKKYPKLESEFVYGDYKVYDVRKMIAKSEQEIGKATAKYFFYSNIMNFFKTEITLANGEIRKRPLIETNGETGEIVWDKGRDFATVRKVLSMPQVNIVKKTEVQTGGFSKESILPKRNSDKLIARKKDWDPKKYGGFDSPTVAYSVLVVAKVEKGKSKKLKSVKELLGITIMERSSFEKNPIDFLEAKGYKEVKKDLIIKLPKYSLFELENGRKRMLASAGELQKGNELALPSKYVNFLYLASHYEKLKGSPEDNEQKQLFVEQHKHYLDEIIEQISEFSKRVILADANLDKVLSAYNKHRDKPIREQAENIIHLFTLTNLGAPAAFKYFDTTIDRKRYTSTKEVLDATLIHQSITGLYETRIDLSQLGGDGGEAAAKGGSGSSGGTAPLEEEYRLFLEAPIQNVTLLEQWKREIPKVWAEINPPGLASTQAPIHVQLLSTALPVRVRQYPITLEAKRSLRETIRKFRAAGILRPVHSPWNTPLLPVRKSGTSEYRMVQDLREVNKRVETIHPTVPNPYTLLSLLPPDRIWYSVLDLKDAFFCIPLAPESQLIFAFEWADAEEGESGQLTWTRLPQGFKNSPTLFNEALNRDLQGFRLDHPSVSLLQYVDDLLIAADTQAACLSATRDLLMTLAELGYRVSGKKAQLCQEEVTYLGFKIHKGSRSLSNSRTQAILQIPVPKTKRQVREFLGKIGYCRLFIPGFAELAQPLYAATRPGNDPLVWGEKEEEAFQSLKLALTQPPALALPSLDKPFQLFVEETSGAAKGVLTQALGPWKRPVAYLSKRLDPVAAGWPRCLRAIAAAALLTREASKLTFGQDIEITSSHNLESLLRSPPDKWLTNARITQYQVLLLDPPRVRFKQTAALNPATLLPETDDTLPIHHCLDTLDSLTSTRPDLTDQPLAQAEATLFTDGSSYIRDGKRYAGAAVVTLDSVIWAEPLPIGTSAQKAELIALTKALEWSKDKSVNIYTDSRYAFATLHVHGMIYRERGWLTAGGKAIKNAPEILALLTAVWLPKRVAVMHCKGHQKDDAPTSTGNRRADEVAREVAIRPLSTQATISAGKRTADGSEFEKRTADGSEFESPKKKAKVE

SEQ ID NO: 1407-1409 - skipped (3 entries)

SEQ ID NO: 1410 - protein, 2093 aa, synthetic construct
MPAAKRVKLDGGDKKYSIGLDIGTNSVGWAVITDEYKVPSKKFKVLGNTDRHSIKKNLIGALLFDSGETAEATRLKRTARRRYTRRKNRICYLQEIFSNEMAKVDDSFFHRLEESFLVEEDKKHERHPIFGNIVDEVAYHEKYPTIYHLRKKLVDSTDKADLRLIYLALAHMIKFRGHFLIEGDLNPDNSDVDKLFIQLVQTYNQLFEENPINASGVDAKAILSARLSKSRRLENLIAQLPGEKKNGLFGNLIALSLGLTPNFKSNFDLAEDAKLQLSKDTYDDDLDNLLAQIGDQYADLFLAAKNLSDAILLSDILRVNTEITKAPLSASMIKRYDEHHQDLTLLKALVRQQLPEKYKEIFFDQSKNGYAGYIDGGASQEEFYKFIKPILEKMDGTEELLVKLNREDLLRKQRTFDNGSIPHQIHLGELHAILRRQEDFYPFLKDNREKIEKILTFRIPYYVGPLARGNSRFAWMTRKSEETITPWNFEEVVDKGASAQSFIERMTNFDKNLPNEKVLPKHSLLYEYFTVYNELTKVKYVTEGMRKPAFLSGEQKKAIVDLLFKTNRKVTVKQLKEDYFKKIECFDSVEISGVEDRFNASLGTYHDLLKIIKDKDFLDNEENEDILEDIVLTLTLFEDREMIEERLKTYAHLFDDKVMKQLKRRRYTGWGRLSRKLINGIRDKQSGKTILDFLKSDGFANRNFMQLIHDDSLTFKEDIQKAQVSGQGDSLHEHIANLAGSPAIKKGILQTVKVVDELVKVMGRHKPENIVIEMARENQTTQKGQKNSRERMKRIEEGIKELGSQILKEHPVENTQLQNEKLYLYYLQNGRDMYVDQELDINRLSDYDVDHIVPQSFLKDDSIDNKVLTRSDKARGKSDNVPSEEVVKKMKNYWRQLLNAKLITQRKFDNLTKAERGGLSELDKAGFIKRQLVETRQITKHVAQILDSRMNTKYDENDKLIREVKVITLKSKLVSDFRKDFQFYKVREINNYHHAHDAYLNAVVGTALIKKYPKLESEFVYGDYKVYDVRKMIAKSEQEIGKATAKYFFYSNIMNFFKTEITLANGEIRKRPLIETNGETGEIVWDKGRDFATVRKVLSMPQVNIVKKTEVQTGGFSKESILPKRNSDKLIARKKDWDPKKYGGFDSPTVAYSVLVVAKVEKGKSKKLKSVKELLGITIMERSSFEKNPIDFLEAKGYKEVKKDLIIKLPKYSLFELENGRKRMLASAGELQKGNELALPSKYVNFLYLASHYEKLKGSPEDNEQKQLFVEQHKHYLDEIIEQISEFSKRVILADANLDKVLSAYNKHRDKPIREQAENIIHLFTLTNLGAPAAFKYFDTTIDRKRYTSTKEVLDATLIHQSITGLYETRIDLSQLGGDGGPAPGGGGGTAPLEEEYRLFLEAPIQNVTLLEQWKREIPKVWAEINPPGLASTQAPIHVQLLSTALPVRVRQYPITLEAKRSLRETIRKFRAAGILRPVHSPWNTPLLPVRKSGTSEYRMVQDLREVNKRVETIHPTVPNPYTLLSLLPPDRIWYSVLDLKDAFFCIPLAPESQLIFAFEWADAEEGESGQLTWTRLPQGFKNSPTLFNEALNRDLQGFRLDHPSVSLLQYVDDLLIAADTQAACLSATRDLLMTLAELGYRVSGKKAQLCQEEVTYLGFKIHKGSRSLSNSRTQAILQIPVPKTKRQVREFLGKIGYCRLFIPGFAELAQPLYAATRPGNDPLVWGEKEEEAFQSLKLALTQPPALALPSLDKPFQLFVEETSGAAKGVLTQALGPWKRPVAYLSKRLDPVAAGWPRCLRAIAAAALLTREASKLTFGQDIEITSSHNLESLLRSPPDKWLTNARITQYQVLLLDPPRVRFKQTAALNPATLLPETDDTLPIHHCLDTLDSLTSTRPDLTDQPLAQAEATLFTDGSSYIRDGKRYAGAAVVTLDSVIWAEPLPIGTSAQKAELIALTKALEWSKDKSVNIYTDSRYAFATLHVHGMIYRERGWLTAGGKAIKNAPEILALLTAVWLPKRVAVMHCKGHQKDDAPTSTGNRRADEVAREVAIRPLSTQATISAGKRTADGSEFEKRTADGSEFESPKKKAKVE

SEQ ID NO: 1411-1414 - skipped (4 entries)

SEQ ID NO: 1415 - protein, 2098 aa, synthetic construct
MPAAKRVKLDGGDKKYSIGLDIGTNSVGWAVITDEYKVPSKKFKVLGNTDRHSIKKNLIGALLFDSGETAEATRLKRTARRRYTRRKNRICYLQEIFSNEMAKVDDSFFHRLEESFLVEEDKKHERHPIFGNIVDEVAYHEKYPTIYHLRKKLVDSTDKADLRLIYLALAHMIKFRGHFLIEGDLNPDNSDVDKLFIQLVQTYNQLFEENPINASGVDAKAILSARLSKSRRLENLIAQLPGEKKNGLFGNLIALSLGLTPNFKSNFDLAEDAKLQLSKDTYDDDLDNLLAQIGDQYADLFLAAKNLSDAILLSDILRVNTEITKAPLSASMIKRYDEHHQDLTLLKALVRQQLPEKYKEIFFDQSKNGYAGYIDGGASQEEFYKFIKPILEKMDGTEELLVKLNREDLLRKQRTFDNGSIPHQIHLGELHAILRRQEDFYPFLKDNREKIEKILTFRIPYYVGPLARGNSRFAWMTRKSEETITPWNFEEVVDKGASAQSFIERMTNFDKNLPNEKVLPKHSLLYEYFTVYNELTKVKYVTEGMRKPAFLSGEQKKAIVDLLFKTNRKVTVKQLKEDYFKKIECFDSVEISGVEDRFNASLGTYHDLLKIIKDKDFLDNEENEDILEDIVLTLTLFEDREMIEERLKTYAHLFDDKVMKQLKRRRYTGWGRLSRKLINGIRDKQSGKTILDFLKSDGFANRNFMQLIHDDSLTFKEDIQKAQVSGQGDSLHEHIANLAGSPAIKKGILQTVKVVDELVKVMGRHKPENIVIEMARENQTTQKGQKNSRERMKRIEEGIKELGSQILKEHPVENTQLQNEKLYLYYLQNGRDMYVDQELDINRLSDYDVDHIVPQSFLKDDSIDNKVLTRSDKARGKSDNVPSEEVVKKMKNYWRQLLNAKLITQRKFDNLTKAERGGLSELDKAGFIKRQLVETRQITKHVAQILDSRMNTKYDENDKLIREVKVITLKSKLVSDFRKDFQFYKVREINNYHHAHDAYLNAVVGTALIKKYPKLESEFVYGDYKVYDVRKMIAKSEQEIGKATAKYFFYSNIMNFFKTEITLANGEIRKRPLIETNGETGEIVWDKGRDFATVRKVLSMPQVNIVKKTEVQTGGFSKESILPKRNSDKLIARKKDWDPKKYGGFDSPTVAYSVLVVAKVEKGKSKKLKSVKELLGITIMERSSFEKNPIDFLEAKGYKEVKKDLIIKLPKYSLFELENGRKRMLASAGELQKGNELALPSKYVNFLYLASHYEKLKGSPEDNEQKQLFVEQHKHYLDEIIEQISEFSKRVILADANLDKVLSAYNKHRDKPIREQAENIIHLFTLTNLGAPAAFKYFDTTIDRKRYTSTKEVLDATLIHQSITGLYETRIDLSQLGGDGGGGGPAPEAAAKGGTAPLEEEYRLFLEAPIQNVTLLEQWKREIPKVWAEINPPGLASTQAPIHVQLLSTALPVRVRQYPITLEAKRSLRETIRKFRAAGILRPVHSPWNTPLLPVRKSGTSEYRMVQDLREVNKRVETIHPTVPNPYTLLSLLPPDRIWYSVLDLKDAFFCIPLAPESQLIFAFEWADAEEGESGQLTWTRLPQGFKNSPTLFNEALNRDLQGFRLDHPSVSLLQYVDDLLIAADTQAACLSATRDLLMTLAELGYRVSGKKAQLCQEEVTYLGFKIHKGSRSLSNSRTQAILQIPVPKTKRQVREFLGKIGYCRLFIPGFAELAQPLYAATRPGNDPLVWGEKEEEAFQSLKLALTQPPALALPSLDKPFQLFVEETSGAAKGVLTQALGPWKRPVAYLSKRLDPVAAGWPRCLRAIAAAALLTREASKLTFGQDIEITSSHNLESLLRSPPDKWLTNARITQYQVLLLDPPRVRFKQTAALNPATLLPETDDTLPIHHCLDTLDSLTSTRPDLTDQPLAQAEATLFTDGSSYIRDGKRYAGAAVVTLDSVIWAEPLPIGTSAQKAELIALTKALEWSKDKSVNIYTDSRYAFATLHVHGMIYRERGWLTAGGKAIKNAPEILALLTAVWLPKRVAVMHCKGHQKDDAPTSTGNRRADEVAREVAIRPLSTQATISAGKRTADGSEFEKRTADGSEFESPKKKAKVE

SEQ ID NO: 1416-1418 - skipped (3 entries)

SEQ ID NO: 1419 - protein, 2098 aa, synthetic construct
MPAAKRVKLDGGDKKYSIGLDIGTNSVGWAVITDEYKVPSKKFKVLGNTDRHSIKKNLIGALLFDSGETAEATRLKRTARRRYTRRKNRICYLQEIFSNEMAKVDDSFFHRLEESFLVEEDKKHERHPIFGNIVDEVAYHEKYPTIYHLRKKLVDSTDKADLRLIYLALAHMIKFRGHFLIEGDLNPDNSDVDKLFIQLVQTYNQLFEENPINASGVDAKAILSARLSKSRRLENLIAQLPGEKKNGLFGNLIALSLGLTPNFKSNFDLAEDAKLQLSKDTYDDDLDNLLAQIGDQYADLFLAAKNLSDAILLSDILRVNTEITKAPLSASMIKRYDEHHQDLTLLKALVRQQLPEKYKEIFFDQSKNGYAGYIDGGASQEEFYKFIKPILEKMDGTEELLVKLNREDLLRKQRTFDNGSIPHQIHLGELHAILRRQEDFYPFLKDNREKIEKILTFRIPYYVGPLARGNSRFAWMTRKSEETITPWNFEEVVDKGASAQSFIERMTNFDKNLPNEKVLPKHSLLYEYFTVYNELTKVKYVTEGMRKPAFLSGEQKKAIVDLLFKTNRKVTVKQLKEDYFKKIECFDSVEISGVEDRFNASLGTYHDLLKIIKDKDFLDNEENEDILEDIVLTLTLFEDREMIEERLKTYAHLFDDKVMKQLKRRRYTGWGRLSRKLINGIRDKQSGKTILDFLKSDGFANRNFMQLIHDDSLTFKEDIQKAQVSGQGDSLHEHIANLAGSPAIKKGILQTVKVVDELVKVMGRHKPENIVIEMARENQTTQKGQKNSRERMKRIEEGIKELGSQILKEHPVENTQLQNEKLYLYYLQNGRDMYVDQELDINRLSDYDVDHIVPQSFLKDDSIDNKVLTRSDKARGKSDNVPSEEVVKKMKNYWRQLLNAKLITQRKFDNLTKAERGGLSELDKAGFIKRQLVETRQITKHVAQILDSRMNTKYDENDKLIREVKVITLKSKLVSDFRKDFQFYKVREINNYHHAHDAYLNAVVGTALIKKYPKLESEFVYGDYKVYDVRKMIAKSEQEIGKATAKYFFYSNIMNFFKTEITLANGEIRKRPLIETNGETGEIVWDKGRDFATVRKVLSMPQVNIVKKTEVQTGGFSKESILPKRNSDKLIARKKDWDPKKYGGFDSPTVAYSVLVVAKVEKGKSKKLKSVKELLGITIMERSSFEKNPIDFLEAKGYKEVKKDLIIKLPKYSLFELENGRKRMLASAGELQKGNELALPSKYVNFLYLASHYEKLKGSPEDNEQKQLFVEQHKHYLDEIIEQISEFSKRVILADANLDKVLSAYNKHRDKPIREQAENIIHLFTLTNLGAPAAFKYFDTTIDRKRYTSTKEVLDATLIHQSITGLYETRIDLSQLGGDGGEAAAKGSSGGGGGTAPLEEEYRLFLEAPIQNVTLLEQWKREIPKVWAEINPPGLASTQAPIHVQLLSTALPVRVRQYPITLEAKRSLRETIRKFRAAGILRPVHSPWNTPLLPVRKSGTSEYRMVQDLREVNKRVETIHPTVPNPYTLLSLLPPDRIWYSVLDLKDAFFCIPLAPESQLIFAFEWADAEEGESGQLTWTRLPQGFKNSPTLFNEALNRDLQGFRLDHPSVSLLQYVDDLLIAADTQAACLSATRDLLMTLAELGYRVSGKKAQLCQEEVTYLGFKIHKGSRSLSNSRTQAILQIPVPKTKRQVREFLGKIGYCRLFIPGFAELAQPLYAATRPGNDPLVWGEKEEEAFQSLKLALTQPPALALPSLDKPFQLFVEETSGAAKGVLTQALGPWKRPVAYLSKRLDPVAAGWPRCLRAIAAAALLTREASKLTFGQDIEITSSHNLESLLRSPPDKWLTNARITQYQVLLLDPPRVRFKQTAALNPATLLPETDDTLPIHHCLDTLDSLTSTRPDLTDQPLAQAEATLFTDGSSYIRDGKRYAGAAVVTLDSVIWAEPLPIGTSAQKAELIALTKALEWSKDKSVNIYTDSRYAFATLHVHGMIYRERGWLTAGGKAIKNAPEILALLTAVWLPKRVAVMHCKGHQKDDAPTSTGNRRADEVAREVAIRPLSTQATISAGKRTADGSEFEKRTADGSEFESPKKKAKVE

SEQ ID NO: 1420-1421 - skipped (2 entries)

SEQ ID NO: 1422 - protein, 2095 aa, synthetic construct
MPAAKRVKLDGGDKKYSIGLDIGTNSVGWAVITDEYKVPSKKFKVLGNTDRHSIKKNLIGALLFDSGETAEATRLKRTARRRYTRRKNRICYLQEIFSNEMAKVDDSFFHRLEESFLVEEDKKHERHPIFGNIVDEVAYHEKYPTIYHLRKKLVDSTDKADLRLIYLALAHMIKFRGHFLIEGDLNPDNSDVDKLFIQLVQTYNQLFEENPINASGVDAKAILSARLSKSRRLENLIAQLPGEKKNGLFGNLIALSLGLTPNFKSNFDLAEDAKLQLSKDTYDDDLDNLLAQIGDQYADLFLAAKNLSDAILLSDILRVNTEITKAPLSASMIKRYDEHHQDLTLLKALVRQQLPEKYKEIFFDQSKNGYAGYIDGGASQEEFYKFIKPILEKMDGTEELLVKLNREDLLRKQRTFDNGSIPHQIHLGELHAILRRQEDFYPFLKDNREKIEKILTFRIPYYVGPLARGNSRFAWMTRKSEETITPWNFEEVVDKGASAQSFIERMTNFDKNLPNEKVLPKHSLLYEYFTVYNELTKVKYVTEGMRKPAFLSGEQKKAIVDLLFKTNRKVTVKQLKEDYFKKIECFDSVEISGVEDRFNASLGTYHDLLKIIKDKDFLDNEENEDILEDIVLTLTLFEDREMIEERLKTYAHLFDDKVMKQLKRRRYTGWGRLSRKLINGIRDKQSGKTILDFLKSDGFANRNFMQLIHDDSLTFKEDIQKAQVSGQGDSLHEHIANLAGSPAIKKGILQTVKVVDELVKVMGRHKPENIVIEMARENQTTQKGQKNSRERMKRIEEGIKELGSQILKEHPVENTQLQNEKLYLYYLQNGRDMYVDQELDINRLSDYDVDHIVPQSFLKDDSIDNKVLTRSDKARGKSDNVPSEEVVKKMKNYWRQLLNAKLITQRKFDNLTKAERGGLSELDKAGFIKRQLVETRQITKHVAQILDSRMNTKYDENDKLIREVKVITLKSKLVSDFRKDFQFYKVREINNYHHAHDAYLNAVVGTALIKKYPKLESEFVYGDYKVYDVRKMIAKSEQEIGKATAKYFFYSNIMNFFKTEITLANGEIRKRPLIETNGETGEIVWDKGRDFATVRKVLSMPQVNIVKKTEVQTGGFSKESILPKRNSDKLIARKKDWDPKKYGGFDSPTVAYSVLVVAKVEKGKSKKLKSVKELLGITIMERSSFEKNPIDFLEAKGYKEVKKDLIIKLPKYSLFELENGRKRMLASAGELQKGNELALPSKYVNFLYLASHYEKLKGSPEDNEQKQLFVEQHKHYLDEIIEQISEFSKRVILADANLDKVLSAYNKHRDKPIREQAENIIHLFTLTNLGAPAAFKYFDTTIDRKRYTSTKEVLDATLIHQSITGLYETRIDLSQLGGDGGEAAAKGGGGGTAPLEEEYRLFLEAPIQNVTLLEQWKREIPKVWAEINPPGLASTQAPIHVQLLSTALPVRVRQYPITLEAKRSLRETIRKFRAAGILRPVHSPWNTPLLPVRKSGTSEYRMVQDLREVNKRVETIHPTVPNPYTLLSLLPPDRIWYSVLDLKDAFFCIPLAPESQLIFAFEWADAEEGESGQLTWTRLPQGFKNSPTLFNEALNRDLQGFRLDHPSVSLLQYVDDLLIAADTQAACLSATRDLLMTLAELGYRVSGKKAQLCQEEVTYLGFKIHKGSRSLSNSRTQAILQIPVPKTKRQVREFLGKIGYCRLFIPGFAELAQPLYAATRPGNDPLVWGEKEEEAFQSLKLALTQPPALALPSLDKPFQLFVEETSGAAKGVLTQALGPWKRPVAYLSKRLDPVAAGWPRCLRAIAAAALLTREASKLTFGQDIEITSSHNLESLLRSPPDKWLTNARITQYQVLLLDPPRVRFKQTAALNPATLLPETDDTLPIHHCLDTLDSLTSTRPDLTDQPLAQAEATLFTDGSSYIRDGKRYAGAAVVTLDSVIWAEPLPIGTSAQKAELIALTKALEWSKDKSVNIYTDSRYAFATLHVHGMIYRERGWLTAGGKAIKNAPEILALLTAVWLPKRVAVMHCKGHQKDDAPTSTGNRRADEVAREVAIRPLSTQATISAGKRTADGSEFEKRTADGSEFESPKKKAKVE

SEQ ID NO: 1423 - protein, 2097 aa, synthetic construct
MPAAKRVKLDGGDKKYSIGLDIGTNSVGWAVITDEYKVPSKKFKVLGNTDRHSIKKNLIGALLFDSGETAEATRLKRTARRRYTRRKNRICYLQEIFSNEMAKVDDSFFHRLEESFLVEEDKKHERHPIFGNIVDEVAYHEKYPTIYHLRKKLVDSTDKADLRLIYLALAHMIKFRGHFLIEGDLNPDNSDVDKLFIQLVQTYNQLFEENPINASGVDAKAILSARLSKSRRLENLIAQLPGEKKNGLFGNLIALSLGLTPNFKSNFDLAEDAKLQLSKDTYDDDLDNLLAQIGDQYADLFLAAKNLSDAILLSDILRVNTEITKAPLSASMIKRYDEHHQDLTLLKALVRQQLPEKYKEIFFDQSKNGYAGYIDGGASQEEFYKFIKPILEKMDGTEELLVKLNREDLLRKQRTFDNGSIPHQIHLGELHAILRRQEDFYPFLKDNREKIEKILTFRIPYYVGPLARGNSRFAWMTRKSEETITPWNFEEVVDKGASAQSFIERMTNFDKNLPNEKVLPKHSLLYEYFTVYNELTKVKYVTEGMRKPAFLSGEQKKAIVDLLFKTNRKVTVKQLKEDYFKKIECFDSVEISGVEDRFNASLGTYHDLLKIIKDKDFLDNEENEDILEDIVLTLTLFEDREMIEERLKTYAHLFDDKVMKQLKRRRYTGWGRLSRKLINGIRDKQSGKTILDFLKSDGFANRNFMQLIHDDSLTFKEDIQKAQVSGQGDSLHEHIANLAGSPAIKKGILQTVKVVDELVKVMGRHKPENIVIEMARENQTTQKGQKNSRERMKRIEEGIKELGSQILKEHPVENTQLQNEKLYLYYLQNGRDMYVDQELDINRLSDYDVDHIVPQSFLKDDSIDNKVLTRSDKARGKSDNVPSEEVVKKMKNYWRQLLNAKLITQRKFDNLTKAERGGLSELDKAGFIKRQLVETRQITKHVAQILDSRMNTKYDENDKLIREVKVITLKSKLVSDFRKDFQFYKVREINNYHHAHDAYLNAVVGTALIKKYPKLESEFVYGDYKVYDVRKMIAKSEQEIGKATAKYFFYSNIMNFFKTEITLANGEIRKRPLIETNGETGEIVWDKGRDFATVRKVLSMPQVNIVKKTEVQTGGFSKESILPKRNSDKLIARKKDWDPKKYGGFDSPTVAYSVLVVAKVEKGKSKKLKSVKELLGITIMERSSFEKNPIDFLEAKGYKEVKKDLIIKLPKYSLFELENGRKRMLASAGELQKGNELALPSKYVNFLYLASHYEKLKGSPEDNEQKQLFVEQHKHYLDEIIEQISEFSKRVILADANLDKVLSAYNKHRDKPIREQAENIIHLFTLTNLGAPAAFKYFDTTIDRKRYTSTKEVLDATLIHQSITGLYETRIDLSQLGGDGGGGGGSGGGGSGGTAPLEEEYRLFLEAPIQNVTLLEQWKREIPKVWAEINPPGLASTQAPIHVQLLSTALPVRVRQYPITLEAKRSLRETIRKFRAAGILRPVHSPWNTPLLPVRKSGTSEYRMVQDLREVNKRVETIHPTVPNPYTLLSLLPPDRIWYSVLDLKDAFFCIPLAPESQLIFAFEWADAEEGESGQLTWTRLPQGFKNSPTLFNEALNRDLQGFRLDHPSVSLLQYVDDLLIAADTQAACLSATRDLLMTLAELGYRVSGKKAQLCQEEVTYLGFKIHKGSRSLSNSRTQAILQIPVPKTKRQVREFLGKIGYCRLFIPGFAELAQPLYAATRPGNDPLVWGEKEEEAFQSLKLALTQPPALALPSLDKPFQLFVEETSGAAKGVLTQALGPWKRPVAYLSKRLDPVAAGWPRCLRAIAAAALLTREASKLTFGQDIEITSSHNLESLLRSPPDKWLTNARITQYQVLLLDPPRVRFKQTAALNPATLLPETDDTLPIHHCLDTLDSLTSTRPDLTDQPLAQAEATLFTDGSSYIRDGKRYAGAAVVTLDSVIWAEPLPIGTSAQKAELIALTKALEWSKDKSVNIYTDSRYAFATLHVHGMIYRERGWLTAGGKAIKNAPEILALLTAVWLPKRVAVMHCKGHQKDDAPTSTGNRRADEVAREVAIRPLSTQATISAGKRTADGSEFEKRTADGSEFESPKKKAKVE

SEQ ID NO: 1424 - protein, 2098 aa, synthetic construct
MPAAKRVKLDGGDKKYSIGLDIGTNSVGWAVITDEYKVPSKKFKVLGNTDRHSIKKNLIGALLFDSGETAEATRLKRTARRRYTRRKNRICYLQEIFSNEMAKVDDSFFHRLEESFLVEEDKKHERHPIFGNIVDEVAYHEKYPTIYHLRKKLVDSTDKADLRLIYLALAHMIKFRGHFLIEGDLNPDNSDVDKLFIQLVQTYNQLFEENPINASGVDAKAILSARLSKSRRLENLIAQLPGEKKNGLFGNLIALSLGLTPNFKSNFDLAEDAKLQLSKDTYDDDLDNLLAQIGDQYADLFLAAKNLSDAILLSDILRVNTEITKAPLSASMIKRYDEHHQDLTLLKALVRQQLPEKYKEIFFDQSKNGYAGYIDGGASQEEFYKFIKPILEKMDGTEELLVKLNREDLLRKQRTFDNGSIPHQIHLGELHAILRRQEDFYPFLKDNREKIEKILTFRIPYYVGPLARGNSRFAWMTRKSEETITPWNFEEVVDKGASAQSFIERMTNFDKNLPNEKVLPKHSLLYEYFTVYNELTKVKYVTEGMRKPAFLSGEQKKAIVDLLFKTNRKVTVKQLKEDYFKKIECFDSVEISGVEDRFNASLGTYHDLLKIIKDKDFLDNEENEDILEDIVLTLTLFEDREMIEERLKTYAHLFDDKVMKQLKRRRYTGWGRLSRKLINGIRDKQSGKTILDFLKSDGFANRNFMQLIHDDSLTFKEDIQKAQVSGQGDSLHEHIANLAGSPAIKKGILQTVKVVDELVKVMGRHKPENIVIEMARENQTTQKGQKNSRERMKRIEEGIKELGSQILKEHPVENTQLQNEKLYLYYLQNGRDMYVDQELDINRLSDYDVDHIVPQSFLKDDSIDNKVLTRSDKARGKSDNVPSEEVVKKMKNYWRQLLNAKLITQRKFDNLTKAERGGLSELDKAGFIKRQLVETRQITKHVAQILDSRMNTKYDENDKLIREVKVITLKSKLVSDFRKDFQFYKVREINNYHHAHDAYLNAVVGTALIKKYPKLESEFVYGDYKVYDVRKMIAKSEQEIGKATAKYFFYSNIMNFFKTEITLANGEIRKRPLIETNGETGEIVWDKGRDFATVRKVLSMPQVNIVKKTEVQTGGFSKESILPKRNSDKLIARKKDWDPKKYGGFDSPTVAYSVLVVAKVEKGKSKKLKSVKELLGITIMERSSFEKNPIDFLEAKGYKEVKKDLIIKLPKYSLFELENGRKRMLASAGELQKGNELALPSKYVNFLYLASHYEKLKGSPEDNEQKQLFVEQHKHYLDEIIEQISEFSKRVILADANLDKVLSAYNKHRDKPIREQAENIIHLFTLTNLGAPAAFKYFDTTIDRKRYTSTKEVLDATLIHQSITGLYETRIDLSQLGGDGGGSSGGGEAAAKGGTAPLEEEYRLFLEAPIQNVTLLEQWKREIPKVWAEINPPGLASTQAPIHVQLLSTALPVRVRQYPITLEAKRSLRETIRKFRAAGILRPVHSPWNTPLLPVRKSGTSEYRMVQDLREVNKRVETIHPTVPNPYTLLSLLPPDRIWYSVLDLKDAFFCIPLAPESQLIFAFEWADAEEGESGQLTWTRLPQGFKNSPTLFNEALNRDLQGFRLDHPSVSLLQYVDDLLIAADTQAACLSATRDLLMTLAELGYRVSGKKAQLCQEEVTYLGFKIHKGSRSLSNSRTQAILQIPVPKTKRQVREFLGKIGYCRLFIPGFAELAQPLYAATRPGNDPLVWGEKEEEAFQSLKLALTQPPALALPSLDKPFQLFVEETSGAAKGVLTQALGPWKRPVAYLSKRLDPVAAGWPRCLRAIAAAALLTREASKLTFGQDIEITSSHNLESLLRSPPDKWLTNARITQYQVLLLDPPRVRFKQTAALNPATLLPETDDTLPIHHCLDTLDSLTSTRPDLTDQPLAQAEATLFTDGSSYIRDGKRYAGAAVVTLDSVIWAEPLPIGTSAQKAELIALTKALEWSKDKSVNIYTDSRYAFATLHVHGMIYRERGWLTAGGKAIKNAPEILALLTAVWLPKRVAVMHCKGHQKDDAPTSTGNRRADEVAREVAIRPLSTQATISAGKRTADGSEFEKRTADGSEFESPKKKAKVE

SEQ ID NO: 1425-1440 - skipped (16 entries)

SEQ ID NO: 1441 - protein, 2098 aa, synthetic construct
MPAAKRVKLDGGDKKYSIGLDIGTNSVGWAVITDEYKVPSKKFKVLGNTDRHSIKKNLIGALLFDSGETAEATRLKRTARRRYTRRKNRICYLQEIFSNEMAKVDDSFFHRLEESFLVEEDKKHERHPIFGNIVDEVAYHEKYPTIYHLRKKLVDSTDKADLRLIYLALAHMIKFRGHFLIEGDLNPDNSDVDKLFIQLVQTYNQLFEENPINASGVDAKAILSARLSKSRRLENLIAQLPGEKKNGLFGNLIALSLGLTPNFKSNFDLAEDAKLQLSKDTYDDDLDNLLAQIGDQYADLFLAAKNLSDAILLSDILRVNTEITKAPLSASMIKRYDEHHQDLTLLKALVRQQLPEKYKEIFFDQSKNGYAGYIDGGASQEEFYKFIKPILEKMDGTEELLVKLNREDLLRKQRTFDNGSIPHQIHLGELHAILRRQEDFYPFLKDNREKIEKILTFRIPYYVGPLARGNSRFAWMTRKSEETITPWNFEEVVDKGASAQSFIERMTNFDKNLPNEKVLPKHSLLYEYFTVYNELTKVKYVTEGMRKPAFLSGEQKKAIVDLLFKTNRKVTVKQLKEDYFKKIECFDSVEISGVEDRFNASLGTYHDLLKIIKDKDFLDNEENEDILEDIVLTLTLFEDREMIEERLKTYAHLFDDKVMKQLKRRRYTGWGRLSRKLINGIRDKQSGKTILDFLKSDGFANRNFMQLIHDDSLTFKEDIQKAQVSGQGDSLHEHIANLAGSPAIKKGILQTVKVVDELVKVMGRHKPENIVIEMARENQTTQKGQKNSRERMKRIEEGIKELGSQILKEHPVENTQLQNEKLYLYYLQNGRDMYVDQELDINRLSDYDVDHIVPQSFLKDDSIDNKVLTRSDKARGKSDNVPSEEVVKKMKNYWRQLLNAKLITQRKFDNLTKAERGGLSELDKAGFIKRQLVETRQITKHVAQILDSRMNTKYDENDKLIREVKVITLKSKLVSDFRKDFQFYKVREINNYHHAHDAYLNAVVGTALIKKYPKLESEFVYGDYKVYDVRKMIAKSEQEIGKATAKYFFYSNIMNFFKTEITLANGEIRKRPLIETNGETGEIVWDKGRDFATVRKVLSMPQVNIVKKTEVQTGGFSKESILPKRNSDKLIARKKDWDPKKYGGFDSPTVAYSVLVVAKVEKGKSKKLKSVKELLGITIMERSSFEKNPIDFLEAKGYKEVKKDLIIKLPKYSLFELENGRKRMLASAGELQKGNELALPSKYVNFLYLASHYEKLKGSPEDNEQKQLFVEQHKHYLDEIIEQISEFSKRVILADANLDKVLSAYNKHRDKPIREQAENIIHLFTLTNLGAPAAFKYFDTTIDRKRYTSTKEVLDATLIHQSITGLYETRIDLSQLGGDGGEAAAKGGSGGGGGTAPLEEEYRLFLEAPIQNVTLLEQWKREIPKVWAEINPPGLASTQAPIHVQLLSTALPVRVRQYPITLEAKRSLRETIRKFRAAGILRPVHSPWNTPLLPVRKSGTSEYRMVQDLREVNKRVETIHPTVPNPYTLLSLLPPDRIWYSVLDLKDAFFCIPLAPESQLIFAFEWADAEEGESGQLTWTRLPQGFKNSPTLFNEALNRDLQGFRLDHPSVSLLQYVDDLLIAADTQAACLSATRDLLMTLAELGYRVSGKKAQLCQEEVTYLGFKIHKGSRSLSNSRTQAILQIPVPKTKRQVREFLGKIGYCRLFIPGFAELAQPLYAATRPGNDPLVWGEKEEEAFQSLKLALTQPPALALPSLDKPFQLFVEETSGAAKGVLTQALGPWKRPVAYLSKRLDPVAAGWPRCLRAIAAAALLTREASKLTFGQDIEITSSHNLESLLRSPPDKWLTNARITQYQVLLLDPPRVRFKQTAALNPATLLPETDDTLPIHHCLDTLDSLTSTRPDLTDQPLAQAEATLFTDGSSYIRDGKRYAGAAVVTLDSVIWAEPLPIGTSAQKAELIALTKALEWSKDKSVNIYTDSRYAFATLHVHGMIYRERGWLTAGGKAIKNAPEILALLTAVWLPKRVAVMHCKGHQKDDAPTSTGNRRADEVAREVAIRPLSTQATISAGKRTADGSEFEKRTADGSEFESPKKKAKVE

SEQ ID NO: 1442-1539 - skipped (98 entries)

SEQ ID NO: 1540 - protein, 2102 aa, synthetic construct
MPAAKRVKLDGGDKKYSIGLDIGTNSVGWAVITDEYKVPSKKFKVLGNTDRHSIKKNLIGALLFDSGETAEATRLKRTARRRYTRRKNRICYLQEIFSNEMAKVDDSFFHRLEESFLVEEDKKHERHPIFGNIVDEVAYHEKYPTIYHLRKKLVDSTDKADLRLIYLALAHMIKFRGHFLIEGDLNPDNSDVDKLFIQLVQTYNQLFEENPINASGVDAKAILSARLSKSRRLENLIAQLPGEKKNGLFGNLIALSLGLTPNFKSNFDLAEDAKLQLSKDTYDDDLDNLLAQIGDQYADLFLAAKNLSDAILLSDILRVNTEITKAPLSASMIKRYDEHHQDLTLLKALVRQQLPEKYKEIFFDQSKNGYAGYIDGGASQEEFYKFIKPILEKMDGTEELLVKLNREDLLRKQRTFDNGSIPHQIHLGELHAILRRQEDFYPFLKDNREKIEKILTFRIPYYVGPLARGNSRFAWMTRKSEETITPWNFEEVVDKGASAQSFIERMTNFDKNLPNEKVLPKHSLLYEYFTVYNELTKVKYVTEGMRKPAFLSGEQKKAIVDLLFKTNRKVTVKQLKEDYFKKIECFDSVEISGVEDRFNASLGTYHDLLKIIKDKDFLDNEENEDILEDIVLTLTLFEDREMIEERLKTYAHLFDDKVMKQLKRRRYTGWGRLSRKLINGIRDKQSGKTILDFLKSDGFANRNFMQLIHDDSLTFKEDIQKAQVSGQGDSLHEHIANLAGSPAIKKGILQTVKVVDELVKVMGRHKPENIVIEMARENQTTQKGQKNSRERMKRIEEGIKELGSQILKEHPVENTQLQNEKLYLYYLQNGRDMYVDQELDINRLSDYDVDHIVPQSFLKDDSIDNKVLTRSDKARGKSDNVPSEEVVKKMKNYWRQLLNAKLITQRKFDNLTKAERGGLSELDKAGFIKRQLVETRQITKHVAQILDSRMNTKYDENDKLIREVKVITLKSKLVSDFRKDFQFYKVREINNYHHAHDAYLNAVVGTALIKKYPKLESEFVYGDYKVYDVRKMIAKSEQEIGKATAKYFFYSNIMNFFKTEITLANGEIRKRPLIETNGETGEIVWDKGRDFATVRKVLSMPQVNIVKKTEVQTGGFSKESILPKRNSDKLIARKKDWDPKKYGGFDSPTVAYSVLVVAKVEKGKSKKLKSVKELLGITIMERSSFEKNPIDFLEAKGYKEVKKDLIIKLPKYSLFELENGRKRMLASAGELQKGNELALPSKYVNFLYLASHYEKLKGSPEDNEQKQLFVEQHKHYLDEIIEQISEFSKRVILADANLDKVLSAYNKHRDKPIREQAENIIHLFTLTNLGAPAAFKYFDTTIDRKRYTSTKEVLDATLIHQSITGLYETRIDLSQLGGDGGGGGGSSEAAAKGGTVSLQDEHRLFDIPVTTSLPDVWLQDFPQAWAETGGLGRAKCQAPIIIDLKPTAVPVSIKQYPMSLEAHMGIRQHIIKFLELGVLRPCRSPWNTPLLPVKKPGTQDYRPVQDLREINKRTVDIHPTVPNPYNLLSTLKPDYSWYTVLDLKDAFFCLPLAPQSQELFAFEWKDPERGISGQLTWTRLPQGFKNSPTLFNEALHRDLTDFRTQHPEVTLLQYVDDLLLAAPTKKACTQGTRHLLQELGEKGYRASAKKAQICQTKVTYLGYILSEGKRWLTPGRIETVARIPPPRNPREVREFLGTAGFCRLWIPGFAELAAPLYALTKPSTPFTWQTEHQLAFEALKKALLSAPALGLPDTSKPFTLFLDERQGIAKGVLTQKLGPWKRPVAYLSKKLDPVAAGWPPCLRIMAATAMLVKDSAKLTLGQPLTVITPHTLEAIVRQPPDRWITNARLTHYQALLLDTDRVQFGPPVTLNPATLLPVPENQPSPHDCRQVLAETHGTREDLKDQELPDADHTWYTDGSSYLDSGTRRAGAAVVDGHNTIWAQSLPPGTSAQKAELIALTKALELSKGKKANIYTDSRYAFATAHTHGSIYERRGWLTSEGKEIKNKAEIIALLKALFLPQEVAIIHCPGHQKGQDPVAVGNRQADRVARQAAMAEVLTLATEPDNTSHITAGKRTADGSEFEKRTADGSEFESPKKKAKVE

SEQ ID NO: 1541-1542 - skipped (2 entries)

SEQ ID NO: 1543 - protein, 2116 aa, synthetic construct
MPAAKRVKLDGGDKKYSIGLDIGTNSVGWAVITDEYKVPSKKFKVLGNTDRHSIKKNLIGALLFDSGETAEATRLKRTARRRYTRRKNRICYLQEIFSNEMAKVDDSFFHRLEESFLVEEDKKHERHPIFGNIVDEVAYHEKYPTIYHLRKKLVDSTDKADLRLIYLALAHMIKFRGHFLIEGDLNPDNSDVDKLFIQLVQTYNQLFEENPINASGVDAKAILSARLSKSRRLENLIAQLPGEKKNGLFGNLIALSLGLTPNFKSNFDLAEDAKLQLSKDTYDDDLDNLLAQIGDQYADLFLAAKNLSDAILLSDILRVNTEITKAPLSASMIKRYDEHHQDLTLLKALVRQQLPEKYKEIFFDQSKNGYAGYIDGGASQEEFYKFIKPILEKMDGTEELLVKLNREDLLRKQRTFDNGSIPHQIHLGELHAILRRQEDFYPFLKDNREKIEKILTFRIPYYVGPLARGNSRFAWMTRKSEETITPWNFEEVVDKGASAQSFIERMTNFDKNLPNEKVLPKHSLLYEYFTVYNELTKVKYVTEGMRKPAFLSGEQKKAIVDLLFKTNRKVTVKQLKEDYFKKIECFDSVEISGVEDRFNASLGTYHDLLKIIKDKDFLDNEENEDILEDIVLTLTLFEDREMIEERLKTYAHLFDDKVMKQLKRRRYTGWGRLSRKLINGIRDKQSGKTILDFLKSDGFANRNFMQLIHDDSLTFKEDIQKAQVSGQGDSLHEHIANLAGSPAIKKGILQTVKVVDELVKVMGRHKPENIVIEMARENQTTQKGQKNSRERMKRIEEGIKELGSQILKEHPVENTQLQNEKLYLYYLQNGRDMYVDQELDINRLSDYDVDHIVPQSFLKDDSIDNKVLTRSDKARGKSDNVPSEEVVKKMKNYWRQLLNAKLITQRKFDNLTKAERGGLSELDKAGFIKRQLVETRQITKHVAQILDSRMNTKYDENDKLIREVKVITLKSKLVSDFRKDFQFYKVREINNYHHAHDAYLNAVVGTALIKKYPKLESEFVYGDYKVYDVRKMIAKSEQEIGKATAKYFFYSNIMNFFKTEITLANGEIRKRPLIETNGETGEIVWDKGRDFATVRKVLSMPQVNIVKKTEVQTGGFSKESILPKRNSDKLIARKKDWDPKKYGGFDSPTVAYSVLVVAKVEKGKSKKLKSVKELLGITIMERSSFEKNPIDFLEAKGYKEVKKDLIIKLPKYSLFELENGRKRMLASAGELQKGNELALPSKYVNFLYLASHYEKLKGSPEDNEQKQLFVEQHKHYLDEIIEQISEFSKRVILADANLDKVLSAYNKHRDKPIREQAENIIHLFTLTNLGAPAAFKYFDTTIDRKRYTSTKEVLDATLIHQSITGLYETRIDLSQLGGDGGGGGGSGGGGSGGGGSGGGGSGGGGSGGTVSLQDEHRLFDIPVTTSLPDVWLQDFPQAWAETGGLGRAKCQAPIIIDLKPTAVPVSIKQYPMSLEAHMGIRQHIIKFLELGVLRPCRSPWNTPLLPVKKPGTQDYRPVQDLREINKRTVDIHPTVPNPYNLLSTLKPDYSWYTVLDLKDAFFCLPLAPQSQELFAFEWKDPERGISGQLTWTRLPQGFKNSPTLFNEALHRDLTDFRTQHPEVTLLQYVDDLLLAAPTKKACTQGTRHLLQELGEKGYRASAKKAQICQTKVTYLGYILSEGKRWLTPGRIETVARIPPPRNPREVREFLGTAGFCRLWIPGFAELAAPLYALTKPSTPFTWQTEHQLAFEALKKALLSAPALGLPDTSKPFTLFLDERQGIAKGVLTQKLGPWKRPVAYLSKKLDPVAAGWPPCLRIMAATAMLVKDSAKLTLGQPLTVITPHTLEAIVRQPPDRWITNARLTHYQALLLDTDRVQFGPPVTLNPATLLPVPENQPSPHDCRQVLAETHGTREDLKDQELPDADHTWYTDGSSYLDSGTRRAGAAVVDGHNTIWAQSLPPGTSAQKAELIALTKALELSKGKKANIYTDSRYAFATAHTHGSIYERRGWLTSEGKEIKNKAEIIALLKALFLPQEVAIIHCPGHQKGQDPVAVGNRQADRVARQAAMAEVLTLATEPDNTSHITAGKRTADGSEFEKRTADGSEFESPKKKAKVE

SEQ ID NO: 1544-1549 - skipped (6 entries)

SEQ ID NO: 1550 - protein, 2100 aa, synthetic construct
MPAAKRVKLDGGDKKYSIGLDIGTNSVGWAVITDEYKVPSKKFKVLGNTDRHSIKKNLIGALLFDSGETAEATRLKRTARRRYTRRKNRICYLQEIFSNEMAKVDDSFFHRLEESFLVEEDKKHERHPIFGNIVDEVAYHEKYPTIYHLRKKLVDSTDKADLRLIYLALAHMIKFRGHFLIEGDLNPDNSDVDKLFIQLVQTYNQLFEENPINASGVDAKAILSARLSKSRRLENLIAQLPGEKKNGLFGNLIALSLGLTPNFKSNFDLAEDAKLQLSKDTYDDDLDNLLAQIGDQYADLFLAAKNLSDAILLSDILRVNTEITKAPLSASMIKRYDEHHQDLTLLKALVRQQLPEKYKEIFFDQSKNGYAGYIDGGASQEEFYKFIKPILEKMDGTEELLVKLNREDLLRKQRTFDNGSIPHQIHLGELHAILRRQEDFYPFLKDNREKIEKILTFRIPYYVGPLARGNSRFAWMTRKSEETITPWNFEEVVDKGASAQSFIERMTNFDKNLPNEKVLPKHSLLYEYFTVYNELTKVKYVTEGMRKPAFLSGEQKKAIVDLLFKTNRKVTVKQLKEDYFKKIECFDSVEISGVEDRFNASLGTYHDLLKIIKDKDFLDNEENEDILEDIVLTLTLFEDREMIEERLKTYAHLFDDKVMKQLKRRRYTGWGRLSRKLINGIRDKQSGKTILDFLKSDGFANRNFMQLIHDDSLTFKEDIQKAQVSGQGDSLHEHIANLAGSPAIKKGILQTVKVVDELVKVMGRHKPENIVIEMARENQTTQKGQKNSRERMKRIEEGIKELGSQILKEHPVENTQLQNEKLYLYYLQNGRDMYVDQELDINRLSDYDVDHIVPQSFLKDDSIDNKVLTRSDKARGKSDNVPSEEVVKKMKNYWRQLLNAKLITQRKFDNLTKAERGGLSELDKAGFIKRQLVETRQITKHVAQILDSRMNTKYDENDKLIREVKVITLKSKLVSDFRKDFQFYKVREINNYHHAHDAYLNAVVGTALIKKYPKLESEFVYGDYKVYDVRKMIAKSEQEIGKATAKYFFYSNIMNFFKTEITLANGEIRKRPLIETNGETGEIVWDKGRDFATVRKVLSMPQVNIVKKTEVQTGGFSKESILPKRNSDKLIARKKDWDPKKYGGFDSPTVAYSVLVVAKVEKGKSKKLKSVKELLGITIMERSSFEKNPIDFLEAKGYKEVKKDLIIKLPKYSLFELENGRKRMLASAGELQKGNELALPSKYVNFLYLASHYEKLKGSPEDNEQKQLFVEQHKHYLDEIIEQISEFSKRVILADANLDKVLSAYNKHRDKPIREQAENIIHLFTLTNLGAPAAFKYFDTTIDRKRYTSTKEVLDATLIHQSITGLYETRIDLSQLGGDGGGGSGSSGGGGGTVSLQDEHRLFDIPVTTSLPDVWLQDFPQAWAETGGLGRAKCQAPIIIDLKPTAVPVSIKQYPMSLEAHMGIRQHIIKFLELGVLRPCRSPWNTPLLPVKKPGTQDYRPVQDLREINKRTVDIHPTVPNPYNLLSTLKPDYSWYTVLDLKDAFFCLPLAPQSQELFAFEWKDPERGISGQLTWTRLPQGFKNSPTLFNEALHRDLTDFRTQHPEVTLLQYVDDLLLAAPTKKACTQGTRHLLQELGEKGYRASAKKAQICQTKVTYLGYILSEGKRWLTPGRIETVARIPPPRNPREVREFLGTAGFCRLWIPGFAELAAPLYALTKPSTPFTWQTEHQLAFEALKKALLSAPALGLPDTSKPFTLFLDERQGIAKGVLTQKLGPWKRPVAYLSKKLDPVAAGWPPCLRIMAATAMLVKDSAKLTLGQPLTVITPHTLEAIVRQPPDRWITNARLTHYQALLLDTDRVQFGPPVTLNPATLLPVPENQPSPHDCRQVLAETHGTREDLKDQELPDADHTWYTDGSSYLDSGTRRAGAAVVDGHNTIWAQSLPPGTSAQKAELIALTKALELSKGKKANIYTDSRYAFATAHTHGSIYERRGWLTSEGKEIKNKAEIIALLKALFLPQEVAIIHCPGHQKGQDPVAVGNRQADRVARQAAMAEVLTLATEPDNTSHITAGKRTADGSEFEKRTADGSEFESPKKKAKVE

SEQ ID NO: 1551-1552 - skipped (2 entries)

SEQ ID NO: 1553 - protein, 2106 aa, synthetic construct
MPAAKRVKLDGGDKKYSIGLDIGTNSVGWAVITDEYKVPSKKFKVLGNTDRHSIKKNLIGALLFDSGETAEATRLKRTARRRYTRRKNRICYLQEIFSNEMAKVDDSFFHRLEESFLVEEDKKHERHPIFGNIVDEVAYHEKYPTIYHLRKKLVDSTDKADLRLIYLALAHMIKFRGHFLIEGDLNPDNSDVDKLFIQLVQTYNQLFEENPINASGVDAKAILSARLSKSRRLENLIAQLPGEKKNGLFGNLIALSLGLTPNFKSNFDLAEDAKLQLSKDTYDDDLDNLLAQIGDQYADLFLAAKNLSDAILLSDILRVNTEITKAPLSASMIKRYDEHHQDLTLLKALVRQQLPEKYKEIFFDQSKNGYAGYIDGGASQEEFYKFIKPILEKMDGTEELLVKLNREDLLRKQRTFDNGSIPHQIHLGELHAILRRQEDFYPFLKDNREKIEKILTFRIPYYVGPLARGNSRFAWMTRKSEETITPWNFEEVVDKGASAQSFIERMTNFDKNLPNEKVLPKHSLLYEYFTVYNELTKVKYVTEGMRKPAFLSGEQKKAIVDLLFKTNRKVTVKQLKEDYFKKIECFDSVEISGVEDRFNASLGTYHDLLKIIKDKDFLDNEENEDILEDIVLTLTLFEDREMIEERLKTYAHLFDDKVMKQLKRRRYTGWGRLSRKLINGIRDKQSGKTILDFLKSDGFANRNFMQLIHDDSLTFKEDIQKAQVSGQGDSLHEHIANLAGSPAIKKGILQTVKVVDELVKVMGRHKPENIVIEMARENQTTQKGQKNSRERMKRIEEGIKELGSQILKEHPVENTQLQNEKLYLYYLQNGRDMYVDQELDINRLSDYDVDHIVPQSFLKDDSIDNKVLTRSDKARGKSDNVPSEEVVKKMKNYWRQLLNAKLITQRKFDNLTKAERGGLSELDKAGFIKRQLVETRQITKHVAQILDSRMNTKYDENDKLIREVKVITLKSKLVSDFRKDFQFYKVREINNYHHAHDAYLNAVVGTALIKKYPKLESEFVYGDYKVYDVRKMIAKSEQEIGKATAKYFFYSNIMNFFKTEITLANGEIRKRPLIETNGETGEIVWDKGRDFATVRKVLSMPQVNIVKKTEVQTGGFSKESILPKRNSDKLIARKKDWDPKKYGGFDSPTVAYSVLVVAKVEKGKSKKLKSVKELLGITIMERSSFEKNPIDFLEAKGYKEVKKDLIIKLPKYSLFELENGRKRMLASAGELQKGNELALPSKYVNFLYLASHYEKLKGSPEDNEQKQLFVEQHKHYLDEIIEQISEFSKRVILADANLDKVLSAYNKHRDKPIREQAENIIHLFTLTNLGAPAAFKYFDTTIDRKRYTSTKEVLDATLIHQSITGLYETRIDLSQLGGDGGGSSGSSGSSGSSGSSGGTVSLQDEHRLFDIPVTTSLPDVWLQDFPQAWAETGGLGRAKCQAPIIIDLKPTAVPVSIKQYPMSLEAHMGIRQHIIKFLELGVLRPCRSPWNTPLLPVKKPGTQDYRPVQDLREINKRTVDIHPTVPNPYNLLSTLKPDYSWYTVLDLKDAFFCLPLAPQSQELFAFEWKDPERGISGQLTWTRLPQGFKNSPTLFNEALHRDLTDFRTQHPEVTLLQYVDDLLLAAPTKKACTQGTRHLLQELGEKGYRASAKKAQICQTKVTYLGYILSEGKRWLTPGRIETVARIPPPRNPREVREFLGTAGFCRLWIPGFAELAAPLYALTKPSTPFTWQTEHQLAFEALKKALLSAPALGLPDTSKPFTLFLDERQGIAKGVLTQKLGPWKRPVAYLSKKLDPVAAGWPPCLRIMAATAMLVKDSAKLTLGQPLTVITPHTLEAIVRQPPDRWITNARLTHYQALLLDTDRVQFGPPVTLNPATLLPVPENQPSPHDCRQVLAETHGTREDLKDQELPDADHTWYTDGSSYLDSGTRRAGAAVVDGHNTIWAQSLPPGTSAQKAELIALTKALELSKGKKANIYTDSRYAFATAHTHGSIYERRGWLTSEGKEIKNKAEIIALLKALFLPQEVAIIHCPGHQKGQDPVAVGNRQADRVARQAAMAEVLTLATEPDNTSHITAGKRTADGSEFEKRTADGSEFESPKKKAKVE

SEQ ID NO: 1554-1615 - skipped (62 entries)

SEQ ID NO: 1616 - protein, 2123 aa, synthetic construct
MPAAKRVKLDGGDKKYSIGLDIGTNSVGWAVITDEYKVPSKKFKVLGNTDRHSIKKNLIGALLFDSGETAEATRLKRTARRRYTRRKNRICYLQEIFSNEMAKVDDSFFHRLEESFLVEEDKKHERHPIFGNIVDEVAYHEKYPTIYHLRKKLVDSTDKADLRLIYLALAHMIKFRGHFLIEGDLNPDNSDVDKLFIQLVQTYNQLFEENPINASGVDAKAILSARLSKSRRLENLIAQLPGEKKNGLFGNLIALSLGLTPNFKSNFDLAEDAKLQLSKDTYDDDLDNLLAQIGDQYADLFLAAKNLSDAILLSDILRVNTEITKAPLSASMIKRYDEHHQDLTLLKALVRQQLPEKYKEIFFDQSKNGYAGYIDGGASQEEFYKFIKPILEKMDGTEELLVKLNREDLLRKQRTFDNGSIPHQIHLGELHAILRRQEDFYPFLKDNREKIEKILTFRIPYYVGPLARGNSRFAWMTRKSEETITPWNFEEVVDKGASAQSFIERMTNFDKNLPNEKVLPKHSLLYEYFTVYNELTKVKYVTEGMRKPAFLSGEQKKAIVDLLFKTNRKVTVKQLKEDYFKKIECFDSVEISGVEDRFNASLGTYHDLLKIIKDKDFLDNEENEDILEDIVLTLTLFEDREMIEERLKTYAHLFDDKVMKQLKRRRYTGWGRLSRKLINGIRDKQSGKTILDFLKSDGFANRNFMQLIHDDSLTFKEDIQKAQVSGQGDSLHEHIANLAGSPAIKKGILQTVKVVDELVKVMGRHKPENIVIEMARENQTTQKGQKNSRERMKRIEEGIKELGSQILKEHPVENTQLQNEKLYLYYLQNGRDMYVDQELDINRLSDYDVDHIVPQSFLKDDSIDNKVLTRSDKARGKSDNVPSEEVVKKMKNYWRQLLNAKLITQRKFDNLTKAERGGLSELDKAGFIKRQLVETRQITKHVAQILDSRMNTKYDENDKLIREVKVITLKSKLVSDFRKDFQFYKVREINNYHHAHDAYLNAVVGTALIKKYPKLESEFVYGDYKVYDVRKMIAKSEQEIGKATAKYFFYSNIMNFFKTEITLANGEIRKRPLIETNGETGEIVWDKGRDFATVRKVLSMPQVNIVKKTEVQTGGFSKESILPKRNSDKLIARKKDWDPKKYGGFDSPTVAYSVLVVAKVEKGKSKKLKSVKELLGITIMERSSFEKNPIDFLEAKGYKEVKKDLIIKLPKYSLFELENGRKRMLASAGELQKGNELALPSKYVNFLYLASHYEKLKGSPEDNEQKQLFVEQHKHYLDEIIEQISEFSKRVILADANLDKVLSAYNKHRDKPIREQAENIIHLFTLTNLGAPAAFKYFDTTIDRKRYTSTKEVLDATLIHQSITGLYETRIDLSQLGGDGGPAPAPAPGGLLGRDLLTKLKAQIQFSTEGPQVTWEDRPAMCLVLNLEEEYRLHEKPVPPSIDPSWLQLFPMVWAEKAGMGLANQVPPVVVELKSDASPVAVRQYPMSKEAREGIRPHIQRFLDLGILVPCQSPWNTPLLPVKKPGTNDYRPVQDLREVNKRVQDIHPTVPNPYNLLSSLPPSHTWYSVLDLKDAFFCLKLHPNSQPLFAFEWRDPEKGNTGQLTWTRLPQGFKNSPTLFNEALHRDLASFRALNPQVVMLQYVDDLLVAAPTYRDCKEGTRRLLQELSKLGYRVSAKKAQLCREEVTYLGYLLKGGKRWLTPARKATVMKIPTPTTPRQVREFLGTAGFCRLWIPGFASLAAPLYPLTRPKVPFTWTEAHQEAFGRIKEALLSAPALALPDLTKPFALYVDEKEGVARGVLTQTLGPWRRPVAYLSKKLDPVASGWPTCLKAIAAVALLLKDADKLTLGQNVLVIAPHNLESIVRQPPDRWMTNARMTHYQSLLLNERVSFAPPAILNPATLLPVESDDTPIHICSEILAEETGTRPDLRDQPLPGVPAWYTDGSSFIMDGRRQAGAAIVDNKRTVWASNLPEGTSAQKAELIALTQALRLAEGKSINIYTDSRYAFATAHVHGAIYKQRGWLTSAGKDIKNKEEILALLEAIHLPKRVAIIHCPGHQRGTDPVATGNRKADEAAKQAAQSTRILTETTKNAGKRTADGSEFEKRTADGSEFESPKKKAKVE

SEQ ID NO: 1617 - skipped

SEQ ID NO: 1618 - protein, 2127 aa, synthetic construct
MPAAKRVKLDGGDKKYSIGLDIGTNSVGWAVITDEYKVPSKKFKVLGNTDRHSIKKNLIGALLFDSGETAEATRLKRTARRRYTRRKNRICYLQEIFSNEMAKVDDSFFHRLEESFLVEEDKKHERHPIFGNIVDEVAYHEKYPTIYHLRKKLVDSTDKADLRLIYLALAHMIKFRGHFLIEGDLNPDNSDVDKLFIQLVQTYNQLFEENPINASGVDAKAILSARLSKSRRLENLIAQLPGEKKNGLFGNLIALSLGLTPNFKSNFDLAEDAKLQLSKDTYDDDLDNLLAQIGDQYADLFLAAKNLSDAILLSDILRVNTEITKAPLSASMIKRYDEHHQDLTLLKALVRQQLPEKYKEIFFDQSKNGYAGYIDGGASQEEFYKFIKPILEKMDGTEELLVKLNREDLLRKQRTFDNGSIPHQIHLGELHAILRRQEDFYPFLKDNREKIEKILTFRIPYYVGPLARGNSRFAWMTRKSEETITPWNFEEVVDKGASAQSFIERMTNFDKNLPNEKVLPKHSLLYEYFTVYNELTKVKYVTEGMRKPAFLSGEQKKAIVDLLFKTNRKVTVKQLKEDYFKKIECFDSVEISGVEDRFNASLGTYHDLLKIIKDKDFLDNEENEDILEDIVLTLTLFEDREMIEERLKTYAHLFDDKVMKQLKRRRYTGWGRLSRKLINGIRDKQSGKTILDFLKSDGFANRNFMQLIHDDSLTFKEDIQKAQVSGQGDSLHEHIANLAGSPAIKKGILQTVKVVDELVKVMGRHKPENIVIEMARENQTTQKGQKNSRERMKRIEEGIKELGSQILKEHPVENTQLQNEKLYLYYLQNGRDMYVDQELDINRLSDYDVDHIVPQSFLKDDSIDNKVLTRSDKARGKSDNVPSEEVVKKMKNYWRQLLNAKLITQRKFDNLTKAERGGLSELDKAGFIKRQLVETRQITKHVAQILDSRMNTKYDENDKLIREVKVITLKSKLVSDFRKDFQFYKVREINNYHHAHDAYLNAVVGTALIKKYPKLESEFVYGDYKVYDVRKMIAKSEQEIGKATAKYFFYSNIMNFFKTEITLANGEIRKRPLIETNGETGEIVWDKGRDFATVRKVLSMPQVNIVKKTEVQTGGFSKESILPKRNSDKLIARKKDWDPKKYGGFDSPTVAYSVLVVAKVEKGKSKKLKSVKELLGITIMERSSFEKNPIDFLEAKGYKEVKKDLIIKLPKYSLFELENGRKRMLASAGELQKGNELALPSKYVNFLYLASHYEKLKGSPEDNEQKQLFVEQHKHYLDEIIEQISEFSKRVILADANLDKVLSAYNKHRDKPIREQAENIIHLFTLTNLGAPAAFKYFDTTIDRKRYTSTKEVLDATLIHQSITGLYETRIDLSQLGGDGGEAAAKPAPGSSGGLLGRDLLTKLKAQIQFSTEGPQVTWEDRPAMCLVLNLEEEYRLHEKPVPPSIDPSWLQLFPMVWAEKAGMGLANQVPPVVVELKSDASPVAVRQYPMSKEAREGIRPHIQRFLDLGILVPCQSPWNTPLLPVKKPGTNDYRPVQDLREVNKRVQDIHPTVPNPYNLLSSLPPSHTWYSVLDLKDAFFCLKLHPNSQPLFAFEWRDPEKGNTGQLTWTRLPQGFKNSPTLFNEALHRDLASFRALNPQVVMLQYVDDLLVAAPTYRDCKEGTRRLLQELSKLGYRVSAKKAQLCREEVTYLGYLLKGGKRWLTPARKATVMKIPTPTTPRQVREFLGTAGFCRLWIPGFASLAAPLYPLTRPKVPFTWTEAHQEAFGRIKEALLSAPALALPDLTKPFALYVDEKEGVARGVLTQTLGPWRRPVAYLSKKLDPVASGWPTCLKAIAAVALLLKDADKLTLGQNVLVIAPHNLESIVRQPPDRWMTNARMTHYQSLLLNERVSFAPPAILNPATLLPVESDDTPIHICSEILAEETGTRPDLRDQPLPGVPAWYTDGSSFIMDGRRQAGAAIVDNKRTVWASNLPEGTSAQKAELIALTQALRLAEGKSINIYTDSRYAFATAHVHGAIYKQRGWLTSAGKDIKNKEEILALLEAIHLPKRVAIIHCPGHQRGTDPVATGNRKADEAAKQAAQSTRILTETTKNAGKRTADGSEFEKRTADGSEFESPKKKAKVE

SEQ ID NO: 1619 - protein, 2127 aa, synthetic construct
MPAAKRVKLDGGDKKYSIGLDIGTNSVGWAVITDEYKVPSKKFKVLGNTDRHSIKKNLIGALLFDSGETAEATRLKRTARRRYTRRKNRICYLQEIFSNEMAKVDDSFFHRLEESFLVEEDKKHERHPIFGNIVDEVAYHEKYPTIYHLRKKLVDSTDKADLRLIYLALAHMIKFRGHFLIEGDLNPDNSDVDKLFIQLVQTYNQLFEENPINASGVDAKAILSARLSKSRRLENLIAQLPGEKKNGLFGNLIALSLGLTPNFKSNFDLAEDAKLQLSKDTYDDDLDNLLAQIGDQYADLFLAAKNLSDAILLSDILRVNTEITKAPLSASMIKRYDEHHQDLTLLKALVRQQLPEKYKEIFFDQSKNGYAGYIDGGASQEEFYKFIKPILEKMDGTEELLVKLNREDLLRKQRTFDNGSIPHQIHLGELHAILRRQEDFYPFLKDNREKIEKILTFRIPYYVGPLARGNSRFAWMTRKSEETITPWNFEEVVDKGASAQSFIERMTNFDKNLPNEKVLPKHSLLYEYFTVYNELTKVKYVTEGMRKPAFLSGEQKKAIVDLLFKTNRKVTVKQLKEDYFKKIECFDSVEISGVEDRFNASLGTYHDLLKIIKDKDFLDNEENEDILEDIVLTLTLFEDREMIEERLKTYAHLFDDKVMKQLKRRRYTGWGRLSRKLINGIRDKQSGKTILDFLKSDGFANRNFMQLIHDDSLTFKEDIQKAQVSGQGDSLHEHIANLAGSPAIKKGILQTVKVVDELVKVMGRHKPENIVIEMARENQTTQKGQKNSRERMKRIEEGIKELGSQILKEHPVENTQLQNEKLYLYYLQNGRDMYVDQELDINRLSDYDVDHIVPQSFLKDDSIDNKVLTRSDKARGKSDNVPSEEVVKKMKNYWRQLLNAKLITQRKFDNLTKAERGGLSELDKAGFIKRQLVETRQITKHVAQILDSRMNTKYDENDKLIREVKVITLKSKLVSDFRKDFQFYKVREINNYHHAHDAYLNAVVGTALIKKYPKLESEFVYGDYKVYDVRKMIAKSEQEIGKATAKYFFYSNIMNFFKTEITLANGEIRKRPLIETNGETGEIVWDKGRDFATVRKVLSMPQVNIVKKTEVQTGGFSKESILPKRNSDKLIARKKDWDPKKYGGFDSPTVAYSVLVVAKVEKGKSKKLKSVKELLGITIMERSSFEKNPIDFLEAKGYKEVKKDLIIKLPKYSLFELENGRKRMLASAGELQKGNELALPSKYVNFLYLASHYEKLKGSPEDNEQKQLFVEQHKHYLDEIIEQISEFSKRVILADANLDKVLSAYNKHRDKPIREQAENIIHLFTLTNLGAPAAFKYFDTTIDRKRYTSTKEVLDATLIHQSITGLYETRIDLSQLGGDGGPAPAPAPAPAPGGLLGRDLLTKLKAQIQFSTEGPQVTWEDRPAMCLVLNLEEEYRLHEKPVPPSIDPSWLQLFPMVWAEKAGMGLANQVPPVVVELKSDASPVAVRQYPMSKEAREGIRPHIQRFLDLGILVPCQSPWNTPLLPVKKPGTNDYRPVQDLREVNKRVQDIHPTVPNPYNLLSSLPPSHTWYSVLDLKDAFFCLKLHPNSQPLFAFEWRDPEKGNTGQLTWTRLPQGFKNSPTLFNEALHRDLASFRALNPQVVMLQYVDDLLVAAPTYRDCKEGTRRLLQELSKLGYRVSAKKAQLCREEVTYLGYLLKGGKRWLTPARKATVMKIPTPTTPRQVREFLGTAGFCRLWIPGFASLAAPLYPLTRPKVPFTWTEAHQEAFGRIKEALLSAPALALPDLTKPFALYVDEKEGVARGVLTQTLGPWRRPVAYLSKKLDPVASGWPTCLKAIAAVALLLKDADKLTLGQNVLVIAPHNLESIVRQPPDRWMTNARMTHYQSLLLNERVSFAPPAILNPATLLPVESDDTPIHICSEILAEETGTRPDLRDQPLPGVPAWYTDGSSFIMDGRRQAGAAIVDNKRTVWASNLPEGTSAQKAELIALTQALRLAEGKSINIYTDSRYAFATAHVHGAIYKQRGWLTSAGKDIKNKEEILALLEAIHLPKRVAIIHCPGHQRGTDPVATGNRKADEAAKQAAQSTRILTETTKNAGKRTADGSEFEKRTADGSEFESPKKKAKVE

SEQ ID NO: 1620-1665 - skipped (46 entries)

SEQ ID NO: 1666 - protein, 2127 aa, synthetic construct
MPAAKRVKLDGGDKKYSIGLDIGTNSVGWAVITDEYKVPSKKFKVLGNTDRHSIKKNLIGALLFDSGETAEATRLKRTARRRYTRRKNRICYLQEIFSNEMAKVDDSFFHRLEESFLVEEDKKHERHPIFGNIVDEVAYHEKYPTIYHLRKKLVDSTDKADLRLIYLALAHMIKFRGHFLIEGDLNPDNSDVDKLFIQLVQTYNQLFEENPINASGVDAKAILSARLSKSRRLENLIAQLPGEKKNGLFGNLIALSLGLTPNFKSNFDLAEDAKLQLSKDTYDDDLDNLLAQIGDQYADLFLAAKNLSDAILLSDILRVNTEITKAPLSASMIKRYDEHHQDLTLLKALVRQQLPEKYKEIFFDQSKNGYAGYIDGGASQEEFYKFIKPILEKMDGTEELLVKLNREDLLRKQRTFDNGSIPHQIHLGELHAILRRQEDFYPFLKDNREKIEKILTFRIPYYVGPLARGNSRFAWMTRKSEETITPWNFEEVVDKGASAQSFIERMTNFDKNLPNEKVLPKHSLLYEYFTVYNELTKVKYVTEGMRKPAFLSGEQKKAIVDLLFKTNRKVTVKQLKEDYFKKIECFDSVEISGVEDRFNASLGTYHDLLKIIKDKDFLDNEENEDILEDIVLTLTLFEDREMIEERLKTYAHLFDDKVMKQLKRRRYTGWGRLSRKLINGIRDKQSGKTILDFLKSDGFANRNFMQLIHDDSLTFKEDIQKAQVSGQGDSLHEHIANLAGSPAIKKGILQTVKVVDELVKVMGRHKPENIVIEMARENQTTQKGQKNSRERMKRIEEGIKELGSQILKEHPVENTQLQNEKLYLYYLQNGRDMYVDQELDINRLSDYDVDHIVPQSFLKDDSIDNKVLTRSDKARGKSDNVPSEEVVKKMKNYWRQLLNAKLITQRKFDNLTKAERGGLSELDKAGFIKRQLVETRQITKHVAQILDSRMNTKYDENDKLIREVKVITLKSKLVSDFRKDFQFYKVREINNYHHAHDAYLNAVVGTALIKKYPKLESEFVYGDYKVYDVRKMIAKSEQEIGKATAKYFFYSNIMNFFKTEITLANGEIRKRPLIETNGETGEIVWDKGRDFATVRKVLSMPQVNIVKKTEVQTGGFSKESILPKRNSDKLIARKKDWDPKKYGGFDSPTVAYSVLVVAKVEKGKSKKLKSVKELLGITIMERSSFEKNPIDFLEAKGYKEVKKDLIIKLPKYSLFELENGRKRMLASAGELQKGNELALPSKYVNFLYLASHYEKLKGSPEDNEQKQLFVEQHKHYLDEIIEQISEFSKRVILADANLDKVLSAYNKHRDKPIREQAENIIHLFTLTNLGAPAAFKYFDTTIDRKRYTSTKEVLDATLIHQSITGLYETRIDLSQLGGDGGGGSPAPEAAAKGGLLGRDLLTKLKAQIQFSTEGPQVTWEDRPAMCLVLNLEEEYRLHEKPVPPSIDPSWLQLFPMVWAEKAGMGLANQVPPVVVELKSDASPVAVRQYPMSKEAREGIRPHIQRFLDLGILVPCQSPWNTPLLPVKKPGTNDYRPVQDLREVNKRVQDIHPTVPNPYNLLSSLPPSHTWYSVLDLKDAFFCLKLHPNSQPLFAFEWRDPEKGNTGQLTWTRLPQGFKNSPTLFNEALHRDLASFRALNPQVVMLQYVDDLLVAAPTYRDCKEGTRRLLQELSKLGYRVSAKKAQLCREEVTYLGYLLKGGKRWLTPARKATVMKIPTPTTPRQVREFLGKAGFCRLFIPGFASLAAPLYPLTRPKVPFTWTEAHQEAFGRIKEALLSAPALALPDLTKPFALYVDEKEGVARGVLTQTLGPWRRPVAYLSKKLDPVASGWPTCLKAIAAVALLLKDADKLTLGQNVLVIAPHNLESIVRQPPDRWMTNARMTHYQSLLLNERVSFAPPAILNPATLLPVESDDTPIHICSEILAEETGTRPDLRDQPLPGVPAWYTDGSSFIMDGRRQAGAAIVDNKRTVWASNLPEGTSAQKAELIALTQALRLAEGKSINIYTDSRYAFATAHVHGAIYKQRGWLTSAGKDIKNKEEILALLEAIHLPKRVAIIHCPGHQRGTDPVATGNRKADEAAKQAAQSTRILTETTKNAGKRTADGSEFEKRTADGSEFESPKKKAKVE

SEQ ID NO: 1667 - skipped

SEQ ID NO: 1668 - protein, 2122 aa, synthetic construct
MPAAKRVKLDGGDKKYSIGLDIGTNSVGWAVITDEYKVPSKKFKVLGNTDRHSIKKNLIGALLFDSGETAEATRLKRTARRRYTRRKNRICYLQEIFSNEMAKVDDSFFHRLEESFLVEEDKKHERHPIFGNIVDEVAYHEKYPTIYHLRKKLVDSTDKADLRLIYLALAHMIKFRGHFLIEGDLNPDNSDVDKLFIQLVQTYNQLFEENPINASGVDAKAILSARLSKSRRLENLIAQLPGEKKNGLFGNLIALSLGLTPNFKSNFDLAEDAKLQLSKDTYDDDLDNLLAQIGDQYADLFLAAKNLSDAILLSDILRVNTEITKAPLSASMIKRYDEHHQDLTLLKALVRQQLPEKYKEIFFDQSKNGYAGYIDGGASQEEFYKFIKPILEKMDGTEELLVKLNREDLLRKQRTFDNGSIPHQIHLGELHAILRRQEDFYPFLKDNREKIEKILTFRIPYYVGPLARGNSRFAWMTRKSEETITPWNFEEVVDKGASAQSFIERMTNFDKNLPNEKVLPKHSLLYEYFTVYNELTKVKYVTEGMRKPAFLSGEQKKAIVDLLFKTNRKVTVKQLKEDYFKKIECFDSVEISGVEDRFNASLGTYHDLLKIIKDKDFLDNEENEDILEDIVLTLTLFEDREMIEERLKTYAHLFDDKVMKQLKRRRYTGWGRLSRKLINGIRDKQSGKTILDFLKSDGFANRNFMQLIHDDSLTFKEDIQKAQVSGQGDSLHEHIANLAGSPAIKKGILQTVKVVDELVKVMGRHKPENIVIEMARENQTTQKGQKNSRERMKRIEEGIKELGSQILKEHPVENTQLQNEKLYLYYLQNGRDMYVDQELDINRLSDYDVDHIVPQSFLKDDSIDNKVLTRSDKARGKSDNVPSEEVVKKMKNYWRQLLNAKLITQRKFDNLTKAERGGLSELDKAGFIKRQLVETRQITKHVAQILDSRMNTKYDENDKLIREVKVITLKSKLVSDFRKDFQFYKVREINNYHHAHDAYLNAVVGTALIKKYPKLESEFVYGDYKVYDVRKMIAKSEQEIGKATAKYFFYSNIMNFFKTEITLANGEIRKRPLIETNGETGEIVWDKGRDFATVRKVLSMPQVNIVKKTEVQTGGFSKESILPKRNSDKLIARKKDWDPKKYGGFDSPTVAYSVLVVAKVEKGKSKKLKSVKELLGITIMERSSFEKNPIDFLEAKGYKEVKKDLIIKLPKYSLFELENGRKRMLASAGELQKGNELALPSKYVNFLYLASHYEKLKGSPEDNEQKQLFVEQHKHYLDEIIEQISEFSKRVILADANLDKVLSAYNKHRDKPIREQAENIIHLFTLTNLGAPAAFKYFDTTIDRKRYTSTKEVLDATLIHQSITGLYETRIDLSQLGGDGGGGSGGGGGLLGRDLLTKLKAQIQFSTEGPQVTWEDRPAMCLVLNLEEEYRLHEKPVPPSIDPSWLQLFPMVWAEKAGMGLANQVPPVVVELKSDASPVAVRQYPMSKEAREGIRPHIQRFLDLGILVPCQSPWNTPLLPVKKPGTNDYRPVQDLREVNKRVQDIHPTVPNPYNLLSSLPPSHTWYSVLDLKDAFFCLKLHPNSQPLFAFEWRDPEKGNTGQLTWTRLPQGFKNSPTLFNEALHRDLASFRALNPQVVMLQYVDDLLVAAPTYRDCKEGTRRLLQELSKLGYRVSAKKAQLCREEVTYLGYLLKGGKRWLTPARKATVMKIPTPTTPRQVREFLGKAGFCRLFIPGFASLAAPLYPLTRPKVPFTWTEAHQEAFGRIKEALLSAPALALPDLTKPFALYVDEKEGVARGVLTQTLGPWRRPVAYLSKKLDPVASGWPTCLKAIAAVALLLKDADKLTLGQNVLVIAPHNLESIVRQPPDRWMTNARMTHYQSLLLNERVSFAPPAILNPATLLPVESDDTPIHICSEILAEETGTRPDLRDQPLPGVPAWYTDGSSFIMDGRRQAGAAIVDNKRTVWASNLPEGTSAQKAELIALTQALRLAEGKSINIYTDSRYAFATAHVHGAIYKQRGWLTSAGKDIKNKEEILALLEAIHLPKRVAIIHCPGHQRGTDPVATGNRKADEAAKQAAQSTRILTETTKNAGKRTADGSEFEKRTADGSEFESPKKKAKVE

SEQ ID NO: 1669-1671 - skipped (3 entries)

SEQ ID NO: 1672 - protein, 2127 aa, synthetic construct
MPAAKRVKLDGGDKKYSIGLDIGTNSVGWAVITDEYKVPSKKFKVLGNTDRHSIKKNLIGALLFDSGETAEATRLKRTARRRYTRRKNRICYLQEIFSNEMAKVDDSFFHRLEESFLVEEDKKHERHPIFGNIVDEVAYHEKYPTIYHLRKKLVDSTDKADLRLIYLALAHMIKFRGHFLIEGDLNPDNSDVDKLFIQLVQTYNQLFEENPINASGVDAKAILSARLSKSRRLENLIAQLPGEKKNGLFGNLIALSLGLTPNFKSNFDLAEDAKLQLSKDTYDDDLDNLLAQIGDQYADLFLAAKNLSDAILLSDILRVNTEITKAPLSASMIKRYDEHHQDLTLLKALVRQQLPEKYKEIFFDQSKNGYAGYIDGGASQEEFYKFIKPILEKMDGTEELLVKLNREDLLRKQRTFDNGSIPHQIHLGELHAILRRQEDFYPFLKDNREKIEKILTFRIPYYVGPLARGNSRFAWMTRKSEETITPWNFEEVVDKGASAQSFIERMTNFDKNLPNEKVLPKHSLLYEYFTVYNELTKVKYVTEGMRKPAFLSGEQKKAIVDLLFKTNRKVTVKQLKEDYFKKIECFDSVEISGVEDRFNASLGTYHDLLKIIKDKDFLDNEENEDILEDIVLTLTLFEDREMIEERLKTYAHLFDDKVMKQLKRRRYTGWGRLSRKLINGIRDKQSGKTILDFLKSDGFANRNFMQLIHDDSLTFKEDIQKAQVSGQGDSLHEHIANLAGSPAIKKGILQTVKVVDELVKVMGRHKPENIVIEMARENQTTQKGQKNSRERMKRIEEGIKELGSQILKEHPVENTQLQNEKLYLYYLQNGRDMYVDQELDINRLSDYDVDHIVPQSFLKDDSIDNKVLTRSDKARGKSDNVPSEEVVKKMKNYWRQLLNAKLITQRKFDNLTKAERGGLSELDKAGFIKRQLVETRQITKHVAQILDSRMNTKYDENDKLIREVKVITLKSKLVSDFRKDFQFYKVREINNYHHAHDAYLNAVVGTALIKKYPKLESEFVYGDYKVYDVRKMIAKSEQEIGKATAKYFFYSNIMNFFKTEITLANGEIRKRPLIETNGETGEIVWDKGRDFATVRKVLSMPQVNIVKKTEVQTGGFSKESILPKRNSDKLIARKKDWDPKKYGGFDSPTVAYSVLVVAKVEKGKSKKLKSVKELLGITIMERSSFEKNPIDFLEAKGYKEVKKDLIIKLPKYSLFELENGRKRMLASAGELQKGNELALPSKYVNFLYLASHYEKLKGSPEDNEQKQLFVEQHKHYLDEIIEQISEFSKRVILADANLDKVLSAYNKHRDKPIREQAENIIHLFTLTNLGAPAAFKYFDTTIDRKRYTSTKEVLDATLIHQSITGLYETRIDLSQLGGDGGGGGEAAAKPAPGGLLGRDLLTKLKAQIQFSTEGPQVTWEDRPAMCLVLNLEEEYRLHEKPVPPSIDPSWLQLFPMVWAEKAGMGLANQVPPVVVELKSDASPVAVRQYPMSKEAREGIRPHIQRFLDLGILVPCQSPWNTPLLPVKKPGTNDYRPVQDLREVNKRVQDIHPTVPNPYNLLSSLPPSHTWYSVLDLKDAFFCLKLHPNSQPLFAFEWRDPEKGNTGQLTWTRLPQGFKNSPTLFNEALHRDLASFRALNPQVVMLQYVDDLLVAAPTYRDCKEGTRRLLQELSKLGYRVSAKKAQLCREEVTYLGYLLKGGKRWLTPARKATVMKIPTPTTPRQVREFLGKAGFCRLFIPGFASLAAPLYPLTRPKVPFTWTEAHQEAFGRIKEALLSAPALALPDLTKPFALYVDEKEGVARGVLTQTLGPWRRPVAYLSKKLDPVASGWPTCLKAIAAVALLLKDADKLTLGQNVLVIAPHNLESIVRQPPDRWMTNARMTHYQSLLLNERVSFAPPAILNPATLLPVESDDTPIHICSEILAEETGTRPDLRDQPLPGVPAWYTDGSSFIMDGRRQAGAAIVDNKRTVWASNLPEGTSAQKAELIALTQALRLAEGKSINIYTDSRYAFATAHVHGAIYKQRGWLTSAGKDIKNKEEILALLEAIHLPKRVAIIHCPGHQRGTDPVATGNRKADEAAKQAAQSTRILTETTKNAGKRTADGSEFEKRTADGSEFESPKKKAKVE

SEQ ID NO: 1673-1676 - skipped (4 entries)

SEQ ID NO: 1677 - protein, 2127 aa, synthetic construct
MPAAKRVKLDGGDKKYSIGLDIGTNSVGWAVITDEYKVPSKKFKVLGNTDRHSIKKNLIGALLFDSGETAEATRLKRTARRRYTRRKNRICYLQEIFSNEMAKVDDSFFHRLEESFLVEEDKKHERHPIFGNIVDEVAYHEKYPTIYHLRKKLVDSTDKADLRLIYLALAHMIKFRGHFLIEGDLNPDNSDVDKLFIQLVQTYNQLFEENPINASGVDAKAILSARLSKSRRLENLIAQLPGEKKNGLFGNLIALSLGLTPNFKSNFDLAEDAKLQLSKDTYDDDLDNLLAQIGDQYADLFLAAKNLSDAILLSDILRVNTEITKAPLSASMIKRYDEHHQDLTLLKALVRQQLPEKYKEIFFDQSKNGYAGYIDGGASQEEFYKFIKPILEKMDGTEELLVKLNREDLLRKQRTFDNGSIPHQIHLGELHAILRRQEDFYPFLKDNREKIEKILTFRIPYYVGPLARGNSRFAWMTRKSEETITPWNFEEVVDKGASAQSFIERMTNFDKNLPNEKVLPKHSLLYEYFTVYNELTKVKYVTEGMRKPAFLSGEQKKAIVDLLFKTNRKVTVKQLKEDYFKKIECFDSVEISGVEDRFNASLGTYHDLLKIIKDKDFLDNEENEDILEDIVLTLTLFEDREMIEERLKTYAHLFDDKVMKQLKRRRYTGWGRLSRKLINGIRDKQSGKTILDFLKSDGFANRNFMQLIHDDSLTFKEDIQKAQVSGQGDSLHEHIANLAGSPAIKKGILQTVKVVDELVKVMGRHKPENIVIEMARENQTTQKGQKNSRERMKRIEEGIKELGSQILKEHPVENTQLQNEKLYLYYLQNGRDMYVDQELDINRLSDYDVDHIVPQSFLKDDSIDNKVLTRSDKARGKSDNVPSEEVVKKMKNYWRQLLNAKLITQRKFDNLTKAERGGLSELDKAGFIKRQLVETRQITKHVAQILDSRMNTKYDENDKLIREVKVITLKSKLVSDFRKDFQFYKVREINNYHHAHDAYLNAVVGTALIKKYPKLESEFVYGDYKVYDVRKMIAKSEQEIGKATAKYFFYSNIMNFFKTEITLANGEIRKRPLIETNGETGEIVWDKGRDFATVRKVLSMPQVNIVKKTEVQTGGFSKESILPKRNSDKLIARKKDWDPKKYGGFDSPTVAYSVLVVAKVEKGKSKKLKSVKELLGITIMERSSFEKNPIDFLEAKGYKEVKKDLIIKLPKYSLFELENGRKRMLASAGELQKGNELALPSKYVNFLYLASHYEKLKGSPEDNEQKQLFVEQHKHYLDEIIEQISEFSKRVILADANLDKVLSAYNKHRDKPIREQAENIIHLFTLTNLGAPAAFKYFDTTIDRKRYTSTKEVLDATLIHQSITGLYETRIDLSQLGGDGGEAAAKGGGGSSGGLLGRDLLTKLKAQIQFSTEGPQVTWEDRPAMCLVLNLEEEYRLHEKPVPPSIDPSWLQLFPMVWAEKAGMGLANQVPPVVVELKSDASPVAVRQYPMSKEAREGIRPHIQRFLDLGILVPCQSPWNTPLLPVKKPGTNDYRPVQDLREVNKRVQDIHPTVPNPYNLLSSLPPSHTWYSVLDLKDAFFCLKLHPNSQPLFAFEWRDPEKGNTGQLTWTRLPQGFKNSPTLFNEALHRDLASFRALNPQVVMLQYVDDLLVAAPTYRDCKEGTRRLLQELSKLGYRVSAKKAQLCREEVTYLGYLLKGGKRWLTPARKATVMKIPTPTTPRQVREFLGKAGFCRLFIPGFASLAAPLYPLTRPKVPFTWTEAHQEAFGRIKEALLSAPALALPDLTKPFALYVDEKEGVARGVLTQTLGPWRRPVAYLSKKLDPVASGWPTCLKAIAAVALLLKDADKLTLGQNVLVIAPHNLESIVRQPPDRWMTNARMTHYQSLLLNERVSFAPPAILNPATLLPVESDDTPIHICSEILAEETGTRPDLRDQPLPGVPAWYTDGSSFIMDGRRQAGAAIVDNKRTVWASNLPEGTSAQKAELIALTQALRLAEGKSINIYTDSRYAFATAHVHGAIYKQRGWLTSAGKDIKNKEEILALLEAIHLPKRVAIIHCPGHQRGTDPVATGNRKADEAAKQAAQSTRILTETTKNAGKRTADGSEFEKRTADGSEFESPKKKAKVE

SEQ ID NO: 1678 - skipped

SEQ ID NO: 1679 - protein, 2124 aa, synthetic construct
MPAAKRVKLDGGDKKYSIGLDIGTNSVGWAVITDEYKVPSKKFKVLGNTDRHSIKKNLIGALLFDSGETAEATRLKRTARRRYTRRKNRICYLQEIFSNEMAKVDDSFFHRLEESFLVEEDKKHERHPIFGNIVDEVAYHEKYPTIYHLRKKLVDSTDKADLRLIYLALAHMIKFRGHFLIEGDLNPDNSDVDKLFIQLVQTYNQLFEENPINASGVDAKAILSARLSKSRRLENLIAQLPGEKKNGLFGNLIALSLGLTPNFKSNFDLAEDAKLQLSKDTYDDDLDNLLAQIGDQYADLFLAAKNLSDAILLSDILRVNTEITKAPLSASMIKRYDEHHQDLTLLKALVRQQLPEKYKEIFFDQSKNGYAGYIDGGASQEEFYKFIKPILEKMDGTEELLVKLNREDLLRKQRTFDNGSIPHQIHLGELHAILRRQEDFYPFLKDNREKIEKILTFRIPYYVGPLARGNSRFAWMTRKSEETITPWNFEEVVDKGASAQSFIERMTNFDKNLPNEKVLPKHSLLYEYFTVYNELTKVKYVTEGMRKPAFLSGEQKKAIVDLLFKTNRKVTVKQLKEDYFKKIECFDSVEISGVEDRFNASLGTYHDLLKIIKDKDFLDNEENEDILEDIVLTLTLFEDREMIEERLKTYAHLFDDKVMKQLKRRRYTGWGRLSRKLINGIRDKQSGKTILDFLKSDGFANRNFMQLIHDDSLTFKEDIQKAQVSGQGDSLHEHIANLAGSPAIKKGILQTVKVVDELVKVMGRHKPENIVIEMARENQTTQKGQKNSRERMKRIEEGIKELGSQILKEHPVENTQLQNEKLYLYYLQNGRDMYVDQELDINRLSDYDVDHIVPQSFLKDDSIDNKVLTRSDKARGKSDNVPSEEVVKKMKNYWRQLLNAKLITQRKFDNLTKAERGGLSELDKAGFIKRQLVETRQITKHVAQILDSRMNTKYDENDKLIREVKVITLKSKLVSDFRKDFQFYKVREINNYHHAHDAYLNAVVGTALIKKYPKLESEFVYGDYKVYDVRKMIAKSEQEIGKATAKYFFYSNIMNFFKTEITLANGEIRKRPLIETNGETGEIVWDKGRDFATVRKVLSMPQVNIVKKTEVQTGGFSKESILPKRNSDKLIARKKDWDPKKYGGFDSPTVAYSVLVVAKVEKGKSKKLKSVKELLGITIMERSSFEKNPIDFLEAKGYKEVKKDLIIKLPKYSLFELENGRKRMLASAGELQKGNELALPSKYVNFLYLASHYEKLKGSPEDNEQKQLFVEQHKHYLDEIIEQISEFSKRVILADANLDKVLSAYNKHRDKPIREQAENIIHLFTLTNLGAPAAFKYFDTTIDRKRYTSTKEVLDATLIHQSITGLYETRIDLSQLGGDGGEAAAKGGSGGLLGRDLLTKLKAQIQFSTEGPQVTWEDRPAMCLVLNLEEEYRLHEKPVPPSIDPSWLQLFPMVWAEKAGMGLANQVPPVVVELKSDASPVAVRQYPMSKEAREGIRPHIQRFLDLGILVPCQSPWNTPLLPVKKPGTNDYRPVQDLREVNKRVQDIHPTVPNPYNLLSSLPPSHTWYSVLDLKDAFFCLKLHPNSQPLFAFEWRDPEKGNTGQLTWTRLPQGFKNSPTLFNEALHRDLASFRALNPQVVMLQYVDDLLVAAPTYRDCKEGTRRLLQELSKLGYRVSAKKAQLCREEVTYLGYLLKGGKRWLTPARKATVMKIPTPTTPRQVREFLGKAGFCRLFIPGFASLAAPLYPLTRPKVPFTWTEAHQEAFGRIKEALLSAPALALPDLTKPFALYVDEKEGVARGVLTQTLGPWRRPVAYLSKKLDPVASGWPTCLKAIAAVALLLKDADKLTLGQNVLVIAPHNLESIVRQPPDRWMTNARMTHYQSLLLNERVSFAPPAILNPATLLPVESDDTPIHICSEILAEETGTRPDLRDQPLPGVPAWYTDGSSFIMDGRRQAGAAIVDNKRTVWASNLPEGTSAQKAELIALTQALRLAEGKSINIYTDSRYAFATAHVHGAIYKQRGWLTSAGKDIKNKEEILALLEAIHLPKRVAIIHCPGHQRGTDPVATGNRKADEAAKQAAQSTRILTETTKNAGKRTADGSEFEKRTADGSEFESPKKKAKVE

SEQ ID NO: 1680-1681 - skipped (2 entries)

SEQ ID NO: 1682 - protein, 2127 aa, synthetic construct
MPAAKRVKLDGGDKKYSIGLDIGTNSVGWAVITDEYKVPSKKFKVLGNTDRHSIKKNLIGALLFDSGETAEATRLKRTARRRYTRRKNRICYLQEIFSNEMAKVDDSFFHRLEESFLVEEDKKHERHPIFGNIVDEVAYHEKYPTIYHLRKKLVDSTDKADLRLIYLALAHMIKFRGHFLIEGDLNPDNSDVDKLFIQLVQTYNQLFEENPINASGVDAKAILSARLSKSRRLENLIAQLPGEKKNGLFGNLIALSLGLTPNFKSNFDLAEDAKLQLSKDTYDDDLDNLLAQIGDQYADLFLAAKNLSDAILLSDILRVNTEITKAPLSASMIKRYDEHHQDLTLLKALVRQQLPEKYKEIFFDQSKNGYAGYIDGGASQEEFYKFIKPILEKMDGTEELLVKLNREDLLRKQRTFDNGSIPHQIHLGELHAILRRQEDFYPFLKDNREKIEKILTFRIPYYVGPLARGNSRFAWMTRKSEETITPWNFEEVVDKGASAQSFIERMTNFDKNLPNEKVLPKHSLLYEYFTVYNELTKVKYVTEGMRKPAFLSGEQKKAIVDLLFKTNRKVTVKQLKEDYFKKIECFDSVEISGVEDRFNASLGTYHDLLKIIKDKDFLDNEENEDILEDIVLTLTLFEDREMIEERLKTYAHLFDDKVMKQLKRRRYTGWGRLSRKLINGIRDKQSGKTILDFLKSDGFANRNFMQLIHDDSLTFKEDIQKAQVSGQGDSLHEHIANLAGSPAIKKGILQTVKVVDELVKVMGRHKPENIVIEMARENQTTQKGQKNSRERMKRIEEGIKELGSQILKEHPVENTQLQNEKLYLYYLQNGRDMYVDQELDINRLSDYDVDHIVPQSFLKDDSIDNKVLTRSDKARGKSDNVPSEEVVKKMKNYWRQLLNAKLITQRKFDNLTKAERGGLSELDKAGFIKRQLVETRQITKHVAQILDSRMNTKYDENDKLIREVKVITLKSKLVSDFRKDFQFYKVREINNYHHAHDAYLNAVVGTALIKKYPKLESEFVYGDYKVYDVRKMIAKSEQEIGKATAKYFFYSNIMNFFKTEITLANGEIRKRPLIETNGETGEIVWDKGRDFATVRKVLSMPQVNIVKKTEVQTGGFSKESILPKRNSDKLIARKKDWDPKKYGGFDSPTVAYSVLVVAKVEKGKSKKLKSVKELLGITIMERSSFEKNPIDFLEAKGYKEVKKDLIIKLPKYSLFELENGRKRMLASAGELQKGNELALPSKYVNFLYLASHYEKLKGSPEDNEQKQLFVEQHKHYLDEIIEQISEFSKRVILADANLDKVLSAYNKHRDKPIREQAENIIHLFTLTNLGAPAAFKYFDTTIDRKRYTSTKEVLDATLIHQSITGLYETRIDLSQLGGDGGGGGGGSEAAAKGGLLGRDLLTKLKAQIQFSTEGPQVTWEDRPAMCLVLNLEEEYRLHEKPVPPSIDPSWLQLFPMVWAEKAGMGLANQVPPVVVELKSDASPVAVRQYPMSKEAREGIRPHIQRFLDLGILVPCQSPWNTPLLPVKKPGTNDYRPVQDLREVNKRVQDIHPTVPNPYNLLSSLPPSHTWYSVLDLKDAFFCLKLHPNSQPLFAFEWRDPEKGNTGQLTWTRLPQGFKNSPTLFNEALHRDLASFRALNPQVVMLQYVDDLLVAAPTYRDCKEGTRRLLQELSKLGYRVSAKKAQLCREEVTYLGYLLKGGKRWLTPARKATVMKIPTPTTPRQVREFLGKAGFCRLFIPGFASLAAPLYPLTRPKVPFTWTEAHQEAFGRIKEALLSAPALALPDLTKPFALYVDEKEGVARGVLTQTLGPWRRPVAYLSKKLDPVASGWPTCLKAIAAVALLLKDADKLTLGQNVLVIAPHNLESIVRQPPDRWMTNARMTHYQSLLLNERVSFAPPAILNPATLLPVESDDTPIHICSEILAEETGTRPDLRDQPLPGVPAWYTDGSSFIMDGRRQAGAAIVDNKRTVWASNLPEGTSAQKAELIALTQALRLAEGKSINIYTDSRYAFATAHVHGAIYKQRGWLTSAGKDIKNKEEILALLEAIHLPKRVAIIHCPGHQRGTDPVATGNRKADEAAKQAAQSTRILTETTKNAGKRTADGSEFEKRTADGSEFESPKKKAKVE

SEQ ID NO: 1683-1685 - skipped (3 entries)

SEQ ID NO: 1686 - protein, 2125 aa, synthetic construct
MPAAKRVKLDGGDKKYSIGLDIGTNSVGWAVITDEYKVPSKKFKVLGNTDRHSIKKNLIGALLFDSGETAEATRLKRTARRRYTRRKNRICYLQEIFSNEMAKVDDSFFHRLEESFLVEEDKKHERHPIFGNIVDEVAYHEKYPTIYHLRKKLVDSTDKADLRLIYLALAHMIKFRGHFLIEGDLNPDNSDVDKLFIQLVQTYNQLFEENPINASGVDAKAILSARLSKSRRLENLIAQLPGEKKNGLFGNLIALSLGLTPNFKSNFDLAEDAKLQLSKDTYDDDLDNLLAQIGDQYADLFLAAKNLSDAILLSDILRVNTEITKAPLSASMIKRYDEHHQDLTLLKALVRQQLPEKYKEIFFDQSKNGYAGYIDGGASQEEFYKFIKPILEKMDGTEELLVKLNREDLLRKQRTFDNGSIPHQIHLGELHAILRRQEDFYPFLKDNREKIEKILTFRIPYYVGPLARGNSRFAWMTRKSEETITPWNFEEVVDKGASAQSFIERMTNFDKNLPNEKVLPKHSLLYEYFTVYNELTKVKYVTEGMRKPAFLSGEQKKAIVDLLFKTNRKVTVKQLKEDYFKKIECFDSVEISGVEDRFNASLGTYHDLLKIIKDKDFLDNEENEDILEDIVLTLTLFEDREMIEERLKTYAHLFDDKVMKQLKRRRYTGWGRLSRKLINGIRDKQSGKTILDFLKSDGFANRNFMQLIHDDSLTFKEDIQKAQVSGQGDSLHEHIANLAGSPAIKKGILQTVKVVDELVKVMGRHKPENIVIEMARENQTTQKGQKNSRERMKRIEEGIKELGSQILKEHPVENTQLQNEKLYLYYLQNGRDMYVDQELDINRLSDYDVDHIVPQSFLKDDSIDNKVLTRSDKARGKSDNVPSEEVVKKMKNYWRQLLNAKLITQRKFDNLTKAERGGLSELDKAGFIKRQLVETRQITKHVAQILDSRMNTKYDENDKLIREVKVITLKSKLVSDFRKDFQFYKVREINNYHHAHDAYLNAVVGTALIKKYPKLESEFVYGDYKVYDVRKMIAKSEQEIGKATAKYFFYSNIMNFFKTEITLANGEIRKRPLIETNGETGEIVWDKGRDFATVRKVLSMPQVNIVKKTEVQTGGFSKESILPKRNSDKLIARKKDWDPKKYGGFDSPTVAYSVLVVAKVEKGKSKKLKSVKELLGITIMERSSFEKNPIDFLEAKGYKEVKKDLIIKLPKYSLFELENGRKRMLASAGELQKGNELALPSKYVNFLYLASHYEKLKGSPEDNEQKQLFVEQHKHYLDEIIEQISEFSKRVILADANLDKVLSAYNKHRDKPIREQAENIIHLFTLTNLGAPAAFKYFDTTIDRKRYTSTKEVLDATLIHQSITGLYETRIDLSQLGGDGGGGSGGSGGSGGLLGRDLLTKLKAQIQFSTEGPQVTWEDRPAMCLVLNLEEEYRLHEKPVPPSIDPSWLQLFPMVWAEKAGMGLANQVPPVVVELKSDASPVAVRQYPMSKEAREGIRPHIQRFLDLGILVPCQSPWNTPLLPVKKPGTNDYRPVQDLREVNKRVQDIHPTVPNPYNLLSSLPPSHTWYSVLDLKDAFFCLKLHPNSQPLFAFEWRDPEKGNTGQLTWTRLPQGFKNSPTLFNEALHRDLASFRALNPQVVMLQYVDDLLVAAPTYRDCKEGTRRLLQELSKLGYRVSAKKAQLCREEVTYLGYLLKGGKRWLTPARKATVMKIPTPTTPRQVREFLGKAGFCRLFIPGFASLAAPLYPLTRPKVPFTWTEAHQEAFGRIKEALLSAPALALPDLTKPFALYVDEKEGVARGVLTQTLGPWRRPVAYLSKKLDPVASGWPTCLKAIAAVALLLKDADKLTLGQNVLVIAPHNLESIVRQPPDRWMTNARMTHYQSLLLNERVSFAPPAILNPATLLPVESDDTPIHICSEILAEETGTRPDLRDQPLPGVPAWYTDGSSFIMDGRRQAGAAIVDNKRTVWASNLPEGTSAQKAELIALTQALRLAEGKSINIYTDSRYAFATAHVHGAIYKQRGWLTSAGKDIKNKEEILALLEAIHLPKRVAIIHCPGHQRGTDPVATGNRKADEAAKQAAQSTRILTETTKNAGKRTADGSEFEKRTADGSEFESPKKKAKVE

SEQ ID NO: 1687-1689 - skipped (3 entries)

SEQ ID NO: 1690 - protein, 2127 aa, synthetic construct
MPAAKRVKLDGGDKKYSIGLDIGTNSVGWAVITDEYKVPSKKFKVLGNTDRHSIKKNLIGALLFDSGETAEATRLKRTARRRYTRRKNRICYLQEIFSNEMAKVDDSFFHRLEESFLVEEDKKHERHPIFGNIVDEVAYHEKYPTIYHLRKKLVDSTDKADLRLIYLALAHMIKFRGHFLIEGDLNPDNSDVDKLFIQLVQTYNQLFEENPINASGVDAKAILSARLSKSRRLENLIAQLPGEKKNGLFGNLIALSLGLTPNFKSNFDLAEDAKLQLSKDTYDDDLDNLLAQIGDQYADLFLAAKNLSDAILLSDILRVNTEITKAPLSASMIKRYDEHHQDLTLLKALVRQQLPEKYKEIFFDQSKNGYAGYIDGGASQEEFYKFIKPILEKMDGTEELLVKLNREDLLRKQRTFDNGSIPHQIHLGELHAILRRQEDFYPFLKDNREKIEKILTFRIPYYVGPLARGNSRFAWMTRKSEETITPWNFEEVVDKGASAQSFIERMTNFDKNLPNEKVLPKHSLLYEYFTVYNELTKVKYVTEGMRKPAFLSGEQKKAIVDLLFKTNRKVTVKQLKEDYFKKIECFDSVEISGVEDRFNASLGTYHDLLKIIKDKDFLDNEENEDILEDIVLTLTLFEDREMIEERLKTYAHLFDDKVMKQLKRRRYTGWGRLSRKLINGIRDKQSGKTILDFLKSDGFANRNFMQLIHDDSLTFKEDIQKAQVSGQGDSLHEHIANLAGSPAIKKGILQTVKVVDELVKVMGRHKPENIVIEMARENQTTQKGQKNSRERMKRIEEGIKELGSQILKEHPVENTQLQNEKLYLYYLQNGRDMYVDQELDINRLSDYDVDHIVPQSFLKDDSIDNKVLTRSDKARGKSDNVPSEEVVKKMKNYWRQLLNAKLITQRKFDNLTKAERGGLSELDKAGFIKRQLVETRQITKHVAQILDSRMNTKYDENDKLIREVKVITLKSKLVSDFRKDFQFYKVREINNYHHAHDAYLNAVVGTALIKKYPKLESEFVYGDYKVYDVRKMIAKSEQEIGKATAKYFFYSNIMNFFKTEITLANGEIRKRPLIETNGETGEIVWDKGRDFATVRKVLSMPQVNIVKKTEVQTGGFSKESILPKRNSDKLIARKKDWDPKKYGGFDSPTVAYSVLVVAKVEKGKSKKLKSVKELLGITIMERSSFEKNPIDFLEAKGYKEVKKDLIIKLPKYSLFELENGRKRMLASAGELQKGNELALPSKYVNFLYLASHYEKLKGSPEDNEQKQLFVEQHKHYLDEIIEQISEFSKRVILADANLDKVLSAYNKHRDKPIREQAENIIHLFTLTNLGAPAAFKYFDTTIDRKRYTSTKEVLDATLIHQSITGLYETRIDLSQLGGDGGEAAAKGSSGGSGGLLGRDLLTKLKAQIQFSTEGPQVTWEDRPAMCLVLNLEEEYRLHEKPVPPSIDPSWLQLFPMVWAEKAGMGLANQVPPVVVELKSDASPVAVRQYPMSKEAREGIRPHIQRFLDLGILVPCQSPWNTPLLPVKKPGTNDYRPVQDLREVNKRVQDIHPTVPNPYNLLSSLPPSHTWYSVLDLKDAFFCLKLHPNSQPLFAFEWRDPEKGNTGQLTWTRLPQGFKNSPTLFNEALHRDLASFRALNPQVVMLQYVDDLLVAAPTYRDCKEGTRRLLQELSKLGYRVSAKKAQLCREEVTYLGYLLKGGKRWLTPARKATVMKIPTPTTPRQVREFLGKAGFCRLFIPGFASLAAPLYPLTRPKVPFTWTEAHQEAFGRIKEALLSAPALALPDLTKPFALYVDEKEGVARGVLTQTLGPWRRPVAYLSKKLDPVASGWPTCLKAIAAVALLLKDADKLTLGQNVLVIAPHNLESIVRQPPDRWMTNARMTHYQSLLLNERVSFAPPAILNPATLLPVESDDTPIHICSEILAEETGTRPDLRDQPLPGVPAWYTDGSSFIMDGRRQAGAAIVDNKRTVWASNLPEGTSAQKAELIALTQALRLAEGKSINIYTDSRYAFATAHVHGAIYKQRGWLTSAGKDIKNKEEILALLEAIHLPKRVAIIHCPGHQRGTDPVATGNRKADEAAKQAAQSTRILTETTKNAGKRTADGSEFEKRTADGSEFESPKKKAKVE

SEQ ID NO: 1691 - protein, 2125 aa, synthetic construct
MPAAKRVKLDGGDKKYSIGLDIGTNSVGWAVITDEYKVPSKKFKVLGNTDRHSIKKNLIGALLFDSGETAEATRLKRTARRRYTRRKNRICYLQEIFSNEMAKVDDSFFHRLEESFLVEEDKKHERHPIFGNIVDEVAYHEKYPTIYHLRKKLVDSTDKADLRLIYLALAHMIKFRGHFLIEGDLNPDNSDVDKLFIQLVQTYNQLFEENPINASGVDAKAILSARLSKSRRLENLIAQLPGEKKNGLFGNLIALSLGLTPNFKSNFDLAEDAKLQLSKDTYDDDLDNLLAQIGDQYADLFLAAKNLSDAILLSDILRVNTEITKAPLSASMIKRYDEHHQDLTLLKALVRQQLPEKYKEIFFDQSKNGYAGYIDGGASQEEFYKFIKPILEKMDGTEELLVKLNREDLLRKQRTFDNGSIPHQIHLGELHAILRRQEDFYPFLKDNREKIEKILTFRIPYYVGPLARGNSRFAWMTRKSEETITPWNFEEVVDKGASAQSFIERMTNFDKNLPNEKVLPKHSLLYEYFTVYNELTKVKYVTEGMRKPAFLSGEQKKAIVDLLFKTNRKVTVKQLKEDYFKKIECFDSVEISGVEDRFNASLGTYHDLLKIIKDKDFLDNEENEDILEDIVLTLTLFEDREMIEERLKTYAHLFDDKVMKQLKRRRYTGWGRLSRKLINGIRDKQSGKTILDFLKSDGFANRNFMQLIHDDSLTFKEDIQKAQVSGQGDSLHEHIANLAGSPAIKKGILQTVKVVDELVKVMGRHKPENIVIEMARENQTTQKGQKNSRERMKRIEEGIKELGSQILKEHPVENTQLQNEKLYLYYLQNGRDMYVDQELDINRLSDYDVDHIVPQSFLKDDSIDNKVLTRSDKARGKSDNVPSEEVVKKMKNYWRQLLNAKLITQRKFDNLTKAERGGLSELDKAGFIKRQLVETRQITKHVAQILDSRMNTKYDENDKLIREVKVITLKSKLVSDFRKDFQFYKVREINNYHHAHDAYLNAVVGTALIKKYPKLESEFVYGDYKVYDVRKMIAKSEQEIGKATAKYFFYSNIMNFFKTEITLANGEIRKRPLIETNGETGEIVWDKGRDFATVRKVLSMPQVNIVKKTEVQTGGFSKESILPKRNSDKLIARKKDWDPKKYGGFDSPTVAYSVLVVAKVEKGKSKKLKSVKELLGITIMERSSFEKNPIDFLEAKGYKEVKKDLIIKLPKYSLFELENGRKRMLASAGELQKGNELALPSKYVNFLYLASHYEKLKGSPEDNEQKQLFVEQHKHYLDEIIEQISEFSKRVILADANLDKVLSAYNKHRDKPIREQAENIIHLFTLTNLGAPAAFKYFDTTIDRKRYTSTKEVLDATLIHQSITGLYETRIDLSQLGGDGGPAPGGGGSSGGLLGRDLLTKLKAQIQFSTEGPQVTWEDRPAMCLVLNLEEEYRLHEKPVPPSIDPSWLQLFPMVWAEKAGMGLANQVPPVVVELKSDASPVAVRQYPMSKEAREGIRPHIQRFLDLGILVPCQSPWNTPLLPVKKPGTNDYRPVQDLREVNKRVQDIHPTVPNPYNLLSSLPPSHTWYSVLDLKDAFFCLKLHPNSQPLFAFEWRDPEKGNTGQLTWTRLPQGFKNSPTLFNEALHRDLASFRALNPQVVMLQYVDDLLVAAPTYRDCKEGTRRLLQELSKLGYRVSAKKAQLCREEVTYLGYLLKGGKRWLTPARKATVMKIPTPTTPRQVREFLGKAGFCRLFIPGFASLAAPLYPLTRPKVPFTWTEAHQEAFGRIKEALLSAPALALPDLTKPFALYVDEKEGVARGVLTQTLGPWRRPVAYLSKKLDPVASGWPTCLKAIAAVALLLKDADKLTLGQNVLVIAPHNLESIVRQPPDRWMTNARMTHYQSLLLNERVSFAPPAILNPATLLPVESDDTPIHICSEILAEETGTRPDLRDQPLPGVPAWYTDGSSFIMDGRRQAGAAIVDNKRTVWASNLPEGTSAQKAELIALTQALRLAEGKSINIYTDSRYAFATAHVHGAIYKQRGWLTSAGKDIKNKEEILALLEAIHLPKRVAIIHCPGHQRGTDPVATGNRKADEAAKQAAQSTRILTETTKNAGKRTADGSEFEKRTADGSEFESPKKKAKVE

SEQ ID NO: 1692-1694 - skipped (3 entries)

SEQ ID NO: 1695 - protein, 2122 aa, synthetic construct
MPAAKRVKLDGGDKKYSIGLDIGTNSVGWAVITDEYKVPSKKFKVLGNTDRHSIKKNLIGALLFDSGETAEATRLKRTARRRYTRRKNRICYLQEIFSNEMAKVDDSFFHRLEESFLVEEDKKHERHPIFGNIVDEVAYHEKYPTIYHLRKKLVDSTDKADLRLIYLALAHMIKFRGHFLIEGDLNPDNSDVDKLFIQLVQTYNQLFEENPINASGVDAKAILSARLSKSRRLENLIAQLPGEKKNGLFGNLIALSLGLTPNFKSNFDLAEDAKLQLSKDTYDDDLDNLLAQIGDQYADLFLAAKNLSDAILLSDILRVNTEITKAPLSASMIKRYDEHHQDLTLLKALVRQQLPEKYKEIFFDQSKNGYAGYIDGGASQEEFYKFIKPILEKMDGTEELLVKLNREDLLRKQRTFDNGSIPHQIHLGELHAILRRQEDFYPFLKDNREKIEKILTFRIPYYVGPLARGNSRFAWMTRKSEETITPWNFEEVVDKGASAQSFIERMTNFDKNLPNEKVLPKHSLLYEYFTVYNELTKVKYVTEGMRKPAFLSGEQKKAIVDLLFKTNRKVTVKQLKEDYFKKIECFDSVEISGVEDRFNASLGTYHDLLKIIKDKDFLDNEENEDILEDIVLTLTLFEDREMIEERLKTYAHLFDDKVMKQLKRRRYTGWGRLSRKLINGIRDKQSGKTILDFLKSDGFANRNFMQLIHDDSLTFKEDIQKAQVSGQGDSLHEHIANLAGSPAIKKGILQTVKVVDELVKVMGRHKPENIVIEMARENQTTQKGQKNSRERMKRIEEGIKELGSQILKEHPVENTQLQNEKLYLYYLQNGRDMYVDQELDINRLSDYDVDHIVPQSFLKDDSIDNKVLTRSDKARGKSDNVPSEEVVKKMKNYWRQLLNAKLITQRKFDNLTKAERGGLSELDKAGFIKRQLVETRQITKHVAQILDSRMNTKYDENDKLIREVKVITLKSKLVSDFRKDFQFYKVREINNYHHAHDAYLNAVVGTALIKKYPKLESEFVYGDYKVYDVRKMIAKSEQEIGKATAKYFFYSNIMNFFKTEITLANGEIRKRPLIETNGETGEIVWDKGRDFATVRKVLSMPQVNIVKKTEVQTGGFSKESILPKRNSDKLIARKKDWDPKKYGGFDSPTVAYSVLVVAKVEKGKSKKLKSVKELLGITIMERSSFEKNPIDFLEAKGYKEVKKDLIIKLPKYSLFELENGRKRMLASAGELQKGNELALPSKYVNFLYLASHYEKLKGSPEDNEQKQLFVEQHKHYLDEIIEQISEFSKRVILADANLDKVLSAYNKHRDKPIREQAENIIHLFTLTNLGAPAAFKYFDTTIDRKRYTSTKEVLDATLIHQSITGLYETRIDLSQLGGDGGPAPGSSGGLLGRDLLTKLKAQIQFSTEGPQVTWEDRPAMCLVLNLEEEYRLHEKPVPPSIDPSWLQLFPMVWAEKAGMGLANQVPPVVVELKSDASPVAVRQYPMSKEAREGIRPHIQRFLDLGILVPCQSPWNTPLLPVKKPGTNDYRPVQDLREVNKRVQDIHPTVPNPYNLLSSLPPSHTWYSVLDLKDAFFCLKLHPNSQPLFAFEWRDPEKGNTGQLTWTRLPQGFKNSPTLFNEALHRDLASFRALNPQVVMLQYVDDLLVAAPTYRDCKEGTRRLLQELSKLGYRVSAKKAQLCREEVTYLGYLLKGGKRWLTPARKATVMKIPTPTTPRQVREFLGKAGFCRLFIPGFASLAAPLYPLTRPKVPFTWTEAHQEAFGRIKEALLSAPALALPDLTKPFALYVDEKEGVARGVLTQTLGPWRRPVAYLSKKLDPVASGWPTCLKAIAAVALLLKDADKLTLGQNVLVIAPHNLESIVRQPPDRWMTNARMTHYQSLLLNERVSFAPPAILNPATLLPVESDDTPIHICSEILAEETGTRPDLRDQPLPGVPAWYTDGSSFIMDGRRQAGAAIVDNKRTVWASNLPEGTSAQKAELIALTQALRLAEGKSINIYTDSRYAFATAHVHGAIYKQRGWLTSAGKDIKNKEEILALLEAIHLPKRVAIIHCPGHQRGTDPVATGNRKADEAAKQAAQSTRILTETTKNAGKRTADGSEFEKRTADGSEFESPKKKAKVE

SEQ ID NO: 1696-1697 - skipped (2 entries)

SEQ ID NO: 1698 - protein, 2122 aa, synthetic construct
MPAAKRVKLDGGDKKYSIGLDIGTNSVGWAVITDEYKVPSKKFKVLGNTDRHSIKKNLIGALLFDSGETAEATRLKRTARRRYTRRKNRICYLQEIFSNEMAKVDDSFFHRLEESFLVEEDKKHERHPIFGNIVDEVAYHEKYPTIYHLRKKLVDSTDKADLRLIYLALAHMIKFRGHFLIEGDLNPDNSDVDKLFIQLVQTYNQLFEENPINASGVDAKAILSARLSKSRRLENLIAQLPGEKKNGLFGNLIALSLGLTPNFKSNFDLAEDAKLQLSKDTYDDDLDNLLAQIGDQYADLFLAAKNLSDAILLSDILRVNTEITKAPLSASMIKRYDEHHQDLTLLKALVRQQLPEKYKEIFFDQSKNGYAGYIDGGASQEEFYKFIKPILEKMDGTEELLVKLNREDLLRKQRTFDNGSIPHQIHLGELHAILRRQEDFYPFLKDNREKIEKILTFRIPYYVGPLARGNSRFAWMTRKSEETITPWNFEEVVDKGASAQSFIERMTNFDKNLPNEKVLPKHSLLYEYFTVYNELTKVKYVTEGMRKPAFLSGEQKKAIVDLLFKTNRKVTVKQLKEDYFKKIECFDSVEISGVEDRFNASLGTYHDLLKIIKDKDFLDNEENEDILEDIVLTLTLFEDREMIEERLKTYAHLFDDKVMKQLKRRRYTGWGRLSRKLINGIRDKQSGKTILDFLKSDGFANRNFMQLIHDDSLTFKEDIQKAQVSGQGDSLHEHIANLAGSPAIKKGILQTVKVVDELVKVMGRHKPENIVIEMARENQTTQKGQKNSRERMKRIEEGIKELGSQILKEHPVENTQLQNEKLYLYYLQNGRDMYVDQELDINRLSDYDVDHIVPQSFLKDDSIDNKVLTRSDKARGKSDNVPSEEVVKKMKNYWRQLLNAKLITQRKFDNLTKAERGGLSELDKAGFIKRQLVETRQITKHVAQILDSRMNTKYDENDKLIREVKVITLKSKLVSDFRKDFQFYKVREINNYHHAHDAYLNAVVGTALIKKYPKLESEFVYGDYKVYDVRKMIAKSEQEIGKATAKYFFYSNIMNFFKTEITLANGEIRKRPLIETNGETGEIVWDKGRDFATVRKVLSMPQVNIVKKTEVQTGGFSKESILPKRNSDKLIARKKDWDPKKYGGFDSPTVAYSVLVVAKVEKGKSKKLKSVKELLGITIMERSSFEKNPIDFLEAKGYKEVKKDLIIKLPKYSLFELENGRKRMLASAGELQKGNELALPSKYVNFLYLASHYEKLKGSPEDNEQKQLFVEQHKHYLDEIIEQISEFSKRVILADANLDKVLSAYNKHRDKPIREQAENIIHLFTLTNLGAPAAFKYFDTTIDRKRYTSTKEVLDATLIHQSITGLYETRIDLSQLGGDGGGSSGGGGGLLGRDLLTKLKAQIQFSTEGPQVTWEDRPAMCLVLNLEEEYRLHEKPVPPSIDPSWLQLFPMVWAEKAGMGLANQVPPVVVELKSDASPVAVRQYPMSKEAREGIRPHIQRFLDLGILVPCQSPWNTPLLPVKKPGTNDYRPVQDLREVNKRVQDIHPTVPNPYNLLSSLPPSHTWYSVLDLKDAFFCLKLHPNSQPLFAFEWRDPEKGNTGQLTWTRLPQGFKNSPTLFNEALHRDLASFRALNPQVVMLQYVDDLLVAAPTYRDCKEGTRRLLQELSKLGYRVSAKKAQLCREEVTYLGYLLKGGKRWLTPARKATVMKIPTPTTPRQVREFLGKAGFCRLFIPGFASLAAPLYPLTRPKVPFTWTEAHQEAFGRIKEALLSAPALALPDLTKPFALYVDEKEGVARGVLTQTLGPWRRPVAYLSKKLDPVASGWPTCLKAIAAVALLLKDADKLTLGQNVLVIAPHNLESIVRQPPDRWMTNARMTHYQSLLLNERVSFAPPAILNPATLLPVESDDTPIHICSEILAEETGTRPDLRDQPLPGVPAWYTDGSSFIMDGRRQAGAAIVDNKRTVWASNLPEGTSAQKAELIALTQALRLAEGKSINIYTDSRYAFATAHVHGAIYKQRGWLTSAGKDIKNKEEILALLEAIHLPKRVAIIHCPGHQRGTDPVATGNRKADEAAKQAAQSTRILTETTKNAGKRTADGSEFEKRTADGSEFESPKKKAKVE

SEQ ID NO: 1699-1720 - skipped (22 entries)

SEQ ID NO: 1721 - protein, 2127 aa, synthetic construct
MPAAKRVKLDGGDKKYSIGLDIGTNSVGWAVITDEYKVPSKKFKVLGNTDRHSIKKNLIGALLFDSGETAEATRLKRTARRRYTRRKNRICYLQEIFSNEMAKVDDSFFHRLEESFLVEEDKKHERHPIFGNIVDEVAYHEKYPTIYHLRKKLVDSTDKADLRLIYLALAHMIKFRGHFLIEGDLNPDNSDVDKLFIQLVQTYNQLFEENPINASGVDAKAILSARLSKSRRLENLIAQLPGEKKNGLFGNLIALSLGLTPNFKSNFDLAEDAKLQLSKDTYDDDLDNLLAQIGDQYADLFLAAKNLSDAILLSDILRVNTEITKAPLSASMIKRYDEHHQDLTLLKALVRQQLPEKYKEIFFDQSKNGYAGYIDGGASQEEFYKFIKPILEKMDGTEELLVKLNREDLLRKQRTFDNGSIPHQIHLGELHAILRRQEDFYPFLKDNREKIEKILTFRIPYYVGPLARGNSRFAWMTRKSEETITPWNFEEVVDKGASAQSFIERMTNFDKNLPNEKVLPKHSLLYEYFTVYNELTKVKYVTEGMRKPAFLSGEQKKAIVDLLFKTNRKVTVKQLKEDYFKKIECFDSVEISGVEDRFNASLGTYHDLLKIIKDKDFLDNEENEDILEDIVLTLTLFEDREMIEERLKTYAHLFDDKVMKQLKRRRYTGWGRLSRKLINGIRDKQSGKTILDFLKSDGFANRNFMQLIHDDSLTFKEDIQKAQVSGQGDSLHEHIANLAGSPAIKKGILQTVKVVDELVKVMGRHKPENIVIEMARENQTTQKGQKNSRERMKRIEEGIKELGSQILKEHPVENTQLQNEKLYLYYLQNGRDMYVDQELDINRLSDYDVDHIVPQSFLKDDSIDNKVLTRSDKARGKSDNVPSEEVVKKMKNYWRQLLNAKLITQRKFDNLTKAERGGLSELDKAGFIKRQLVETRQITKHVAQILDSRMNTKYDENDKLIREVKVITLKSKLVSDFRKDFQFYKVREINNYHHAHDAYLNAVVGTALIKKYPKLESEFVYGDYKVYDVRKMIAKSEQEIGKATAKYFFYSNIMNFFKTEITLANGEIRKRPLIETNGETGEIVWDKGRDFATVRKVLSMPQVNIVKKTEVQTGGFSKESILPKRNSDKLIARKKDWDPKKYGGFDSPTVAYSVLVVAKVEKGKSKKLKSVKELLGITIMERSSFEKNPIDFLEAKGYKEVKKDLIIKLPKYSLFELENGRKRMLASAGELQKGNELALPSKYVNFLYLASHYEKLKGSPEDNEQKQLFVEQHKHYLDEIIEQISEFSKRVILADANLDKVLSAYNKHRDKPIREQAENIIHLFTLTNLGAPAAFKYFDTTIDRKRYTSTKEVLDATLIHQSITGLYETRIDLSQLGGDGGGSSPAPEAAAKGGLLGRDLLTKLKAQIQFSTEGPQVTWEDRPAMCLVLNLEEEYRLHEKPVPPSIDPSWLQLFPMVWAEKAGMGLANQVPPVVVELKSDASPVAVRQYPMSKEAREGIRPHIQRFLDLGILVPCQSPWNTPLLPVKKPGTNDYRPVQDLREVNKRVQDIHPTVPNPYNLLSSLPPSHTWYSVLDLKDAFFCLKLHPNSQPLFAFEWRDPEKGNTGQLTWTRLPQGFKNSPTLFNEALHRDLASFRALNPQVVMLQYVDDLLVAAPTYRDCKEGTRRLLQELSKLGYRVSAKKAQLCREEVTYLGYLLKGGKRWLTPARKATVMKIPTPTTPRQVREFLGKAGFCRLFIPGFASLAAPLYPLTRPKVPFTWTEAHQEAFGRIKEALLSAPALALPDLTKPFALYVDEKEGVARGVLTQTLGPWRRPVAYLSKKLDPVASGWPTCLKAIAAVALLLKDADKLTLGQNVLVIAPHNLESIVRQPPDRWMTNARMTHYQSLLLNERVSFAPPAILNPATLLPVESDDTPIHICSEILAEETGTRPDLRDQPLPGVPAWYTDGSSFIMDGRRQAGAAIVDNKRTVWASNLPEGTSAQKAELIALTQALRLAEGKSINIYTDSRYAFATAHVHGAIYKQRGWLTSAGKDIKNKEEILALLEAIHLPKRVAIIHCPGHQRGTDPVATGNRKADEAAKQAAQSTRILTETTKNAGKRTADGSEFEKRTADGSEFESPKKKAKVE

SEQ ID NO: 1722-1753 - skipped (32 entries)

SEQ ID NO: 1754 - protein, 2218 aa, synthetic construct
MPAAKRVKLDGGDKKYSIGLDIGTNSVGWAVITDEYKVPSKKFKVLGNTDRHSIKKNLIGALLFDSGETAEATRLKRTARRRYTRRKNRICYLQEIFSNEMAKVDDSFFHRLEESFLVEEDKKHERHPIFGNIVDEVAYHEKYPTIYHLRKKLVDSTDKADLRLIYLALAHMIKFRGHFLIEGDLNPDNSDVDKLFIQLVQTYNQLFEENPINASGVDAKAILSARLSKSRRLENLIAQLPGEKKNGLFGNLIALSLGLTPNFKSNFDLAEDAKLQLSKDTYDDDLDNLLAQIGDQYADLFLAAKNLSDAILLSDILRVNTEITKAPLSASMIKRYDEHHQDLTLLKALVRQQLPEKYKEIFFDQSKNGYAGYIDGGASQEEFYKFIKPILEKMDGTEELLVKLNREDLLRKQRTFDNGSIPHQIHLGELHAILRRQEDFYPFLKDNREKIEKILTFRIPYYVGPLARGNSRFAWMTRKSEETITPWNFEEVVDKGASAQSFIERMTNFDKNLPNEKVLPKHSLLYEYFTVYNELTKVKYVTEGMRKPAFLSGEQKKAIVDLLFKTNRKVTVKQLKEDYFKKIECFDSVEISGVEDRFNASLGTYHDLLKIIKDKDFLDNEENEDILEDIVLTLTLFEDREMIEERLKTYAHLFDDKVMKQLKRRRYTGWGRLSRKLINGIRDKQSGKTILDFLKSDGFANRNFMQLIHDDSLTFKEDIQKAQVSGQGDSLHEHIANLAGSPAIKKGILQTVKVVDELVKVMGRHKPENIVIEMARENQTTQKGQKNSRERMKRIEEGIKELGSQILKEHPVENTQLQNEKLYLYYLQNGRDMYVDQELDINRLSDYDVDHIVPQSFLKDDSIDNKVLTRSDKARGKSDNVPSEEVVKKMKNYWRQLLNAKLITQRKFDNLTKAERGGLSELDKAGFIKRQLVETRQITKHVAQILDSRMNTKYDENDKLIREVKVITLKSKLVSDFRKDFQFYKVREINNYHHAHDAYLNAVVGTALIKKYPKLESEFVYGDYKVYDVRKMIAKSEQEIGKATAKYFFYSNIMNFFKTEITLANGEIRKRPLIETNGETGEIVWDKGRDFATVRKVLSMPQVNIVKKTEVQTGGFSKESILPKRNSDKLIARKKDWDPKKYGGFDSPTVAYSVLVVAKVEKGKSKKLKSVKELLGITIMERSSFEKNPIDFLEAKGYKEVKKDLIIKLPKYSLFELENGRKRMLASAGELQKGNELALPSKYVNFLYLASHYEKLKGSPEDNEQKQLFVEQHKHYLDEIIEQISEFSKRVILADANLDKVLSAYNKHRDKPIREQAENIIHLFTLTNLGAPAAFKYFDTTIDRKRYTSTKEVLDATLIHQSITGLYETRIDLSQLGGDGGPAPGGSEAAAKGGTLGDQGSRGSDPLPEPRVTLTVEGIPTEFLVNTGAEHSVLTKPMGKMGSKRTVVAGATGSKVYPWTTKRLLKIGQKQVTHSFLVIPECPAPLLGRDLLTKLKAQIQFSTEGPQVTWEDRPAMCLVLNLEEEYRLHEKPVPPSIDPSWLQLFPMVWAEKAGMGLANQVPPVVVELKSDASPVAVRQYPMSKEAREGIRPHIQRFLDLGILVPCQSPWNTPLLPVKKPGTNDYRPVQDLREVNKRVQDIHPTVPNPYNLLSSLPPSHTWYSVLDLKDAFFCLKLHPNSQPLFAFEWRDPEKGNTGQLTWTRLPQGFKNSPTLFNEALHRDLASFRALNPQVVMLQYVDDLLVAAPTYRDCKEGTRRLLQELSKLGYRVSAKKAQLCREEVTYLGYLLKGGKRWLTPARKATVMKIPTPTTPRQVREFLGTAGFCRLWIPGFASLAAPLYPLTRPKVPFTWTEAHQEAFGRIKEALLSAPALALPDLTKPFALYVDEKEGVARGVLTQTLGPWRRPVAYLSKKLDPVASGWPTCLKAIAAVALLLKDADKLTLGQNVLVIAPHNLESIVRQPPDRWMTNARMTHYQSLLLNERVSFAPPAILNPATLLPVESDDTPIHICSEILAEETGTRPDLRDQPLPGVPAWYTDGSSFIMDGRRQAGAAIVDNKRTVWASNLPEGTSAQKAELIALTQALRLAEGKSINIYTDSRYAFATAHVHGAIYKQRGWLTSAGKDIKNKEEILALLEAIHLPKRVAIIHCPGHQRGTDPVATGNRKADEAAKQAAQSTRILTETTKNAGKRTADGSEFEKRTADGSEFESPKKKAKVE

SEQ ID NO: 1755-1758 - skipped (4 entries)

SEQ ID NO: 1759 - protein, 2218 aa, synthetic construct
MPAAKRVKLDGGDKKYSIGLDIGTNSVGWAVITDEYKVPSKKFKVLGNTDRHSIKKNLIGALLFDSGETAEATRLKRTARRRYTRRKNRICYLQEIFSNEMAKVDDSFFHRLEESFLVEEDKKHERHPIFGNIVDEVAYHEKYPTIYHLRKKLVDSTDKADLRLIYLALAHMIKFRGHFLIEGDLNPDNSDVDKLFIQLVQTYNQLFEENPINASGVDAKAILSARLSKSRRLENLIAQLPGEKKNGLFGNLIALSLGLTPNFKSNFDLAEDAKLQLSKDTYDDDLDNLLAQIGDQYADLFLAAKNLSDAILLSDILRVNTEITKAPLSASMIKRYDEHHQDLTLLKALVRQQLPEKYKEIFFDQSKNGYAGYIDGGASQEEFYKFIKPILEKMDGTEELLVKLNREDLLRKQRTFDNGSIPHQIHLGELHAILRRQEDFYPFLKDNREKIEKILTFRIPYYVGPLARGNSRFAWMTRKSEETITPWNFEEVVDKGASAQSFIERMTNFDKNLPNEKVLPKHSLLYEYFTVYNELTKVKYVTEGMRKPAFLSGEQKKAIVDLLFKTNRKVTVKQLKEDYFKKIECFDSVEISGVEDRFNASLGTYHDLLKIIKDKDFLDNEENEDILEDIVLTLTLFEDREMIEERLKTYAHLFDDKVMKQLKRRRYTGWGRLSRKLINGIRDKQSGKTILDFLKSDGFANRNFMQLIHDDSLTFKEDIQKAQVSGQGDSLHEHIANLAGSPAIKKGILQTVKVVDELVKVMGRHKPENIVIEMARENQTTQKGQKNSRERMKRIEEGIKELGSQILKEHPVENTQLQNEKLYLYYLQNGRDMYVDQELDINRLSDYDVDHIVPQSFLKDDSIDNKVLTRSDKARGKSDNVPSEEVVKKMKNYWRQLLNAKLITQRKFDNLTKAERGGLSELDKAGFIKRQLVETRQITKHVAQILDSRMNTKYDENDKLIREVKVITLKSKLVSDFRKDFQFYKVREINNYHHAHDAYLNAVVGTALIKKYPKLESEFVYGDYKVYDVRKMIAKSEQEIGKATAKYFFYSNIMNFFKTEITLANGEIRKRPLIETNGETGEIVWDKGRDFATVRKVLSMPQVNIVKKTEVQTGGFSKESILPKRNSDKLIARKKDWDPKKYGGFDSPTVAYSVLVVAKVEKGKSKKLKSVKELLGITIMERSSFEKNPIDFLEAKGYKEVKKDLIIKLPKYSLFELENGRKRMLASAGELQKGNELALPSKYVNFLYLASHYEKLKGSPEDNEQKQLFVEQHKHYLDEIIEQISEFSKRVILADANLDKVLSAYNKHRDKPIREQAENIIHLFTLTNLGAPAAFKYFDTTIDRKRYTSTKEVLDATLIHQSITGLYETRIDLSQLGGDGGGSSGGGEAAAKGGTLGDQGSRGSDPLPEPRVTLTVEGIPTEFLVNTGAEHSVLTKPMGKMGSKRTVVAGATGSKVYPWTTKRLLKIGQKQVTHSFLVIPECPAPLLGRDLLTKLKAQIQFSTEGPQVTWEDRPAMCLVLNLEEEYRLHEKPVPPSIDPSWLQLFPMVWAEKAGMGLANQVPPVVVELKSDASPVAVRQYPMSKEAREGIRPHIQRFLDLGILVPCQSPWNTPLLPVKKPGTNDYRPVQDLREVNKRVQDIHPTVPNPYNLLSSLPPSHTWYSVLDLKDAFFCLKLHPNSQPLFAFEWRDPEKGNTGQLTWTRLPQGFKNSPTLFNEALHRDLASFRALNPQVVMLQYVDDLLVAAPTYRDCKEGTRRLLQELSKLGYRVSAKKAQLCREEVTYLGYLLKGGKRWLTPARKATVMKIPTPTTPRQVREFLGTAGFCRLWIPGFASLAAPLYPLTRPKVPFTWTEAHQEAFGRIKEALLSAPALALPDLTKPFALYVDEKEGVARGVLTQTLGPWRRPVAYLSKKLDPVASGWPTCLKAIAAVALLLKDADKLTLGQNVLVIAPHNLESIVRQPPDRWMTNARMTHYQSLLLNERVSFAPPAILNPATLLPVESDDTPIHICSEILAEETGTRPDLRDQPLPGVPAWYTDGSSFIMDGRRQAGAAIVDNKRTVWASNLPEGTSAQKAELIALTQALRLAEGKSINIYTDSRYAFATAHVHGAIYKQRGWLTSAGKDIKNKEEILALLEAIHLPKRVAIIHCPGHQRGTDPVATGNRKADEAAKQAAQSTRILTETTKNAGKRTADGSEFEKRTADGSEFESPKKKAKVE

SEQ ID NO: 1760-1768 - skipped (9 entries)

SEQ ID NO: 1769 - protein, 2218 aa, synthetic construct
MPAAKRVKLDGGDKKYSIGLDIGTNSVGWAVITDEYKVPSKKFKVLGNTDRHSIKKNLIGALLFDSGETAEATRLKRTARRRYTRRKNRICYLQEIFSNEMAKVDDSFFHRLEESFLVEEDKKHERHPIFGNIVDEVAYHEKYPTIYHLRKKLVDSTDKADLRLIYLALAHMIKFRGHFLIEGDLNPDNSDVDKLFIQLVQTYNQLFEENPINASGVDAKAILSARLSKSRRLENLIAQLPGEKKNGLFGNLIALSLGLTPNFKSNFDLAEDAKLQLSKDTYDDDLDNLLAQIGDQYADLFLAAKNLSDAILLSDILRVNTEITKAPLSASMIKRYDEHHQDLTLLKALVRQQLPEKYKEIFFDQSKNGYAGYIDGGASQEEFYKFIKPILEKMDGTEELLVKLNREDLLRKQRTFDNGSIPHQIHLGELHAILRRQEDFYPFLKDNREKIEKILTFRIPYYVGPLARGNSRFAWMTRKSEETITPWNFEEVVDKGASAQSFIERMTNFDKNLPNEKVLPKHSLLYEYFTVYNELTKVKYVTEGMRKPAFLSGEQKKAIVDLLFKTNRKVTVKQLKEDYFKKIECFDSVEISGVEDRFNASLGTYHDLLKIIKDKDFLDNEENEDILEDIVLTLTLFEDREMIEERLKTYAHLFDDKVMKQLKRRRYTGWGRLSRKLINGIRDKQSGKTILDFLKSDGFANRNFMQLIHDDSLTFKEDIQKAQVSGQGDSLHEHIANLAGSPAIKKGILQTVKVVDELVKVMGRHKPENIVIEMARENQTTQKGQKNSRERMKRIEEGIKELGSQILKEHPVENTQLQNEKLYLYYLQNGRDMYVDQELDINRLSDYDVDHIVPQSFLKDDSIDNKVLTRSDKARGKSDNVPSEEVVKKMKNYWRQLLNAKLITQRKFDNLTKAERGGLSELDKAGFIKRQLVETRQITKHVAQILDSRMNTKYDENDKLIREVKVITLKSKLVSDFRKDFQFYKVREINNYHHAHDAYLNAVVGTALIKKYPKLESEFVYGDYKVYDVRKMIAKSEQEIGKATAKYFFYSNIMNFFKTEITLANGEIRKRPLIETNGETGEIVWDKGRDFATVRKVLSMPQVNIVKKTEVQTGGFSKESILPKRNSDKLIARKKDWDPKKYGGFDSPTVAYSVLVVAKVEKGKSKKLKSVKELLGITIMERSSFEKNPIDFLEAKGYKEVKKDLIIKLPKYSLFELENGRKRMLASAGELQKGNELALPSKYVNFLYLASHYEKLKGSPEDNEQKQLFVEQHKHYLDEIIEQISEFSKRVILADANLDKVLSAYNKHRDKPIREQAENIIHLFTLTNLGAPAAFKYFDTTIDRKRYTSTKEVLDATLIHQSITGLYETRIDLSQLGGDGGGGSEAAAKGSSGGTLGDQGSRGSDPLPEPRVTLTVEGIPTEFLVNTGAEHSVLTKPMGKMGSKRTVVAGATGSKVYPWTTKRLLKIGQKQVTHSFLVIPECPAPLLGRDLLTKLKAQIQFSTEGPQVTWEDRPAMCLVLNLEEEYRLHEKPVPPSIDPSWLQLFPMVWAEKAGMGLANQVPPVVVELKSDASPVAVRQYPMSKEAREGIRPHIQRFLDLGILVPCQSPWNTPLLPVKKPGTNDYRPVQDLREVNKRVQDIHPTVPNPYNLLSSLPPSHTWYSVLDLKDAFFCLKLHPNSQPLFAFEWRDPEKGNTGQLTWTRLPQGFKNSPTLFNEALHRDLASFRALNPQVVMLQYVDDLLVAAPTYRDCKEGTRRLLQELSKLGYRVSAKKAQLCREEVTYLGYLLKGGKRWLTPARKATVMKIPTPTTPRQVREFLGKAGFCRLFIPGFASLAAPLYPLTRPKVPFTWTEAHQEAFGRIKEALLSAPALALPDLTKPFALYVDEKEGVARGVLTQTLGPWRRPVAYLSKKLDPVASGWPTCLKAIAAVALLLKDADKLTLGQNVLVIAPHNLESIVRQPPDRWMTNARMTHYQSLLLNERVSFAPPAILNPATLLPVESDDTPIHICSEILAEETGTRPDLRDQPLPGVPAWYTDGSSFIMDGRRQAGAAIVDNKRTVWASNLPEGTSAQKAELIALTQALRLAEGKSINIYTDSRYAFATAHVHGAIYKQRGWLTSAGKDIKNKEEILALLEAIHLPKRVAIIHCPGHQRGTDPVATGNRKADEAAKQAAQSTRILTETTKNAGKRTADGSEFEKRTADGSEFESPKKKAKVE

SEQ ID NO: 1770 - protein, 2218 aa, synthetic construct
MPAAKRVKLDGGDKKYSIGLDIGTNSVGWAVITDEYKVPSKKFKVLGNTDRHSIKKNLIGALLFDSGETAEATRLKRTARRRYTRRKNRICYLQEIFSNEMAKVDDSFFHRLEESFLVEEDKKHERHPIFGNIVDEVAYHEKYPTIYHLRKKLVDSTDKADLRLIYLALAHMIKFRGHFLIEGDLNPDNSDVDKLFIQLVQTYNQLFEENPINASGVDAKAILSARLSKSRRLENLIAQLPGEKKNGLFGNLIALSLGLTPNFKSNFDLAEDAKLQLSKDTYDDDLDNLLAQIGDQYADLFLAAKNLSDAILLSDILRVNTEITKAPLSASMIKRYDEHHQDLTLLKALVRQQLPEKYKEIFFDQSKNGYAGYIDGGASQEEFYKFIKPILEKMDGTEELLVKLNREDLLRKQRTFDNGSIPHQIHLGELHAILRRQEDFYPFLKDNREKIEKILTFRIPYYVGPLARGNSRFAWMTRKSEETITPWNFEEVVDKGASAQSFIERMTNFDKNLPNEKVLPKHSLLYEYFTVYNELTKVKYVTEGMRKPAFLSGEQKKAIVDLLFKTNRKVTVKQLKEDYFKKIECFDSVEISGVEDRFNASLGTYHDLLKIIKDKDFLDNEENEDILEDIVLTLTLFEDREMIEERLKTYAHLFDDKVMKQLKRRRYTGWGRLSRKLINGIRDKQSGKTILDFLKSDGFANRNFMQLIHDDSLTFKEDIQKAQVSGQGDSLHEHIANLAGSPAIKKGILQTVKVVDELVKVMGRHKPENIVIEMARENQTTQKGQKNSRERMKRIEEGIKELGSQILKEHPVENTQLQNEKLYLYYLQNGRDMYVDQELDINRLSDYDVDHIVPQSFLKDDSIDNKVLTRSDKARGKSDNVPSEEVVKKMKNYWRQLLNAKLITQRKFDNLTKAERGGLSELDKAGFIKRQLVETRQITKHVAQILDSRMNTKYDENDKLIREVKVITLKSKLVSDFRKDFQFYKVREINNYHHAHDAYLNAVVGTALIKKYPKLESEFVYGDYKVYDVRKMIAKSEQEIGKATAKYFFYSNIMNFFKTEITLANGEIRKRPLIETNGETGEIVWDKGRDFATVRKVLSMPQVNIVKKTEVQTGGFSKESILPKRNSDKLIARKKDWDPKKYGGFDSPTVAYSVLVVAKVEKGKSKKLKSVKELLGITIMERSSFEKNPIDFLEAKGYKEVKKDLIIKLPKYSLFELENGRKRMLASAGELQKGNELALPSKYVNFLYLASHYEKLKGSPEDNEQKQLFVEQHKHYLDEIIEQISEFSKRVILADANLDKVLSAYNKHRDKPIREQAENIIHLFTLTNLGAPAAFKYFDTTIDRKRYTSTKEVLDATLIHQSITGLYETRIDLSQLGGDGGEAAAKGGGPAPGGTLGDQGSRGSDPLPEPRVTLTVEGIPTEFLVNTGAEHSVLTKPMGKMGSKRTVVAGATGSKVYPWTTKRLLKIGQKQVTHSFLVIPECPAPLLGRDLLTKLKAQIQFSTEGPQVTWEDRPAMCLVLNLEEEYRLHEKPVPPSIDPSWLQLFPMVWAEKAGMGLANQVPPVVVELKSDASPVAVRQYPMSKEAREGIRPHIQRFLDLGILVPCQSPWNTPLLPVKKPGTNDYRPVQDLREVNKRVQDIHPTVPNPYNLLSSLPPSHTWYSVLDLKDAFFCLKLHPNSQPLFAFEWRDPEKGNTGQLTWTRLPQGFKNSPTLFNEALHRDLASFRALNPQVVMLQYVDDLLVAAPTYRDCKEGTRRLLQELSKLGYRVSAKKAQLCREEVTYLGYLLKGGKRWLTPARKATVMKIPTPTTPRQVREFLGKAGFCRLFIPGFASLAAPLYPLTRPKVPFTWTEAHQEAFGRIKEALLSAPALALPDLTKPFALYVDEKEGVARGVLTQTLGPWRRPVAYLSKKLDPVASGWPTCLKAIAAVALLLKDADKLTLGQNVLVIAPHNLESIVRQPPDRWMTNARMTHYQSLLLNERVSFAPPAILNPATLLPVESDDTPIHICSEILAEETGTRPDLRDQPLPGVPAWYTDGSSFIMDGRRQAGAAIVDNKRTVWASNLPEGTSAQKAELIALTQALRLAEGKSINIYTDSRYAFATAHVHGAIYKQRGWLTSAGKDIKNKEEILALLEAIHLPKRVAIIHCPGHQRGTDPVATGNRKADEAAKQAAQSTRILTETTKNAGKRTADGSEFEKRTADGSEFESPKKKAKVE

SEQ ID NO: 1771 - skipped

SEQ ID NO: 1772 - protein, 2213 aa, synthetic construct
MPAAKRVKLDGGDKKYSIGLDIGTNSVGWAVITDEYKVPSKKFKVLGNTDRHSIKKNLIGALLFDSGETAEATRLKRTARRRYTRRKNRICYLQEIFSNEMAKVDDSFFHRLEESFLVEEDKKHERHPIFGNIVDEVAYHEKYPTIYHLRKKLVDSTDKADLRLIYLALAHMIKFRGHFLIEGDLNPDNSDVDKLFIQLVQTYNQLFEENPINASGVDAKAILSARLSKSRRLENLIAQLPGEKKNGLFGNLIALSLGLTPNFKSNFDLAEDAKLQLSKDTYDDDLDNLLAQIGDQYADLFLAAKNLSDAILLSDILRVNTEITKAPLSASMIKRYDEHHQDLTLLKALVRQQLPEKYKEIFFDQSKNGYAGYIDGGASQEEFYKFIKPILEKMDGTEELLVKLNREDLLRKQRTFDNGSIPHQIHLGELHAILRRQEDFYPFLKDNREKIEKILTFRIPYYVGPLARGNSRFAWMTRKSEETITPWNFEEVVDKGASAQSFIERMTNFDKNLPNEKVLPKHSLLYEYFTVYNELTKVKYVTEGMRKPAFLSGEQKKAIVDLLFKTNRKVTVKQLKEDYFKKIECFDSVEISGVEDRFNASLGTYHDLLKIIKDKDFLDNEENEDILEDIVLTLTLFEDREMIEERLKTYAHLFDDKVMKQLKRRRYTGWGRLSRKLINGIRDKQSGKTILDFLKSDGFANRNFMQLIHDDSLTFKEDIQKAQVSGQGDSLHEHIANLAGSPAIKKGILQTVKVVDELVKVMGRHKPENIVIEMARENQTTQKGQKNSRERMKRIEEGIKELGSQILKEHPVENTQLQNEKLYLYYLQNGRDMYVDQELDINRLSDYDVDHIVPQSFLKDDSIDNKVLTRSDKARGKSDNVPSEEVVKKMKNYWRQLLNAKLITQRKFDNLTKAERGGLSELDKAGFIKRQLVETRQITKHVAQILDSRMNTKYDENDKLIREVKVITLKSKLVSDFRKDFQFYKVREINNYHHAHDAYLNAVVGTALIKKYPKLESEFVYGDYKVYDVRKMIAKSEQEIGKATAKYFFYSNIMNFFKTEITLANGEIRKRPLIETNGETGEIVWDKGRDFATVRKVLSMPQVNIVKKTEVQTGGFSKESILPKRNSDKLIARKKDWDPKKYGGFDSPTVAYSVLVVAKVEKGKSKKLKSVKELLGITIMERSSFEKNPIDFLEAKGYKEVKKDLIIKLPKYSLFELENGRKRMLASAGELQKGNELALPSKYVNFLYLASHYEKLKGSPEDNEQKQLFVEQHKHYLDEIIEQISEFSKRVILADANLDKVLSAYNKHRDKPIREQAENIIHLFTLTNLGAPAAFKYFDTTIDRKRYTSTKEVLDATLIHQSITGLYETRIDLSQLGGDGGGGGGSSGGTLGDQGSRGSDPLPEPRVTLTVEGIPTEFLVNTGAEHSVLTKPMGKMGSKRTVVAGATGSKVYPWTTKRLLKIGQKQVTHSFLVIPECPAPLLGRDLLTKLKAQIQFSTEGPQVTWEDRPAMCLVLNLEEEYRLHEKPVPPSIDPSWLQLFPMVWAEKAGMGLANQVPPVVVELKSDASPVAVRQYPMSKEAREGIRPHIQRFLDLGILVPCQSPWNTPLLPVKKPGTNDYRPVQDLREVNKRVQDIHPTVPNPYNLLSSLPPSHTWYSVLDLKDAFFCLKLHPNSQPLFAFEWRDPEKGNTGQLTWTRLPQGFKNSPTLFNEALHRDLASFRALNPQVVMLQYVDDLLVAAPTYRDCKEGTRRLLQELSKLGYRVSAKKAQLCREEVTYLGYLLKGGKRWLTPARKATVMKIPTPTTPRQVREFLGKAGFCRLFIPGFASLAAPLYPLTRPKVPFTWTEAHQEAFGRIKEALLSAPALALPDLTKPFALYVDEKEGVARGVLTQTLGPWRRPVAYLSKKLDPVASGWPTCLKAIAAVALLLKDADKLTLGQNVLVIAPHNLESIVRQPPDRWMTNARMTHYQSLLLNERVSFAPPAILNPATLLPVESDDTPIHICSEILAEETGTRPDLRDQPLPGVPAWYTDGSSFIMDGRRQAGAAIVDNKRTVWASNLPEGTSAQKAELIALTQALRLAEGKSINIYTDSRYAFATAHVHGAIYKQRGWLTSAGKDIKNKEEILALLEAIHLPKRVAIIHCPGHQRGTDPVATGNRKADEAAKQAAQSTRILTETTKNAGKRTADGSEFEKRTADGSEFESPKKKAKVE

SEQ ID NO: 1773 - protein, 2217 aa, synthetic construct
MPAAKRVKLDGGDKKYSIGLDIGTNSVGWAVITDEYKVPSKKFKVLGNTDRHSIKKNLIGALLFDSGETAEATRLKRTARRRYTRRKNRICYLQEIFSNEMAKVDDSFFHRLEESFLVEEDKKHERHPIFGNIVDEVAYHEKYPTIYHLRKKLVDSTDKADLRLIYLALAHMIKFRGHFLIEGDLNPDNSDVDKLFIQLVQTYNQLFEENPINASGVDAKAILSARLSKSRRLENLIAQLPGEKKNGLFGNLIALSLGLTPNFKSNFDLAEDAKLQLSKDTYDDDLDNLLAQIGDQYADLFLAAKNLSDAILLSDILRVNTEITKAPLSASMIKRYDEHHQDLTLLKALVRQQLPEKYKEIFFDQSKNGYAGYIDGGASQEEFYKFIKPILEKMDGTEELLVKLNREDLLRKQRTFDNGSIPHQIHLGELHAILRRQEDFYPFLKDNREKIEKILTFRIPYYVGPLARGNSRFAWMTRKSEETITPWNFEEVVDKGASAQSFIERMTNFDKNLPNEKVLPKHSLLYEYFTVYNELTKVKYVTEGMRKPAFLSGEQKKAIVDLLFKTNRKVTVKQLKEDYFKKIECFDSVEISGVEDRFNASLGTYHDLLKIIKDKDFLDNEENEDILEDIVLTLTLFEDREMIEERLKTYAHLFDDKVMKQLKRRRYTGWGRLSRKLINGIRDKQSGKTILDFLKSDGFANRNFMQLIHDDSLTFKEDIQKAQVSGQGDSLHEHIANLAGSPAIKKGILQTVKVVDELVKVMGRHKPENIVIEMARENQTTQKGQKNSRERMKRIEEGIKELGSQILKEHPVENTQLQNEKLYLYYLQNGRDMYVDQELDINRLSDYDVDHIVPQSFLKDDSIDNKVLTRSDKARGKSDNVPSEEVVKKMKNYWRQLLNAKLITQRKFDNLTKAERGGLSELDKAGFIKRQLVETRQITKHVAQILDSRMNTKYDENDKLIREVKVITLKSKLVSDFRKDFQFYKVREINNYHHAHDAYLNAVVGTALIKKYPKLESEFVYGDYKVYDVRKMIAKSEQEIGKATAKYFFYSNIMNFFKTEITLANGEIRKRPLIETNGETGEIVWDKGRDFATVRKVLSMPQVNIVKKTEVQTGGFSKESILPKRNSDKLIARKKDWDPKKYGGFDSPTVAYSVLVVAKVEKGKSKKLKSVKELLGITIMERSSFEKNPIDFLEAKGYKEVKKDLIIKLPKYSLFELENGRKRMLASAGELQKGNELALPSKYVNFLYLASHYEKLKGSPEDNEQKQLFVEQHKHYLDEIIEQISEFSKRVILADANLDKVLSAYNKHRDKPIREQAENIIHLFTLTNLGAPAAFKYFDTTIDRKRYTSTKEVLDATLIHQSITGLYETRIDLSQLGGDGGEAAAKEAAAKGGTLGDQGSRGSDPLPEPRVTLTVEGIPTEFLVNTGAEHSVLTKPMGKMGSKRTVVAGATGSKVYPWTTKRLLKIGQKQVTHSFLVIPECPAPLLGRDLLTKLKAQIQFSTEGPQVTWEDRPAMCLVLNLEEEYRLHEKPVPPSIDPSWLQLFPMVWAEKAGMGLANQVPPVVVELKSDASPVAVRQYPMSKEAREGIRPHIQRFLDLGILVPCQSPWNTPLLPVKKPGTNDYRPVQDLREVNKRVQDIHPTVPNPYNLLSSLPPSHTWYSVLDLKDAFFCLKLHPNSQPLFAFEWRDPEKGNTGQLTWTRLPQGFKNSPTLFNEALHRDLASFRALNPQVVMLQYVDDLLVAAPTYRDCKEGTRRLLQELSKLGYRVSAKKAQLCREEVTYLGYLLKGGKRWLTPARKATVMKIPTPTTPRQVREFLGKAGFCRLFIPGFASLAAPLYPLTRPKVPFTWTEAHQEAFGRIKEALLSAPALALPDLTKPFALYVDEKEGVARGVLTQTLGPWRRPVAYLSKKLDPVASGWPTCLKAIAAVALLLKDADKLTLGQNVLVIAPHNLESIVRQPPDRWMTNARMTHYQSLLLNERVSFAPPAILNPATLLPVESDDTPIHICSEILAEETGTRPDLRDQPLPGVPAWYTDGSSFIMDGRRQAGAAIVDNKRTVWASNLPEGTSAQKAELIALTQALRLAEGKSINIYTDSRYAFATAHVHGAIYKQRGWLTSAGKDIKNKEEILALLEAIHLPKRVAIIHCPGHQRGTDPVATGNRKADEAAKQAAQSTRILTETTKNAGKRTADGSEFEKRTADGSEFESPKKKAKVE

SEQ ID NO: 1774-1855 - skipped (82 entries)

SEQ ID NO: 1856 - protein, 2096 aa, synthetic construct
MPAAKRVKLDGGDKKYSIGLDIGTNSVGWAVITDEYKVPSKKFKVLGNTDRHSIKKNLIGALLFDSGETAEATRLKRTARRRYTRRKNRICYLQEIFSNEMAKVDDSFFHRLEESFLVEEDKKHERHPIFGNIVDEVAYHEKYPTIYHLRKKLVDSTDKADLRLIYLALAHMIKFRGHFLIEGDLNPDNSDVDKLFIQLVQTYNQLFEENPINASGVDAKAILSARLSKSRRLENLIAQLPGEKKNGLFGNLIALSLGLTPNFKSNFDLAEDAKLQLSKDTYDDDLDNLLAQIGDQYADLFLAAKNLSDAILLSDILRVNTEITKAPLSASMIKRYDEHHQDLTLLKALVRQQLPEKYKEIFFDQSKNGYAGYIDGGASQEEFYKFIKPILEKMDGTEELLVKLNREDLLRKQRTFDNGSIPHQIHLGELHAILRRQEDFYPFLKDNREKIEKILTFRIPYYVGPLARGNSRFAWMTRKSEETITPWNFEEVVDKGASAQSFIERMTNFDKNLPNEKVLPKHSLLYEYFTVYNELTKVKYVTEGMRKPAFLSGEQKKAIVDLLFKTNRKVTVKQLKEDYFKKIECFDSVEISGVEDRFNASLGTYHDLLKIIKDKDFLDNEENEDILEDIVLTLTLFEDREMIEERLKTYAHLFDDKVMKQLKRRRYTGWGRLSRKLINGIRDKQSGKTILDFLKSDGFANRNFMQLIHDDSLTFKEDIQKAQVSGQGDSLHEHIANLAGSPAIKKGILQTVKVVDELVKVMGRHKPENIVIEMARENQTTQKGQKNSRERMKRIEEGIKELGSQILKEHPVENTQLQNEKLYLYYLQNGRDMYVDQELDINRLSDYDVDHIVPQSFLKDDSIDNKVLTRSDKARGKSDNVPSEEVVKKMKNYWRQLLNAKLITQRKFDNLTKAERGGLSELDKAGFIKRQLVETRQITKHVAQILDSRMNTKYDENDKLIREVKVITLKSKLVSDFRKDFQFYKVREINNYHHAHDAYLNAVVGTALIKKYPKLESEFVYGDYKVYDVRKMIAKSEQEIGKATAKYFFYSNIMNFFKTEITLANGEIRKRPLIETNGETGEIVWDKGRDFATVRKVLSMPQVNIVKKTEVQTGGFSKESILPKRNSDKLIARKKDWDPKKYGGFDSPTVAYSVLVVAKVEKGKSKKLKSVKELLGITIMERSSFEKNPIDFLEAKGYKEVKKDLIIKLPKYSLFELENGRKRMLASAGELQKGNELALPSKYVNFLYLASHYEKLKGSPEDNEQKQLFVEQHKHYLDEIIEQISEFSKRVILADANLDKVLSAYNKHRDKPIREQAENIIHLFTLTNLGAPAAFKYFDTTIDRKRYTSTKEVLDATLIHQSITGLYETRIDLSQLGGDGGPAPGGGEAAAKGGTLNLEDEYRLYETSAEPEVSPGSTWLSDFPQAWAETGGMGLAVRQAPLIIPLKATSTPVSIKQYPMSQEAKLGIKPHIQRLLDQGILVPCQSPWNTPLLPVKKPGTNDYRPVQDLREVNKRVEDIHPTVPNPYNLLSGLPPSHRWYTVLDLKDAFFCLRLHPTSQPLFAFEWRDPGMGISGQLTWTRLPQGFKNSPTLFNEALHRDLADFRIQHPDLILLQYVDDILLAATSELDCQQGTRALLLTLGNLGYRASAKKAQLCQKQVKYLGYLLKEGQRWLTEARKETVMGQPTPKTPRQLREFLGKAGFCRLFIPGFAEMAAPLYPLTKPGTLFNWGPDQQKAYQEIKQALLTAPALGLPDLTKPFELFVDEKQGYAKGVLTQKLGPWRRPVAYLSKKLDPVAAGWPPCLRMVAAIAVLRKDAGKLTMGQPLVILAPHAVEALVKQPPDRWLSNARMTHYQAMLLDTDRVQFGPVVALNPATLLPLPEEGAPHDCLEILAETHGTRPDLTDQPIPDADHTWYTDGSSFLQEGQRKAGAAVTTETEVIWARALPAGTSAQRAELIALTQALKMAEGKRLNVYTDSRYAFATAHIHGEIYRRRGWLTSEGREIKNKSEILALLKALFLPKRLSIIHCLGHQKGDSAEARGNRLADQAAREAAIKTPPDTSTLLAGKRTADGSEFEKRTADGSEFESPKKKAKVE

SEQ ID NO: 1857 - protein, 2094 aa, synthetic construct
MPAAKRVKLDGGDKKYSIGLDIGTNSVGWAVITDEYKVPSKKFKVLGNTDRHSIKKNLIGALLFDSGETAEATRLKRTARRRYTRRKNRICYLQEIFSNEMAKVDDSFFHRLEESFLVEEDKKHERHPIFGNIVDEVAYHEKYPTIYHLRKKLVDSTDKADLRLIYLALAHMIKFRGHFLIEGDLNPDNSDVDKLFIQLVQTYNQLFEENPINASGVDAKAILSARLSKSRRLENLIAQLPGEKKNGLFGNLIALSLGLTPNFKSNFDLAEDAKLQLSKDTYDDDLDNLLAQIGDQYADLFLAAKNLSDAILLSDILRVNTEITKAPLSASMIKRYDEHHQDLTLLKALVRQQLPEKYKEIFFDQSKNGYAGYIDGGASQEEFYKFIKPILEKMDGTEELLVKLNREDLLRKQRTFDNGSIPHQIHLGELHAILRRQEDFYPFLKDNREKIEKILTFRIPYYVGPLARGNSRFAWMTRKSEETITPWNFEEVVDKGASAQSFIERMTNFDKNLPNEKVLPKHSLLYEYFTVYNELTKVKYVTEGMRKPAFLSGEQKKAIVDLLFKTNRKVTVKQLKEDYFKKIECFDSVEISGVEDRFNASLGTYHDLLKIIKDKDFLDNEENEDILEDIVLTLTLFEDREMIEERLKTYAHLFDDKVMKQLKRRRYTGWGRLSRKLINGIRDKQSGKTILDFLKSDGFANRNFMQLIHDDSLTFKEDIQKAQVSGQGDSLHEHIANLAGSPAIKKGILQTVKVVDELVKVMGRHKPENIVIEMARENQTTQKGQKNSRERMKRIEEGIKELGSQILKEHPVENTQLQNEKLYLYYLQNGRDMYVDQELDINRLSDYDVDHIVPQSFLKDDSIDNKVLTRSDKARGKSDNVPSEEVVKKMKNYWRQLLNAKLITQRKFDNLTKAERGGLSELDKAGFIKRQLVETRQITKHVAQILDSRMNTKYDENDKLIREVKVITLKSKLVSDFRKDFQFYKVREINNYHHAHDAYLNAVVGTALIKKYPKLESEFVYGDYKVYDVRKMIAKSEQEIGKATAKYFFYSNIMNFFKTEITLANGEIRKRPLIETNGETGEIVWDKGRDFATVRKVLSMPQVNIVKKTEVQTGGFSKESILPKRNSDKLIARKKDWDPKKYGGFDSPTVAYSVLVVAKVEKGKSKKLKSVKELLGITIMERSSFEKNPIDFLEAKGYKEVKKDLIIKLPKYSLFELENGRKRMLASAGELQKGNELALPSKYVNFLYLASHYEKLKGSPEDNEQKQLFVEQHKHYLDEIIEQISEFSKRVILADANLDKVLSAYNKHRDKPIREQAENIIHLFTLTNLGAPAAFKYFDTTIDRKRYTSTKEVLDATLIHQSITGLYETRIDLSQLGGDGGGGGPAPGSSGGTLNLEDEYRLYETSAEPEVSPGSTWLSDFPQAWAETGGMGLAVRQAPLIIPLKATSTPVSIKQYPMSQEAKLGIKPHIQRLLDQGILVPCQSPWNTPLLPVKKPGTNDYRPVQDLREVNKRVEDIHPTVPNPYNLLSGLPPSHRWYTVLDLKDAFFCLRLHPTSQPLFAFEWRDPGMGISGQLTWTRLPQGFKNSPTLFNEALHRDLADFRIQHPDLILLQYVDDILLAATSELDCQQGTRALLLTLGNLGYRASAKKAQLCQKQVKYLGYLLKEGQRWLTEARKETVMGQPTPKTPRQLREFLGKAGFCRLFIPGFAEMAAPLYPLTKPGTLFNWGPDQQKAYQEIKQALLTAPALGLPDLTKPFELFVDEKQGYAKGVLTQKLGPWRRPVAYLSKKLDPVAAGWPPCLRMVAAIAVLRKDAGKLTMGQPLVILAPHAVEALVKQPPDRWLSNARMTHYQAMLLDTDRVQFGPVVALNPATLLPLPEEGAPHDCLEILAETHGTRPDLTDQPIPDADHTWYTDGSSFLQEGQRKAGAAVTTETEVIWARALPAGTSAQRAELIALTQALKMAEGKRLNVYTDSRYAFATAHIHGEIYRRRGWLTSEGREIKNKSEILALLKALFLPKRLSIIHCLGHQKGDSAEARGNRLADQAAREAAIKTPPDTSTLLAGKRTADGSEFEKRTADGSEFESPKKKAKVE

SEQ ID NO: 1858-1859 - skipped (2 entries)

SEQ ID NO: 1860 - protein, 2100 aa, synthetic construct
MPAAKRVKLDGGDKKYSIGLDIGTNSVGWAVITDEYKVPSKKFKVLGNTDRHSIKKNLIGALLFDSGETAEATRLKRTARRRYTRRKNRICYLQEIFSNEMAKVDDSFFHRLEESFLVEEDKKHERHPIFGNIVDEVAYHEKYPTIYHLRKKLVDSTDKADLRLIYLALAHMIKFRGHFLIEGDLNPDNSDVDKLFIQLVQTYNQLFEENPINASGVDAKAILSARLSKSRRLENLIAQLPGEKKNGLFGNLIALSLGLTPNFKSNFDLAEDAKLQLSKDTYDDDLDNLLAQIGDQYADLFLAAKNLSDAILLSDILRVNTEITKAPLSASMIKRYDEHHQDLTLLKALVRQQLPEKYKEIFFDQSKNGYAGYIDGGASQEEFYKFIKPILEKMDGTEELLVKLNREDLLRKQRTFDNGSIPHQIHLGELHAILRRQEDFYPFLKDNREKIEKILTFRIPYYVGPLARGNSRFAWMTRKSEETITPWNFEEVVDKGASAQSFIERMTNFDKNLPNEKVLPKHSLLYEYFTVYNELTKVKYVTEGMRKPAFLSGEQKKAIVDLLFKTNRKVTVKQLKEDYFKKIECFDSVEISGVEDRFNASLGTYHDLLKIIKDKDFLDNEENEDILEDIVLTLTLFEDREMIEERLKTYAHLFDDKVMKQLKRRRYTGWGRLSRKLINGIRDKQSGKTILDFLKSDGFANRNFMQLIHDDSLTFKEDIQKAQVSGQGDSLHEHIANLAGSPAIKKGILQTVKVVDELVKVMGRHKPENIVIEMARENQTTQKGQKNSRERMKRIEEGIKELGSQILKEHPVENTQLQNEKLYLYYLQNGRDMYVDQELDINRLSDYDVDHIVPQSFLKDDSIDNKVLTRSDKARGKSDNVPSEEVVKKMKNYWRQLLNAKLITQRKFDNLTKAERGGLSELDKAGFIKRQLVETRQITKHVAQILDSRMNTKYDENDKLIREVKVITLKSKLVSDFRKDFQFYKVREINNYHHAHDAYLNAVVGTALIKKYPKLESEFVYGDYKVYDVRKMIAKSEQEIGKATAKYFFYSNIMNFFKTEITLANGEIRKRPLIETNGETGEIVWDKGRDFATVRKVLSMPQVNIVKKTEVQTGGFSKESILPKRNSDKLIARKKDWDPKKYGGFDSPTVAYSVLVVAKVEKGKSKKLKSVKELLGITIMERSSFEKNPIDFLEAKGYKEVKKDLIIKLPKYSLFELENGRKRMLASAGELQKGNELALPSKYVNFLYLASHYEKLKGSPEDNEQKQLFVEQHKHYLDEIIEQISEFSKRVILADANLDKVLSAYNKHRDKPIREQAENIIHLFTLTNLGAPAAFKYFDTTIDRKRYTSTKEVLDATLIHQSITGLYETRIDLSQLGGDGGEAAAKGGGGSEAAAKGGTLNLEDEYRLYETSAEPEVSPGSTWLSDFPQAWAETGGMGLAVRQAPLIIPLKATSTPVSIKQYPMSQEAKLGIKPHIQRLLDQGILVPCQSPWNTPLLPVKKPGTNDYRPVQDLREVNKRVEDIHPTVPNPYNLLSGLPPSHRWYTVLDLKDAFFCLRLHPTSQPLFAFEWRDPGMGISGQLTWTRLPQGFKNSPTLFNEALHRDLADFRIQHPDLILLQYVDDILLAATSELDCQQGTRALLLTLGNLGYRASAKKAQLCQKQVKYLGYLLKEGQRWLTEARKETVMGQPTPKTPRQLREFLGKAGFCRLFIPGFAEMAAPLYPLTKPGTLFNWGPDQQKAYQEIKQALLTAPALGLPDLTKPFELFVDEKQGYAKGVLTQKLGPWRRPVAYLSKKLDPVAAGWPPCLRMVAAIAVLRKDAGKLTMGQPLVILAPHAVEALVKQPPDRWLSNARMTHYQAMLLDTDRVQFGPVVALNPATLLPLPEEGAPHDCLEILAETHGTRPDLTDQPIPDADHTWYTDGSSFLQEGQRKAGAAVTTETEVIWARALPAGTSAQRAELIALTQALKMAEGKRLNVYTDSRYAFATAHIHGEIYRRRGWLTSEGREIKNKSEILALLKALFLPKRLSIIHCLGHQKGDSAEARGNRLADQAAREAAIKTPPDTSTLLAGKRTADGSEFEKRTADGSEFESPKKKAKVE

SEQ ID NO: 1861 - protein, 2096 aa, synthetic construct
MPAAKRVKLDGGDKKYSIGLDIGTNSVGWAVITDEYKVPSKKFKVLGNTDRHSIKKNLIGALLFDSGETAEATRLKRTARRRYTRRKNRICYLQEIFSNEMAKVDDSFFHRLEESFLVEEDKKHERHPIFGNIVDEVAYHEKYPTIYHLRKKLVDSTDKADLRLIYLALAHMIKFRGHFLIEGDLNPDNSDVDKLFIQLVQTYNQLFEENPINASGVDAKAILSARLSKSRRLENLIAQLPGEKKNGLFGNLIALSLGLTPNFKSNFDLAEDAKLQLSKDTYDDDLDNLLAQIGDQYADLFLAAKNLSDAILLSDILRVNTEITKAPLSASMIKRYDEHHQDLTLLKALVRQQLPEKYKEIFFDQSKNGYAGYIDGGASQEEFYKFIKPILEKMDGTEELLVKLNREDLLRKQRTFDNGSIPHQIHLGELHAILRRQEDFYPFLKDNREKIEKILTFRIPYYVGPLARGNSRFAWMTRKSEETITPWNFEEVVDKGASAQSFIERMTNFDKNLPNEKVLPKHSLLYEYFTVYNELTKVKYVTEGMRKPAFLSGEQKKAIVDLLFKTNRKVTVKQLKEDYFKKIECFDSVEISGVEDRFNASLGTYHDLLKIIKDKDFLDNEENEDILEDIVLTLTLFEDREMIEERLKTYAHLFDDKVMKQLKRRRYTGWGRLSRKLINGIRDKQSGKTILDFLKSDGFANRNFMQLIHDDSLTFKEDIQKAQVSGQGDSLHEHIANLAGSPAIKKGILQTVKVVDELVKVMGRHKPENIVIEMARENQTTQKGQKNSRERMKRIEEGIKELGSQILKEHPVENTQLQNEKLYLYYLQNGRDMYVDQELDINRLSDYDVDHIVPQSFLKDDSIDNKVLTRSDKARGKSDNVPSEEVVKKMKNYWRQLLNAKLITQRKFDNLTKAERGGLSELDKAGFIKRQLVETRQITKHVAQILDSRMNTKYDENDKLIREVKVITLKSKLVSDFRKDFQFYKVREINNYHHAHDAYLNAVVGTALIKKYPKLESEFVYGDYKVYDVRKMIAKSEQEIGKATAKYFFYSNIMNFFKTEITLANGEIRKRPLIETNGETGEIVWDKGRDFATVRKVLSMPQVNIVKKTEVQTGGFSKESILPKRNSDKLIARKKDWDPKKYGGFDSPTVAYSVLVVAKVEKGKSKKLKSVKELLGITIMERSSFEKNPIDFLEAKGYKEVKKDLIIKLPKYSLFELENGRKRMLASAGELQKGNELALPSKYVNFLYLASHYEKLKGSPEDNEQKQLFVEQHKHYLDEIIEQISEFSKRVILADANLDKVLSAYNKHRDKPIREQAENIIHLFTLTNLGAPAAFKYFDTTIDRKRYTSTKEVLDATLIHQSITGLYETRIDLSQLGGDGGGSSEAAAKGGGGGTLNLEDEYRLYETSAEPEVSPGSTWLSDFPQAWAETGGMGLAVRQAPLIIPLKATSTPVSIKQYPMSQEAKLGIKPHIQRLLDQGILVPCQSPWNTPLLPVKKPGTNDYRPVQDLREVNKRVEDIHPTVPNPYNLLSGLPPSHRWYTVLDLKDAFFCLRLHPTSQPLFAFEWRDPGMGISGQLTWTRLPQGFKNSPTLFNEALHRDLADFRIQHPDLILLQYVDDILLAATSELDCQQGTRALLLTLGNLGYRASAKKAQLCQKQVKYLGYLLKEGQRWLTEARKETVMGQPTPKTPRQLREFLGKAGFCRLFIPGFAEMAAPLYPLTKPGTLFNWGPDQQKAYQEIKQALLTAPALGLPDLTKPFELFVDEKQGYAKGVLTQKLGPWRRPVAYLSKKLDPVAAGWPPCLRMVAAIAVLRKDAGKLTMGQPLVILAPHAVEALVKQPPDRWLSNARMTHYQAMLLDTDRVQFGPVVALNPATLLPLPEEGAPHDCLEILAETHGTRPDLTDQPIPDADHTWYTDGSSFLQEGQRKAGAAVTTETEVIWARALPAGTSAQRAELIALTQALKMAEGKRLNVYTDSRYAFATAHIHGEIYRRRGWLTSEGREIKNKSEILALLKALFLPKRLSIIHCLGHQKGDSAEARGNRLADQAAREAAIKTPPDTSTLLAGKRTADGSEFEKRTADGSEFESPKKKAKVE

SEQ ID NO: 1862 - skipped

SEQ ID NO: 1863 - protein, 2098 aa, synthetic construct
MPAAKRVKLDGGDKKYSIGLDIGTNSVGWAVITDEYKVPSKKFKVLGNTDRHSIKKNLIGALLFDSGETAEATRLKRTARRRYTRRKNRICYLQEIFSNEMAKVDDSFFHRLEESFLVEEDKKHERHPIFGNIVDEVAYHEKYPTIYHLRKKLVDSTDKADLRLIYLALAHMIKFRGHFLIEGDLNPDNSDVDKLFIQLVQTYNQLFEENPINASGVDAKAILSARLSKSRRLENLIAQLPGEKKNGLFGNLIALSLGLTPNFKSNFDLAEDAKLQLSKDTYDDDLDNLLAQIGDQYADLFLAAKNLSDAILLSDILRVNTEITKAPLSASMIKRYDEHHQDLTLLKALVRQQLPEKYKEIFFDQSKNGYAGYIDGGASQEEFYKFIKPILEKMDGTEELLVKLNREDLLRKQRTFDNGSIPHQIHLGELHAILRRQEDFYPFLKDNREKIEKILTFRIPYYVGPLARGNSRFAWMTRKSEETITPWNFEEVVDKGASAQSFIERMTNFDKNLPNEKVLPKHSLLYEYFTVYNELTKVKYVTEGMRKPAFLSGEQKKAIVDLLFKTNRKVTVKQLKEDYFKKIECFDSVEISGVEDRFNASLGTYHDLLKIIKDKDFLDNEENEDILEDIVLTLTLFEDREMIEERLKTYAHLFDDKVMKQLKRRRYTGWGRLSRKLINGIRDKQSGKTILDFLKSDGFANRNFMQLIHDDSLTFKEDIQKAQVSGQGDSLHEHIANLAGSPAIKKGILQTVKVVDELVKVMGRHKPENIVIEMARENQTTQKGQKNSRERMKRIEEGIKELGSQILKEHPVENTQLQNEKLYLYYLQNGRDMYVDQELDINRLSDYDVDHIVPQSFLKDDSIDNKVLTRSDKARGKSDNVPSEEVVKKMKNYWRQLLNAKLITQRKFDNLTKAERGGLSELDKAGFIKRQLVETRQITKHVAQILDSRMNTKYDENDKLIREVKVITLKSKLVSDFRKDFQFYKVREINNYHHAHDAYLNAVVGTALIKKYPKLESEFVYGDYKVYDVRKMIAKSEQEIGKATAKYFFYSNIMNFFKTEITLANGEIRKRPLIETNGETGEIVWDKGRDFATVRKVLSMPQVNIVKKTEVQTGGFSKESILPKRNSDKLIARKKDWDPKKYGGFDSPTVAYSVLVVAKVEKGKSKKLKSVKELLGITIMERSSFEKNPIDFLEAKGYKEVKKDLIIKLPKYSLFELENGRKRMLASAGELQKGNELALPSKYVNFLYLASHYEKLKGSPEDNEQKQLFVEQHKHYLDEIIEQISEFSKRVILADANLDKVLSAYNKHRDKPIREQAENIIHLFTLTNLGAPAAFKYFDTTIDRKRYTSTKEVLDATLIHQSITGLYETRIDLSQLGGDGGPAPAPAPAPAPAPGGTLNLEDEYRLYETSAEPEVSPGSTWLSDFPQAWAETGGMGLAVRQAPLIIPLKATSTPVSIKQYPMSQEAKLGIKPHIQRLLDQGILVPCQSPWNTPLLPVKKPGTNDYRPVQDLREVNKRVEDIHPTVPNPYNLLSGLPPSHRWYTVLDLKDAFFCLRLHPTSQPLFAFEWRDPGMGISGQLTWTRLPQGFKNSPTLFNEALHRDLADFRIQHPDLILLQYVDDILLAATSELDCQQGTRALLLTLGNLGYRASAKKAQLCQKQVKYLGYLLKEGQRWLTEARKETVMGQPTPKTPRQLREFLGKAGFCRLFIPGFAEMAAPLYPLTKPGTLFNWGPDQQKAYQEIKQALLTAPALGLPDLTKPFELFVDEKQGYAKGVLTQKLGPWRRPVAYLSKKLDPVAAGWPPCLRMVAAIAVLRKDAGKLTMGQPLVILAPHAVEALVKQPPDRWLSNARMTHYQAMLLDTDRVQFGPVVALNPATLLPLPEEGAPHDCLEILAETHGTRPDLTDQPIPDADHTWYTDGSSFLQEGQRKAGAAVTTETEVIWARALPAGTSAQRAELIALTQALKMAEGKRLNVYTDSRYAFATAHIHGEIYRRRGWLTSEGREIKNKSEILALLKALFLPKRLSIIHCLGHQKGDSAEARGNRLADQAAREAAIKTPPDTSTLLAGKRTADGSEFEKRTADGSEFESPKKKAKVE

SEQ ID NO: 1864 - protein, 2096 aa, synthetic construct
MPAAKRVKLDGGDKKYSIGLDIGTNSVGWAVITDEYKVPSKKFKVLGNTDRHSIKKNLIGALLFDSGETAEATRLKRTARRRYTRRKNRICYLQEIFSNEMAKVDDSFFHRLEESFLVEEDKKHERHPIFGNIVDEVAYHEKYPTIYHLRKKLVDSTDKADLRLIYLALAHMIKFRGHFLIEGDLNPDNSDVDKLFIQLVQTYNQLFEENPINASGVDAKAILSARLSKSRRLENLIAQLPGEKKNGLFGNLIALSLGLTPNFKSNFDLAEDAKLQLSKDTYDDDLDNLLAQIGDQYADLFLAAKNLSDAILLSDILRVNTEITKAPLSASMIKRYDEHHQDLTLLKALVRQQLPEKYKEIFFDQSKNGYAGYIDGGASQEEFYKFIKPILEKMDGTEELLVKLNREDLLRKQRTFDNGSIPHQIHLGELHAILRRQEDFYPFLKDNREKIEKILTFRIPYYVGPLARGNSRFAWMTRKSEETITPWNFEEVVDKGASAQSFIERMTNFDKNLPNEKVLPKHSLLYEYFTVYNELTKVKYVTEGMRKPAFLSGEQKKAIVDLLFKTNRKVTVKQLKEDYFKKIECFDSVEISGVEDRFNASLGTYHDLLKIIKDKDFLDNEENEDILEDIVLTLTLFEDREMIEERLKTYAHLFDDKVMKQLKRRRYTGWGRLSRKLINGIRDKQSGKTILDFLKSDGFANRNFMQLIHDDSLTFKEDIQKAQVSGQGDSLHEHIANLAGSPAIKKGILQTVKVVDELVKVMGRHKPENIVIEMARENQTTQKGQKNSRERMKRIEEGIKELGSQILKEHPVENTQLQNEKLYLYYLQNGRDMYVDQELDINRLSDYDVDHIVPQSFLKDDSIDNKVLTRSDKARGKSDNVPSEEVVKKMKNYWRQLLNAKLITQRKFDNLTKAERGGLSELDKAGFIKRQLVETRQITKHVAQILDSRMNTKYDENDKLIREVKVITLKSKLVSDFRKDFQFYKVREINNYHHAHDAYLNAVVGTALIKKYPKLESEFVYGDYKVYDVRKMIAKSEQEIGKATAKYFFYSNIMNFFKTEITLANGEIRKRPLIETNGETGEIVWDKGRDFATVRKVLSMPQVNIVKKTEVQTGGFSKESILPKRNSDKLIARKKDWDPKKYGGFDSPTVAYSVLVVAKVEKGKSKKLKSVKELLGITIMERSSFEKNPIDFLEAKGYKEVKKDLIIKLPKYSLFELENGRKRMLASAGELQKGNELALPSKYVNFLYLASHYEKLKGSPEDNEQKQLFVEQHKHYLDEIIEQISEFSKRVILADANLDKVLSAYNKHRDKPIREQAENIIHLFTLTNLGAPAAFKYFDTTIDRKRYTSTKEVLDATLIHQSITGLYETRIDLSQLGGDGGPAPEAAAKGGGGGTLNLEDEYRLYETSAEPEVSPGSTWLSDFPQAWAETGGMGLAVRQAPLIIPLKATSTPVSIKQYPMSQEAKLGIKPHIQRLLDQGILVPCQSPWNTPLLPVKKPGTNDYRPVQDLREVNKRVEDIHPTVPNPYNLLSGLPPSHRWYTVLDLKDAFFCLRLHPTSQPLFAFEWRDPGMGISGQLTWTRLPQGFKNSPTLFNEALHRDLADFRIQHPDLILLQYVDDILLAATSELDCQQGTRALLLTLGNLGYRASAKKAQLCQKQVKYLGYLLKEGQRWLTEARKETVMGQPTPKTPRQLREFLGKAGFCRLFIPGFAEMAAPLYPLTKPGTLFNWGPDQQKAYQEIKQALLTAPALGLPDLTKPFELFVDEKQGYAKGVLTQKLGPWRRPVAYLSKKLDPVAAGWPPCLRMVAAIAVLRKDAGKLTMGQPLVILAPHAVEALVKQPPDRWLSNARMTHYQAMLLDTDRVQFGPVVALNPATLLPLPEEGAPHDCLEILAETHGTRPDLTDQPIPDADHTWYTDGSSFLQEGQRKAGAAVTTETEVIWARALPAGTSAQRAELIALTQALKMAEGKRLNVYTDSRYAFATAHIHGEIYRRRGWLTSEGREIKNKSEILALLKALFLPKRLSIIHCLGHQKGDSAEARGNRLADQAAREAAIKTPPDTSTLLAGKRTADGSEFEKRTADGSEFESPKKKAKVE

SEQ ID NO: 1865 - protein, 2105 aa, synthetic construct
MPAAKRVKLDGGDKKYSIGLDIGTNSVGWAVITDEYKVPSKKFKVLGNTDRHSIKKNLIGALLFDSGETAEATRLKRTARRRYTRRKNRICYLQEIFSNEMAKVDDSFFHRLEESFLVEEDKKHERHPIFGNIVDEVAYHEKYPTIYHLRKKLVDSTDKADLRLIYLALAHMIKFRGHFLIEGDLNPDNSDVDKLFIQLVQTYNQLFEENPINASGVDAKAILSARLSKSRRLENLIAQLPGEKKNGLFGNLIALSLGLTPNFKSNFDLAEDAKLQLSKDTYDDDLDNLLAQIGDQYADLFLAAKNLSDAILLSDILRVNTEITKAPLSASMIKRYDEHHQDLTLLKALVRQQLPEKYKEIFFDQSKNGYAGYIDGGASQEEFYKFIKPILEKMDGTEELLVKLNREDLLRKQRTFDNGSIPHQIHLGELHAILRRQEDFYPFLKDNREKIEKILTFRIPYYVGPLARGNSRFAWMTRKSEETITPWNFEEVVDKGASAQSFIERMTNFDKNLPNEKVLPKHSLLYEYFTVYNELTKVKYVTEGMRKPAFLSGEQKKAIVDLLFKTNRKVTVKQLKEDYFKKIECFDSVEISGVEDRFNASLGTYHDLLKIIKDKDFLDNEENEDILEDIVLTLTLFEDREMIEERLKTYAHLFDDKVMKQLKRRRYTGWGRLSRKLINGIRDKQSGKTILDFLKSDGFANRNFMQLIHDDSLTFKEDIQKAQVSGQGDSLHEHIANLAGSPAIKKGILQTVKVVDELVKVMGRHKPENIVIEMARENQTTQKGQKNSRERMKRIEEGIKELGSQILKEHPVENTQLQNEKLYLYYLQNGRDMYVDQELDINRLSDYDVDHIVPQSFLKDDSIDNKVLTRSDKARGKSDNVPSEEVVKKMKNYWRQLLNAKLITQRKFDNLTKAERGGLSELDKAGFIKRQLVETRQITKHVAQILDSRMNTKYDENDKLIREVKVITLKSKLVSDFRKDFQFYKVREINNYHHAHDAYLNAVVGTALIKKYPKLESEFVYGDYKVYDVRKMIAKSEQEIGKATAKYFFYSNIMNFFKTEITLANGEIRKRPLIETNGETGEIVWDKGRDFATVRKVLSMPQVNIVKKTEVQTGGFSKESILPKRNSDKLIARKKDWDPKKYGGFDSPTVAYSVLVVAKVEKGKSKKLKSVKELLGITIMERSSFEKNPIDFLEAKGYKEVKKDLIIKLPKYSLFELENGRKRMLASAGELQKGNELALPSKYVNFLYLASHYEKLKGSPEDNEQKQLFVEQHKHYLDEIIEQISEFSKRVILADANLDKVLSAYNKHRDKPIREQAENIIHLFTLTNLGAPAAFKYFDTTIDRKRYTSTKEVLDATLIHQSITGLYETRIDLSQLGGDGGEAAAKEAAAKEAAAKEAAAKGGTLNLEDEYRLYETSAEPEVSPGSTWLSDFPQAWAETGGMGLAVRQAPLIIPLKATSTPVSIKQYPMSQEAKLGIKPHIQRLLDQGILVPCQSPWNTPLLPVKKPGTNDYRPVQDLREVNKRVEDIHPTVPNPYNLLSGLPPSHRWYTVLDLKDAFFCLRLHPTSQPLFAFEWRDPGMGISGQLTWTRLPQGFKNSPTLFNEALHRDLADFRIQHPDLILLQYVDDILLAATSELDCQQGTRALLLTLGNLGYRASAKKAQLCQKQVKYLGYLLKEGQRWLTEARKETVMGQPTPKTPRQLREFLGKAGFCRLFIPGFAEMAAPLYPLTKPGTLFNWGPDQQKAYQEIKQALLTAPALGLPDLTKPFELFVDEKQGYAKGVLTQKLGPWRRPVAYLSKKLDPVAAGWPPCLRMVAAIAVLRKDAGKLTMGQPLVILAPHAVEALVKQPPDRWLSNARMTHYQAMLLDTDRVQFGPVVALNPATLLPLPEEGAPHDCLEILAETHGTRPDLTDQPIPDADHTWYTDGSSFLQEGQRKAGAAVTTETEVIWARALPAGTSAQRAELIALTQALKMAEGKRLNVYTDSRYAFATAHIHGEIYRRRGWLTSEGREIKNKSEILALLKALFLPKRLSIIHCLGHQKGDSAEARGNRLADQAAREAAIKTPPDTSTLLAGKRTADGSEFEKRTADGSEFESPKKKAKVE

SEQ ID NO: 1866 - skipped

SEQ ID NO: 1867 - protein, 2096 aa, synthetic construct
MPAAKRVKLDGGDKKYSIGLDIGTNSVGWAVITDEYKVPSKKFKVLGNTDRHSIKKNLIGALLFDSGETAEATRLKRTARRRYTRRKNRICYLQEIFSNEMAKVDDSFFHRLEESFLVEEDKKHERHPIFGNIVDEVAYHEKYPTIYHLRKKLVDSTDKADLRLIYLALAHMIKFRGHFLIEGDLNPDNSDVDKLFIQLVQTYNQLFEENPINASGVDAKAILSARLSKSRRLENLIAQLPGEKKNGLFGNLIALSLGLTPNFKSNFDLAEDAKLQLSKDTYDDDLDNLLAQIGDQYADLFLAAKNLSDAILLSDILRVNTEITKAPLSASMIKRYDEHHQDLTLLKALVRQQLPEKYKEIFFDQSKNGYAGYIDGGASQEEFYKFIKPILEKMDGTEELLVKLNREDLLRKQRTFDNGSIPHQIHLGELHAILRRQEDFYPFLKDNREKIEKILTFRIPYYVGPLARGNSRFAWMTRKSEETITPWNFEEVVDKGASAQSFIERMTNFDKNLPNEKVLPKHSLLYEYFTVYNELTKVKYVTEGMRKPAFLSGEQKKAIVDLLFKTNRKVTVKQLKEDYFKKIECFDSVEISGVEDRFNASLGTYHDLLKIIKDKDFLDNEENEDILEDIVLTLTLFEDREMIEERLKTYAHLFDDKVMKQLKRRRYTGWGRLSRKLINGIRDKQSGKTILDFLKSDGFANRNFMQLIHDDSLTFKEDIQKAQVSGQGDSLHEHIANLAGSPAIKKGILQTVKVVDELVKVMGRHKPENIVIEMARENQTTQKGQKNSRERMKRIEEGIKELGSQILKEHPVENTQLQNEKLYLYYLQNGRDMYVDQELDINRLSDYDVDHIVPQSFLKDDSIDNKVLTRSDKARGKSDNVPSEEVVKKMKNYWRQLLNAKLITQRKFDNLTKAERGGLSELDKAGFIKRQLVETRQITKHVAQILDSRMNTKYDENDKLIREVKVITLKSKLVSDFRKDFQFYKVREINNYHHAHDAYLNAVVGTALIKKYPKLESEFVYGDYKVYDVRKMIAKSEQEIGKATAKYFFYSNIMNFFKTEITLANGEIRKRPLIETNGETGEIVWDKGRDFATVRKVLSMPQVNIVKKTEVQTGGFSKESILPKRNSDKLIARKKDWDPKKYGGFDSPTVAYSVLVVAKVEKGKSKKLKSVKELLGITIMERSSFEKNPIDFLEAKGYKEVKKDLIIKLPKYSLFELENGRKRMLASAGELQKGNELALPSKYVNFLYLASHYEKLKGSPEDNEQKQLFVEQHKHYLDEIIEQISEFSKRVILADANLDKVLSAYNKHRDKPIREQAENIIHLFTLTNLGAPAAFKYFDTTIDRKRYTSTKEVLDATLIHQSITGLYETRIDLSQLGGDGGEAAAKGGGPAPGGTLNLEDEYRLYETSAEPEVSPGSTWLSDFPQAWAETGGMGLAVRQAPLIIPLKATSTPVSIKQYPMSQEAKLGIKPHIQRLLDQGILVPCQSPWNTPLLPVKKPGTNDYRPVQDLREVNKRVEDIHPTVPNPYNLLSGLPPSHRWYTVLDLKDAFFCLRLHPTSQPLFAFEWRDPGMGISGQLTWTRLPQGFKNSPTLFNEALHRDLADFRIQHPDLILLQYVDDILLAATSELDCQQGTRALLLTLGNLGYRASAKKAQLCQKQVKYLGYLLKEGQRWLTEARKETVMGQPTPKTPRQLREFLGKAGFCRLFIPGFAEMAAPLYPLTKPGTLFNWGPDQQKAYQEIKQALLTAPALGLPDLTKPFELFVDEKQGYAKGVLTQKLGPWRRPVAYLSKKLDPVAAGWPPCLRMVAAIAVLRKDAGKLTMGQPLVILAPHAVEALVKQPPDRWLSNARMTHYQAMLLDTDRVQFGPVVALNPATLLPLPEEGAPHDCLEILAETHGTRPDLTDQPIPDADHTWYTDGSSFLQEGQRKAGAAVTTETEVIWARALPAGTSAQRAELIALTQALKMAEGKRLNVYTDSRYAFATAHIHGEIYRRRGWLTSEGREIKNKSEILALLKALFLPKRLSIIHCLGHQKGDSAEARGNRLADQAAREAAIKTPPDTSTLLAGKRTADGSEFEKRTADGSEFESPKKKAKVE

SEQ ID NO: 1868 - protein, 2090 aa, synthetic construct
MPAAKRVKLDGGDKKYSIGLDIGTNSVGWAVITDEYKVPSKKFKVLGNTDRHSIKKNLIGALLFDSGETAEATRLKRTARRRYTRRKNRICYLQEIFSNEMAKVDDSFFHRLEESFLVEEDKKHERHPIFGNIVDEVAYHEKYPTIYHLRKKLVDSTDKADLRLIYLALAHMIKFRGHFLIEGDLNPDNSDVDKLFIQLVQTYNQLFEENPINASGVDAKAILSARLSKSRRLENLIAQLPGEKKNGLFGNLIALSLGLTPNFKSNFDLAEDAKLQLSKDTYDDDLDNLLAQIGDQYADLFLAAKNLSDAILLSDILRVNTEITKAPLSASMIKRYDEHHQDLTLLKALVRQQLPEKYKEIFFDQSKNGYAGYIDGGASQEEFYKFIKPILEKMDGTEELLVKLNREDLLRKQRTFDNGSIPHQIHLGELHAILRRQEDFYPFLKDNREKIEKILTFRIPYYVGPLARGNSRFAWMTRKSEETITPWNFEEVVDKGASAQSFIERMTNFDKNLPNEKVLPKHSLLYEYFTVYNELTKVKYVTEGMRKPAFLSGEQKKAIVDLLFKTNRKVTVKQLKEDYFKKIECFDSVEISGVEDRFNASLGTYHDLLKIIKDKDFLDNEENEDILEDIVLTLTLFEDREMIEERLKTYAHLFDDKVMKQLKRRRYTGWGRLSRKLINGIRDKQSGKTILDFLKSDGFANRNFMQLIHDDSLTFKEDIQKAQVSGQGDSLHEHIANLAGSPAIKKGILQTVKVVDELVKVMGRHKPENIVIEMARENQTTQKGQKNSRERMKRIEEGIKELGSQILKEHPVENTQLQNEKLYLYYLQNGRDMYVDQELDINRLSDYDVDHIVPQSFLKDDSIDNKVLTRSDKARGKSDNVPSEEVVKKMKNYWRQLLNAKLITQRKFDNLTKAERGGLSELDKAGFIKRQLVETRQITKHVAQILDSRMNTKYDENDKLIREVKVITLKSKLVSDFRKDFQFYKVREINNYHHAHDAYLNAVVGTALIKKYPKLESEFVYGDYKVYDVRKMIAKSEQEIGKATAKYFFYSNIMNFFKTEITLANGEIRKRPLIETNGETGEIVWDKGRDFATVRKVLSMPQVNIVKKTEVQTGGFSKESILPKRNSDKLIARKKDWDPKKYGGFDSPTVAYSVLVVAKVEKGKSKKLKSVKELLGITIMERSSFEKNPIDFLEAKGYKEVKKDLIIKLPKYSLFELENGRKRMLASAGELQKGNELALPSKYVNFLYLASHYEKLKGSPEDNEQKQLFVEQHKHYLDEIIEQISEFSKRVILADANLDKVLSAYNKHRDKPIREQAENIIHLFTLTNLGAPAAFKYFDTTIDRKRYTSTKEVLDATLIHQSITGLYETRIDLSQLGGDGGEAAAKGGTLNLEDEYRLYETSAEPEVSPGSTWLSDFPQAWAETGGMGLAVRQAPLIIPLKATSTPVSIKQYPMSQEAKLGIKPHIQRLLDQGILVPCQSPWNTPLLPVKKPGTNDYRPVQDLREVNKRVEDIHPTVPNPYNLLSGLPPSHRWYTVLDLKDAFFCLRLHPTSQPLFAFEWRDPGMGISGQLTWTRLPQGFKNSPTLFNEALHRDLADFRIQHPDLILLQYVDDILLAATSELDCQQGTRALLLTLGNLGYRASAKKAQLCQKQVKYLGYLLKEGQRWLTEARKETVMGQPTPKTPRQLREFLGKAGFCRLFIPGFAEMAAPLYPLTKPGTLFNWGPDQQKAYQEIKQALLTAPALGLPDLTKPFELFVDEKQGYAKGVLTQKLGPWRRPVAYLSKKLDPVAAGWPPCLRMVAAIAVLRKDAGKLTMGQPLVILAPHAVEALVKQPPDRWLSNARMTHYQAMLLDTDRVQFGPVVALNPATLLPLPEEGAPHDCLEILAETHGTRPDLTDQPIPDADHTWYTDGSSFLQEGQRKAGAAVTTETEVIWARALPAGTSAQRAELIALTQALKMAEGKRLNVYTDSRYAFATAHIHGEIYRRRGWLTSEGREIKNKSEILALLKALFLPKRLSIIHCLGHQKGDSAEARGNRLADQAAREAAIKTPPDTSTLLAGKRTADGSEFEKRTADGSEFESPKKKAKVE

SEQ ID NO: 1869 - skipped

SEQ ID NO: 1870 - protein, 2097 aa, synthetic construct
MPAAKRVKLDGGDKKYSIGLDIGTNSVGWAVITDEYKVPSKKFKVLGNTDRHSIKKNLIGALLFDSGETAEATRLKRTARRRYTRRKNRICYLQEIFSNEMAKVDDSFFHRLEESFLVEEDKKHERHPIFGNIVDEVAYHEKYPTIYHLRKKLVDSTDKADLRLIYLALAHMIKFRGHFLIEGDLNPDNSDVDKLFIQLVQTYNQLFEENPINASGVDAKAILSARLSKSRRLENLIAQLPGEKKNGLFGNLIALSLGLTPNFKSNFDLAEDAKLQLSKDTYDDDLDNLLAQIGDQYADLFLAAKNLSDAILLSDILRVNTEITKAPLSASMIKRYDEHHQDLTLLKALVRQQLPEKYKEIFFDQSKNGYAGYIDGGASQEEFYKFIKPILEKMDGTEELLVKLNREDLLRKQRTFDNGSIPHQIHLGELHAILRRQEDFYPFLKDNREKIEKILTFRIPYYVGPLARGNSRFAWMTRKSEETITPWNFEEVVDKGASAQSFIERMTNFDKNLPNEKVLPKHSLLYEYFTVYNELTKVKYVTEGMRKPAFLSGEQKKAIVDLLFKTNRKVTVKQLKEDYFKKIECFDSVEISGVEDRFNASLGTYHDLLKIIKDKDFLDNEENEDILEDIVLTLTLFEDREMIEERLKTYAHLFDDKVMKQLKRRRYTGWGRLSRKLINGIRDKQSGKTILDFLKSDGFANRNFMQLIHDDSLTFKEDIQKAQVSGQGDSLHEHIANLAGSPAIKKGILQTVKVVDELVKVMGRHKPENIVIEMARENQTTQKGQKNSRERMKRIEEGIKELGSQILKEHPVENTQLQNEKLYLYYLQNGRDMYVDQELDINRLSDYDVDHIVPQSFLKDDSIDNKVLTRSDKARGKSDNVPSEEVVKKMKNYWRQLLNAKLITQRKFDNLTKAERGGLSELDKAGFIKRQLVETRQITKHVAQILDSRMNTKYDENDKLIREVKVITLKSKLVSDFRKDFQFYKVREINNYHHAHDAYLNAVVGTALIKKYPKLESEFVYGDYKVYDVRKMIAKSEQEIGKATAKYFFYSNIMNFFKTEITLANGEIRKRPLIETNGETGEIVWDKGRDFATVRKVLSMPQVNIVKKTEVQTGGFSKESILPKRNSDKLIARKKDWDPKKYGGFDSPTVAYSVLVVAKVEKGKSKKLKSVKELLGITIMERSSFEKNPIDFLEAKGYKEVKKDLIIKLPKYSLFELENGRKRMLASAGELQKGNELALPSKYVNFLYLASHYEKLKGSPEDNEQKQLFVEQHKHYLDEIIEQISEFSKRVILADANLDKVLSAYNKHRDKPIREQAENIIHLFTLTNLGAPAAFKYFDTTIDRKRYTSTKEVLDATLIHQSITGLYETRIDLSQLGGDGGGSAGSAAGSGEFGGTLNLEDEYRLYETSAEPEVSPGSTWLSDFPQAWAETGGMGLAVRQAPLIIPLKATSTPVSIKQYPMSQEAKLGIKPHIQRLLDQGILVPCQSPWNTPLLPVKKPGTNDYRPVQDLREVNKRVEDIHPTVPNPYNLLSGLPPSHRWYTVLDLKDAFFCLRLHPTSQPLFAFEWRDPGMGISGQLTWTRLPQGFKNSPTLFNEALHRDLADFRIQHPDLILLQYVDDILLAATSELDCQQGTRALLLTLGNLGYRASAKKAQLCQKQVKYLGYLLKEGQRWLTEARKETVMGQPTPKTPRQLREFLGKAGFCRLFIPGFAEMAAPLYPLTKPGTLFNWGPDQQKAYQEIKQALLTAPALGLPDLTKPFELFVDEKQGYAKGVLTQKLGPWRRPVAYLSKKLDPVAAGWPPCLRMVAAIAVLRKDAGKLTMGQPLVILAPHAVEALVKQPPDRWLSNARMTHYQAMLLDTDRVQFGPVVALNPATLLPLPEEGAPHDCLEILAETHGTRPDLTDQPIPDADHTWYTDGSSFLQEGQRKAGAAVTTETEVIWARALPAGTSAQRAELIALTQALKMAEGKRLNVYTDSRYAFATAHIHGEIYRRRGWLTSEGREIKNKSEILALLKALFLPKRLSIIHCLGHQKGDSAEARGNRLADQAAREAAIKTPPDTSTLLAGKRTADGSEFEKRTADGSEFESPKKKAKVE

SEQ ID NO: 1871 - protein, 2096 aa, synthetic construct
MPAAKRVKLDGGDKKYSIGLDIGTNSVGWAVITDEYKVPSKKFKVLGNTDRHSIKKNLIGALLFDSGETAEATRLKRTARRRYTRRKNRICYLQEIFSNEMAKVDDSFFHRLEESFLVEEDKKHERHPIFGNIVDEVAYHEKYPTIYHLRKKLVDSTDKADLRLIYLALAHMIKFRGHFLIEGDLNPDNSDVDKLFIQLVQTYNQLFEENPINASGVDAKAILSARLSKSRRLENLIAQLPGEKKNGLFGNLIALSLGLTPNFKSNFDLAEDAKLQLSKDTYDDDLDNLLAQIGDQYADLFLAAKNLSDAILLSDILRVNTEITKAPLSASMIKRYDEHHQDLTLLKALVRQQLPEKYKEIFFDQSKNGYAGYIDGGASQEEFYKFIKPILEKMDGTEELLVKLNREDLLRKQRTFDNGSIPHQIHLGELHAILRRQEDFYPFLKDNREKIEKILTFRIPYYVGPLARGNSRFAWMTRKSEETITPWNFEEVVDKGASAQSFIERMTNFDKNLPNEKVLPKHSLLYEYFTVYNELTKVKYVTEGMRKPAFLSGEQKKAIVDLLFKTNRKVTVKQLKEDYFKKIECFDSVEISGVEDRFNASLGTYHDLLKIIKDKDFLDNEENEDILEDIVLTLTLFEDREMIEERLKTYAHLFDDKVMKQLKRRRYTGWGRLSRKLINGIRDKQSGKTILDFLKSDGFANRNFMQLIHDDSLTFKEDIQKAQVSGQGDSLHEHIANLAGSPAIKKGILQTVKVVDELVKVMGRHKPENIVIEMARENQTTQKGQKNSRERMKRIEEGIKELGSQILKEHPVENTQLQNEKLYLYYLQNGRDMYVDQELDINRLSDYDVDHIVPQSFLKDDSIDNKVLTRSDKARGKSDNVPSEEVVKKMKNYWRQLLNAKLITQRKFDNLTKAERGGLSELDKAGFIKRQLVETRQITKHVAQILDSRMNTKYDENDKLIREVKVITLKSKLVSDFRKDFQFYKVREINNYHHAHDAYLNAVVGTALIKKYPKLESEFVYGDYKVYDVRKMIAKSEQEIGKATAKYFFYSNIMNFFKTEITLANGEIRKRPLIETNGETGEIVWDKGRDFATVRKVLSMPQVNIVKKTEVQTGGFSKESILPKRNSDKLIARKKDWDPKKYGGFDSPTVAYSVLVVAKVEKGKSKKLKSVKELLGITIMERSSFEKNPIDFLEAKGYKEVKKDLIIKLPKYSLFELENGRKRMLASAGELQKGNELALPSKYVNFLYLASHYEKLKGSPEDNEQKQLFVEQHKHYLDEIIEQISEFSKRVILADANLDKVLSAYNKHRDKPIREQAENIIHLFTLTNLGAPAAFKYFDTTIDRKRYTSTKEVLDATLIHQSITGLYETRIDLSQLGGDGGEAAAKPAPGGSGGTLNLEDEYRLYETSAEPEVSPGSTWLSDFPQAWAETGGMGLAVRQAPLIIPLKATSTPVSIKQYPMSQEAKLGIKPHIQRLLDQGILVPCQSPWNTPLLPVKKPGTNDYRPVQDLREVNKRVEDIHPTVPNPYNLLSGLPPSHRWYTVLDLKDAFFCLRLHPTSQPLFAFEWRDPGMGISGQLTWTRLPQGFKNSPTLFNEALHRDLADFRIQHPDLILLQYVDDILLAATSELDCQQGTRALLLTLGNLGYRASAKKAQLCQKQVKYLGYLLKEGQRWLTEARKETVMGQPTPKTPRQLREFLGKAGFCRLFIPGFAEMAAPLYPLTKPGTLFNWGPDQQKAYQEIKQALLTAPALGLPDLTKPFELFVDEKQGYAKGVLTQKLGPWRRPVAYLSKKLDPVAAGWPPCLRMVAAIAVLRKDAGKLTMGQPLVILAPHAVEALVKQPPDRWLSNARMTHYQAMLLDTDRVQFGPVVALNPATLLPLPEEGAPHDCLEILAETHGTRPDLTDQPIPDADHTWYTDGSSFLQEGQRKAGAAVTTETEVIWARALPAGTSAQRAELIALTQALKMAEGKRLNVYTDSRYAFATAHIHGEIYRRRGWLTSEGREIKNKSEILALLKALFLPKRLSIIHCLGHQKGDSAEARGNRLADQAAREAAIKTPPDTSTLLAGKRTADGSEFEKRTADGSEFESPKKKAKVE

SEQ ID NO: 1872-1873 - skipped (2 entries)

SEQ ID NO: 1874 - protein, 2094 aa, synthetic construct
MPAAKRVKLDGGDKKYSIGLDIGTNSVGWAVITDEYKVPSKKFKVLGNTDRHSIKKNLIGALLFDSGETAEATRLKRTARRRYTRRKNRICYLQEIFSNEMAKVDDSFFHRLEESFLVEEDKKHERHPIFGNIVDEVAYHEKYPTIYHLRKKLVDSTDKADLRLIYLALAHMIKFRGHFLIEGDLNPDNSDVDKLFIQLVQTYNQLFEENPINASGVDAKAILSARLSKSRRLENLIAQLPGEKKNGLFGNLIALSLGLTPNFKSNFDLAEDAKLQLSKDTYDDDLDNLLAQIGDQYADLFLAAKNLSDAILLSDILRVNTEITKAPLSASMIKRYDEHHQDLTLLKALVRQQLPEKYKEIFFDQSKNGYAGYIDGGASQEEFYKFIKPILEKMDGTEELLVKLNREDLLRKQRTFDNGSIPHQIHLGELHAILRRQEDFYPFLKDNREKIEKILTFRIPYYVGPLARGNSRFAWMTRKSEETITPWNFEEVVDKGASAQSFIERMTNFDKNLPNEKVLPKHSLLYEYFTVYNELTKVKYVTEGMRKPAFLSGEQKKAIVDLLFKTNRKVTVKQLKEDYFKKIECFDSVEISGVEDRFNASLGTYHDLLKIIKDKDFLDNEENEDILEDIVLTLTLFEDREMIEERLKTYAHLFDDKVMKQLKRRRYTGWGRLSRKLINGIRDKQSGKTILDFLKSDGFANRNFMQLIHDDSLTFKEDIQKAQVSGQGDSLHEHIANLAGSPAIKKGILQTVKVVDELVKVMGRHKPENIVIEMARENQTTQKGQKNSRERMKRIEEGIKELGSQILKEHPVENTQLQNEKLYLYYLQNGRDMYVDQELDINRLSDYDVDHIVPQSFLKDDSIDNKVLTRSDKARGKSDNVPSEEVVKKMKNYWRQLLNAKLITQRKFDNLTKAERGGLSELDKAGFIKRQLVETRQITKHVAQILDSRMNTKYDENDKLIREVKVITLKSKLVSDFRKDFQFYKVREINNYHHAHDAYLNAVVGTALIKKYPKLESEFVYGDYKVYDVRKMIAKSEQEIGKATAKYFFYSNIMNFFKTEITLANGEIRKRPLIETNGETGEIVWDKGRDFATVRKVLSMPQVNIVKKTEVQTGGFSKESILPKRNSDKLIARKKDWDPKKYGGFDSPTVAYSVLVVAKVEKGKSKKLKSVKELLGITIMERSSFEKNPIDFLEAKGYKEVKKDLIIKLPKYSLFELENGRKRMLASAGELQKGNELALPSKYVNFLYLASHYEKLKGSPEDNEQKQLFVEQHKHYLDEIIEQISEFSKRVILADANLDKVLSAYNKHRDKPIREQAENIIHLFTLTNLGAPAAFKYFDTTIDRKRYTSTKEVLDATLIHQSITGLYETRIDLSQLGGDGGGSSPAPGGGGGTLNLEDEYRLYETSAEPEVSPGSTWLSDFPQAWAETGGMGLAVRQAPLIIPLKATSTPVSIKQYPMSQEAKLGIKPHIQRLLDQGILVPCQSPWNTPLLPVKKPGTNDYRPVQDLREVNKRVEDIHPTVPNPYNLLSGLPPSHRWYTVLDLKDAFFCLRLHPTSQPLFAFEWRDPGMGISGQLTWTRLPQGFKNSPTLFNEALHRDLADFRIQHPDLILLQYVDDILLAATSELDCQQGTRALLLTLGNLGYRASAKKAQLCQKQVKYLGYLLKEGQRWLTEARKETVMGQPTPKTPRQLREFLGKAGFCRLFIPGFAEMAAPLYPLTKPGTLFNWGPDQQKAYQEIKQALLTAPALGLPDLTKPFELFVDEKQGYAKGVLTQKLGPWRRPVAYLSKKLDPVAAGWPPCLRMVAAIAVLRKDAGKLTMGQPLVILAPHAVEALVKQPPDRWLSNARMTHYQAMLLDTDRVQFGPVVALNPATLLPLPEEGAPHDCLEILAETHGTRPDLTDQPIPDADHTWYTDGSSFLQEGQRKAGAAVTTETEVIWARALPAGTSAQRAELIALTQALKMAEGKRLNVYTDSRYAFATAHIHGEIYRRRGWLTSEGREIKNKSEILALLKALFLPKRLSIIHCLGHQKGDSAEARGNRLADQAAREAAIKTPPDTSTLLAGKRTADGSEFEKRTADGSEFESPKKKAKVE

SEQ ID NO: 1875 - protein, 2096 aa, synthetic construct
MPAAKRVKLDGGDKKYSIGLDIGTNSVGWAVITDEYKVPSKKFKVLGNTDRHSIKKNLIGALLFDSGETAEATRLKRTARRRYTRRKNRICYLQEIFSNEMAKVDDSFFHRLEESFLVEEDKKHERHPIFGNIVDEVAYHEKYPTIYHLRKKLVDSTDKADLRLIYLALAHMIKFRGHFLIEGDLNPDNSDVDKLFIQLVQTYNQLFEENPINASGVDAKAILSARLSKSRRLENLIAQLPGEKKNGLFGNLIALSLGLTPNFKSNFDLAEDAKLQLSKDTYDDDLDNLLAQIGDQYADLFLAAKNLSDAILLSDILRVNTEITKAPLSASMIKRYDEHHQDLTLLKALVRQQLPEKYKEIFFDQSKNGYAGYIDGGASQEEFYKFIKPILEKMDGTEELLVKLNREDLLRKQRTFDNGSIPHQIHLGELHAILRRQEDFYPFLKDNREKIEKILTFRIPYYVGPLARGNSRFAWMTRKSEETITPWNFEEVVDKGASAQSFIERMTNFDKNLPNEKVLPKHSLLYEYFTVYNELTKVKYVTEGMRKPAFLSGEQKKAIVDLLFKTNRKVTVKQLKEDYFKKIECFDSVEISGVEDRFNASLGTYHDLLKIIKDKDFLDNEENEDILEDIVLTLTLFEDREMIEERLKTYAHLFDDKVMKQLKRRRYTGWGRLSRKLINGIRDKQSGKTILDFLKSDGFANRNFMQLIHDDSLTFKEDIQKAQVSGQGDSLHEHIANLAGSPAIKKGILQTVKVVDELVKVMGRHKPENIVIEMARENQTTQKGQKNSRERMKRIEEGIKELGSQILKEHPVENTQLQNEKLYLYYLQNGRDMYVDQELDINRLSDYDVDHIVPQSFLKDDSIDNKVLTRSDKARGKSDNVPSEEVVKKMKNYWRQLLNAKLITQRKFDNLTKAERGGLSELDKAGFIKRQLVETRQITKHVAQILDSRMNTKYDENDKLIREVKVITLKSKLVSDFRKDFQFYKVREINNYHHAHDAYLNAVVGTALIKKYPKLESEFVYGDYKVYDVRKMIAKSEQEIGKATAKYFFYSNIMNFFKTEITLANGEIRKRPLIETNGETGEIVWDKGRDFATVRKVLSMPQVNIVKKTEVQTGGFSKESILPKRNSDKLIARKKDWDPKKYGGFDSPTVAYSVLVVAKVEKGKSKKLKSVKELLGITIMERSSFEKNPIDFLEAKGYKEVKKDLIIKLPKYSLFELENGRKRMLASAGELQKGNELALPSKYVNFLYLASHYEKLKGSPEDNEQKQLFVEQHKHYLDEIIEQISEFSKRVILADANLDKVLSAYNKHRDKPIREQAENIIHLFTLTNLGAPAAFKYFDTTIDRKRYTSTKEVLDATLIHQSITGLYETRIDLSQLGGDGGGSSGGGEAAAKGGTLNLEDEYRLYETSAEPEVSPGSTWLSDFPQAWAETGGMGLAVRQAPLIIPLKATSTPVSIKQYPMSQEAKLGIKPHIQRLLDQGILVPCQSPWNTPLLPVKKPGTNDYRPVQDLREVNKRVEDIHPTVPNPYNLLSGLPPSHRWYTVLDLKDAFFCLRLHPTSQPLFAFEWRDPGMGISGQLTWTRLPQGFKNSPTLFNEALHRDLADFRIQHPDLILLQYVDDILLAATSELDCQQGTRALLLTLGNLGYRASAKKAQLCQKQVKYLGYLLKEGQRWLTEARKETVMGQPTPKTPRQLREFLGKAGFCRLFIPGFAEMAAPLYPLTKPGTLFNWGPDQQKAYQEIKQALLTAPALGLPDLTKPFELFVDEKQGYAKGVLTQKLGPWRRPVAYLSKKLDPVAAGWPPCLRMVAAIAVLRKDAGKLTMGQPLVILAPHAVEALVKQPPDRWLSNARMTHYQAMLLDTDRVQFGPVVALNPATLLPLPEEGAPHDCLEILAETHGTRPDLTDQPIPDADHTWYTDGSSFLQEGQRKAGAAVTTETEVIWARALPAGTSAQRAELIALTQALKMAEGKRLNVYTDSRYAFATAHIHGEIYRRRGWLTSEGREIKNKSEILALLKALFLPKRLSIIHCLGHQKGDSAEARGNRLADQAAREAAIKTPPDTSTLLAGKRTADGSEFEKRTADGSEFESPKKKAKVE

SEQ ID NO: 1876 - protein, 2105 aa, synthetic construct
MPAAKRVKLDGGDKKYSIGLDIGTNSVGWAVITDEYKVPSKKFKVLGNTDRHSIKKNLIGALLFDSGETAEATRLKRTARRRYTRRKNRICYLQEIFSNEMAKVDDSFFHRLEESFLVEEDKKHERHPIFGNIVDEVAYHEKYPTIYHLRKKLVDSTDKADLRLIYLALAHMIKFRGHFLIEGDLNPDNSDVDKLFIQLVQTYNQLFEENPINASGVDAKAILSARLSKSRRLENLIAQLPGEKKNGLFGNLIALSLGLTPNFKSNFDLAEDAKLQLSKDTYDDDLDNLLAQIGDQYADLFLAAKNLSDAILLSDILRVNTEITKAPLSASMIKRYDEHHQDLTLLKALVRQQLPEKYKEIFFDQSKNGYAGYIDGGASQEEFYKFIKPILEKMDGTEELLVKLNREDLLRKQRTFDNGSIPHQIHLGELHAILRRQEDFYPFLKDNREKIEKILTFRIPYYVGPLARGNSRFAWMTRKSEETITPWNFEEVVDKGASAQSFIERMTNFDKNLPNEKVLPKHSLLYEYFTVYNELTKVKYVTEGMRKPAFLSGEQKKAIVDLLFKTNRKVTVKQLKEDYFKKIECFDSVEISGVEDRFNASLGTYHDLLKIIKDKDFLDNEENEDILEDIVLTLTLFEDREMIEERLKTYAHLFDDKVMKQLKRRRYTGWGRLSRKLINGIRDKQSGKTILDFLKSDGFANRNFMQLIHDDSLTFKEDIQKAQVSGQGDSLHEHIANLAGSPAIKKGILQTVKVVDELVKVMGRHKPENIVIEMARENQTTQKGQKNSRERMKRIEEGIKELGSQILKEHPVENTQLQNEKLYLYYLQNGRDMYVDQELDINRLSDYDVDHIVPQSFLKDDSIDNKVLTRSDKARGKSDNVPSEEVVKKMKNYWRQLLNAKLITQRKFDNLTKAERGGLSELDKAGFIKRQLVETRQITKHVAQILDSRMNTKYDENDKLIREVKVITLKSKLVSDFRKDFQFYKVREINNYHHAHDAYLNAVVGTALIKKYPKLESEFVYGDYKVYDVRKMIAKSEQEIGKATAKYFFYSNIMNFFKTEITLANGEIRKRPLIETNGETGEIVWDKGRDFATVRKVLSMPQVNIVKKTEVQTGGFSKESILPKRNSDKLIARKKDWDPKKYGGFDSPTVAYSVLVVAKVEKGKSKKLKSVKELLGITIMERSSFEKNPIDFLEAKGYKEVKKDLIIKLPKYSLFELENGRKRMLASAGELQKGNELALPSKYVNFLYLASHYEKLKGSPEDNEQKQLFVEQHKHYLDEIIEQISEFSKRVILADANLDKVLSAYNKHRDKPIREQAENIIHLFTLTNLGAPAAFKYFDTTIDRKRYTSTKEVLDATLIHQSITGLYETRIDLSQLGGDGGGGGGSGGGGSGGGGSGGGGSGGTLNLEDEYRLYETSAEPEVSPGSTWLSDFPQAWAETGGMGLAVRQAPLIIPLKATSTPVSIKQYPMSQEAKLGIKPHIQRLLDQGILVPCQSPWNTPLLPVKKPGTNDYRPVQDLREVNKRVEDIHPTVPNPYNLLSGLPPSHRWYTVLDLKDAFFCLRLHPTSQPLFAFEWRDPGMGISGQLTWTRLPQGFKNSPTLFNEALHRDLADFRIQHPDLILLQYVDDILLAATSELDCQQGTRALLLTLGNLGYRASAKKAQLCQKQVKYLGYLLKEGQRWLTEARKETVMGQPTPKTPRQLREFLGKAGFCRLFIPGFAEMAAPLYPLTKPGTLFNWGPDQQKAYQEIKQALLTAPALGLPDLTKPFELFVDEKQGYAKGVLTQKLGPWRRPVAYLSKKLDPVAAGWPPCLRMVAAIAVLRKDAGKLTMGQPLVILAPHAVEALVKQPPDRWLSNARMTHYQAMLLDTDRVQFGPVVALNPATLLPLPEEGAPHDCLEILAETHGTRPDLTDQPIPDADHTWYTDGSSFLQEGQRKAGAAVTTETEVIWARALPAGTSAQRAELIALTQALKMAEGKRLNVYTDSRYAFATAHIHGEIYRRRGWLTSEGREIKNKSEILALLKALFLPKRLSIIHCLGHQKGDSAEARGNRLADQAAREAAIKTPPDTSTLLAGKRTADGSEFEKRTADGSEFESPKKKAKVE

SEQ ID NO: 1877 - protein, 2097 aa, synthetic construct
MPAAKRVKLDGGDKKYSIGLDIGTNSVGWAVITDEYKVPSKKFKVLGNTDRHSIKKNLIGALLFDSGETAEATRLKRTARRRYTRRKNRICYLQEIFSNEMAKVDDSFFHRLEESFLVEEDKKHERHPIFGNIVDEVAYHEKYPTIYHLRKKLVDSTDKADLRLIYLALAHMIKFRGHFLIEGDLNPDNSDVDKLFIQLVQTYNQLFEENPINASGVDAKAILSARLSKSRRLENLIAQLPGEKKNGLFGNLIALSLGLTPNFKSNFDLAEDAKLQLSKDTYDDDLDNLLAQIGDQYADLFLAAKNLSDAILLSDILRVNTEITKAPLSASMIKRYDEHHQDLTLLKALVRQQLPEKYKEIFFDQSKNGYAGYIDGGASQEEFYKFIKPILEKMDGTEELLVKLNREDLLRKQRTFDNGSIPHQIHLGELHAILRRQEDFYPFLKDNREKIEKILTFRIPYYVGPLARGNSRFAWMTRKSEETITPWNFEEVVDKGASAQSFIERMTNFDKNLPNEKVLPKHSLLYEYFTVYNELTKVKYVTEGMRKPAFLSGEQKKAIVDLLFKTNRKVTVKQLKEDYFKKIECFDSVEISGVEDRFNASLGTYHDLLKIIKDKDFLDNEENEDILEDIVLTLTLFEDREMIEERLKTYAHLFDDKVMKQLKRRRYTGWGRLSRKLINGIRDKQSGKTILDFLKSDGFANRNFMQLIHDDSLTFKEDIQKAQVSGQGDSLHEHIANLAGSPAIKKGILQTVKVVDELVKVMGRHKPENIVIEMARENQTTQKGQKNSRERMKRIEEGIKELGSQILKEHPVENTQLQNEKLYLYYLQNGRDMYVDQELDINRLSDYDVDHIVPQSFLKDDSIDNKVLTRSDKARGKSDNVPSEEVVKKMKNYWRQLLNAKLITQRKFDNLTKAERGGLSELDKAGFIKRQLVETRQITKHVAQILDSRMNTKYDENDKLIREVKVITLKSKLVSDFRKDFQFYKVREINNYHHAHDAYLNAVVGTALIKKYPKLESEFVYGDYKVYDVRKMIAKSEQEIGKATAKYFFYSNIMNFFKTEITLANGEIRKRPLIETNGETGEIVWDKGRDFATVRKVLSMPQVNIVKKTEVQTGGFSKESILPKRNSDKLIARKKDWDPKKYGGFDSPTVAYSVLVVAKVEKGKSKKLKSVKELLGITIMERSSFEKNPIDFLEAKGYKEVKKDLIIKLPKYSLFELENGRKRMLASAGELQKGNELALPSKYVNFLYLASHYEKLKGSPEDNEQKQLFVEQHKHYLDEIIEQISEFSKRVILADANLDKVLSAYNKHRDKPIREQAENIIHLFTLTNLGAPAAFKYFDTTIDRKRYTSTKEVLDATLIHQSITGLYETRIDLSQLGGDGGGSSGSSGSSGSSGGTLNLEDEYRLYETSAEPEVSPGSTWLSDFPQAWAETGGMGLAVRQAPLIIPLKATSTPVSIKQYPMSQEAKLGIKPHIQRLLDQGILVPCQSPWNTPLLPVKKPGTNDYRPVQDLREVNKRVEDIHPTVPNPYNLLSGLPPSHRWYTVLDLKDAFFCLRLHPTSQPLFAFEWRDPGMGISGQLTWTRLPQGFKNSPTLFNEALHRDLADFRIQHPDLILLQYVDDILLAATSELDCQQGTRALLLTLGNLGYRASAKKAQLCQKQVKYLGYLLKEGQRWLTEARKETVMGQPTPKTPRQLREFLGKAGFCRLFIPGFAEMAAPLYPLTKPGTLFNWGPDQQKAYQEIKQALLTAPALGLPDLTKPFELFVDEKQGYAKGVLTQKLGPWRRPVAYLSKKLDPVAAGWPPCLRMVAAIAVLRKDAGKLTMGQPLVILAPHAVEALVKQPPDRWLSNARMTHYQAMLLDTDRVQFGPVVALNPATLLPLPEEGAPHDCLEILAETHGTRPDLTDQPIPDADHTWYTDGSSFLQEGQRKAGAAVTTETEVIWARALPAGTSAQRAELIALTQALKMAEGKRLNVYTDSRYAFATAHIHGEIYRRRGWLTSEGREIKNKSEILALLKALFLPKRLSIIHCLGHQKGDSAEARGNRLADQAAREAAIKTPPDTSTLLAGKRTADGSEFEKRTADGSEFESPKKKAKVE

SEQ ID NO: 1878-1880 - skipped (3 entries)

SEQ ID NO: 1881 - protein, 2094 aa, synthetic construct
MPAAKRVKLDGGDKKYSIGLDIGTNSVGWAVITDEYKVPSKKFKVLGNTDRHSIKKNLIGALLFDSGETAEATRLKRTARRRYTRRKNRICYLQEIFSNEMAKVDDSFFHRLEESFLVEEDKKHERHPIFGNIVDEVAYHEKYPTIYHLRKKLVDSTDKADLRLIYLALAHMIKFRGHFLIEGDLNPDNSDVDKLFIQLVQTYNQLFEENPINASGVDAKAILSARLSKSRRLENLIAQLPGEKKNGLFGNLIALSLGLTPNFKSNFDLAEDAKLQLSKDTYDDDLDNLLAQIGDQYADLFLAAKNLSDAILLSDILRVNTEITKAPLSASMIKRYDEHHQDLTLLKALVRQQLPEKYKEIFFDQSKNGYAGYIDGGASQEEFYKFIKPILEKMDGTEELLVKLNREDLLRKQRTFDNGSIPHQIHLGELHAILRRQEDFYPFLKDNREKIEKILTFRIPYYVGPLARGNSRFAWMTRKSEETITPWNFEEVVDKGASAQSFIERMTNFDKNLPNEKVLPKHSLLYEYFTVYNELTKVKYVTEGMRKPAFLSGEQKKAIVDLLFKTNRKVTVKQLKEDYFKKIECFDSVEISGVEDRFNASLGTYHDLLKIIKDKDFLDNEENEDILEDIVLTLTLFEDREMIEERLKTYAHLFDDKVMKQLKRRRYTGWGRLSRKLINGIRDKQSGKTILDFLKSDGFANRNFMQLIHDDSLTFKEDIQKAQVSGQGDSLHEHIANLAGSPAIKKGILQTVKVVDELVKVMGRHKPENIVIEMARENQTTQKGQKNSRERMKRIEEGIKELGSQILKEHPVENTQLQNEKLYLYYLQNGRDMYVDQELDINRLSDYDVDHIVPQSFLKDDSIDNKVLTRSDKARGKSDNVPSEEVVKKMKNYWRQLLNAKLITQRKFDNLTKAERGGLSELDKAGFIKRQLVETRQITKHVAQILDSRMNTKYDENDKLIREVKVITLKSKLVSDFRKDFQFYKVREINNYHHAHDAYLNAVVGTALIKKYPKLESEFVYGDYKVYDVRKMIAKSEQEIGKATAKYFFYSNIMNFFKTEITLANGEIRKRPLIETNGETGEIVWDKGRDFATVRKVLSMPQVNIVKKTEVQTGGFSKESILPKRNSDKLIARKKDWDPKKYGGFDSPTVAYSVLVVAKVEKGKSKKLKSVKELLGITIMERSSFEKNPIDFLEAKGYKEVKKDLIIKLPKYSLFELENGRKRMLASAGELQKGNELALPSKYVNFLYLASHYEKLKGSPEDNEQKQLFVEQHKHYLDEIIEQISEFSKRVILADANLDKVLSAYNKHRDKPIREQAENIIHLFTLTNLGAPAAFKYFDTTIDRKRYTSTKEVLDATLIHQSITGLYETRIDLSQLGGDGGPAPAPAPAPGGTLNLEDEYRLYETSAEPEVSPGSTWLSDFPQAWAETGGMGLAVRQAPLIIPLKATSTPVSIKQYPMSQEAKLGIKPHIQRLLDQGILVPCQSPWNTPLLPVKKPGTNDYRPVQDLREVNKRVEDIHPTVPNPYNLLSGLPPSHRWYTVLDLKDAFFCLRLHPTSQPLFAFEWRDPGMGISGQLTWTRLPQGFKNSPTLFNEALHRDLADFRIQHPDLILLQYVDDILLAATSELDCQQGTRALLLTLGNLGYRASAKKAQLCQKQVKYLGYLLKEGQRWLTEARKETVMGQPTPKTPRQLREFLGKAGFCRLFIPGFAEMAAPLYPLTKPGTLFNWGPDQQKAYQEIKQALLTAPALGLPDLTKPFELFVDEKQGYAKGVLTQKLGPWRRPVAYLSKKLDPVAAGWPPCLRMVAAIAVLRKDAGKLTMGQPLVILAPHAVEALVKQPPDRWLSNARMTHYQAMLLDTDRVQFGPVVALNPATLLPLPEEGAPHDCLEILAETHGTRPDLTDQPIPDADHTWYTDGSSFLQEGQRKAGAAVTTETEVIWARALPAGTSAQRAELIALTQALKMAEGKRLNVYTDSRYAFATAHIHGEIYRRRGWLTSEGREIKNKSEILALLKALFLPKRLSIIHCLGHQKGDSAEARGNRLADQAAREAAIKTPPDTSTLLAGKRTADGSEFEKRTADGSEFESPKKKAKVE

SEQ ID NO: 1882 - skipped

SEQ ID NO: 1883 - protein, 2094 aa, synthetic construct
MPAAKRVKLDGGDKKYSIGLDIGTNSVGWAVITDEYKVPSKKFKVLGNTDRHSIKKNLIGALLFDSGETAEATRLKRTARRRYTRRKNRICYLQEIFSNEMAKVDDSFFHRLEESFLVEEDKKHERHPIFGNIVDEVAYHEKYPTIYHLRKKLVDSTDKADLRLIYLALAHMIKFRGHFLIEGDLNPDNSDVDKLFIQLVQTYNQLFEENPINASGVDAKAILSARLSKSRRLENLIAQLPGEKKNGLFGNLIALSLGLTPNFKSNFDLAEDAKLQLSKDTYDDDLDNLLAQIGDQYADLFLAAKNLSDAILLSDILRVNTEITKAPLSASMIKRYDEHHQDLTLLKALVRQQLPEKYKEIFFDQSKNGYAGYIDGGASQEEFYKFIKPILEKMDGTEELLVKLNREDLLRKQRTFDNGSIPHQIHLGELHAILRRQEDFYPFLKDNREKIEKILTFRIPYYVGPLARGNSRFAWMTRKSEETITPWNFEEVVDKGASAQSFIERMTNFDKNLPNEKVLPKHSLLYEYFTVYNELTKVKYVTEGMRKPAFLSGEQKKAIVDLLFKTNRKVTVKQLKEDYFKKIECFDSVEISGVEDRFNASLGTYHDLLKIIKDKDFLDNEENEDILEDIVLTLTLFEDREMIEERLKTYAHLFDDKVMKQLKRRRYTGWGRLSRKLINGIRDKQSGKTILDFLKSDGFANRNFMQLIHDDSLTFKEDIQKAQVSGQGDSLHEHIANLAGSPAIKKGILQTVKVVDELVKVMGRHKPENIVIEMARENQTTQKGQKNSRERMKRIEEGIKELGSQILKEHPVENTQLQNEKLYLYYLQNGRDMYVDQELDINRLSDYDVDHIVPQSFLKDDSIDNKVLTRSDKARGKSDNVPSEEVVKKMKNYWRQLLNAKLITQRKFDNLTKAERGGLSELDKAGFIKRQLVETRQITKHVAQILDSRMNTKYDENDKLIREVKVITLKSKLVSDFRKDFQFYKVREINNYHHAHDAYLNAVVGTALIKKYPKLESEFVYGDYKVYDVRKMIAKSEQEIGKATAKYFFYSNIMNFFKTEITLANGEIRKRPLIETNGETGEIVWDKGRDFATVRKVLSMPQVNIVKKTEVQTGGFSKESILPKRNSDKLIARKKDWDPKKYGGFDSPTVAYSVLVVAKVEKGKSKKLKSVKELLGITIMERSSFEKNPIDFLEAKGYKEVKKDLIIKLPKYSLFELENGRKRMLASAGELQKGNELALPSKYVNFLYLASHYEKLKGSPEDNEQKQLFVEQHKHYLDEIIEQISEFSKRVILADANLDKVLSAYNKHRDKPIREQAENIIHLFTLTNLGAPAAFKYFDTTIDRKRYTSTKEVLDATLIHQSITGLYETRIDLSQLGGDGGPAPGSSGGSGGTLNLEDEYRLYETSAEPEVSPGSTWLSDFPQAWAETGGMGLAVRQAPLIIPLKATSTPVSIKQYPMSQEAKLGIKPHIQRLLDQGILVPCQSPWNTPLLPVKKPGTNDYRPVQDLREVNKRVEDIHPTVPNPYNLLSGLPPSHRWYTVLDLKDAFFCLRLHPTSQPLFAFEWRDPGMGISGQLTWTRLPQGFKNSPTLFNEALHRDLADFRIQHPDLILLQYVDDILLAATSELDCQQGTRALLLTLGNLGYRASAKKAQLCQKQVKYLGYLLKEGQRWLTEARKETVMGQPTPKTPRQLREFLGKAGFCRLFIPGFAEMAAPLYPLTKPGTLFNWGPDQQKAYQEIKQALLTAPALGLPDLTKPFELFVDEKQGYAKGVLTQKLGPWRRPVAYLSKKLDPVAAGWPPCLRMVAAIAVLRKDAGKLTMGQPLVILAPHAVEALVKQPPDRWLSNARMTHYQAMLLDTDRVQFGPVVALNPATLLPLPEEGAPHDCLEILAETHGTRPDLTDQPIPDADHTWYTDGSSFLQEGQRKAGAAVTTETEVIWARALPAGTSAQRAELIALTQALKMAEGKRLNVYTDSRYAFATAHIHGEIYRRRGWLTSEGREIKNKSEILALLKALFLPKRLSIIHCLGHQKGDSAEARGNRLADQAAREAAIKTPPDTSTLLAGKRTADGSEFEKRTADGSEFESPKKKAKVE

SEQ ID NO: 1884-1888 - skipped (5 entries)

SEQ ID NO: 1889 - protein, 2096 aa, synthetic construct
MPAAKRVKLDGGDKKYSIGLDIGTNSVGWAVITDEYKVPSKKFKVLGNTDRHSIKKNLIGALLFDSGETAEATRLKRTARRRYTRRKNRICYLQEIFSNEMAKVDDSFFHRLEESFLVEEDKKHERHPIFGNIVDEVAYHEKYPTIYHLRKKLVDSTDKADLRLIYLALAHMIKFRGHFLIEGDLNPDNSDVDKLFIQLVQTYNQLFEENPINASGVDAKAILSARLSKSRRLENLIAQLPGEKKNGLFGNLIALSLGLTPNFKSNFDLAEDAKLQLSKDTYDDDLDNLLAQIGDQYADLFLAAKNLSDAILLSDILRVNTEITKAPLSASMIKRYDEHHQDLTLLKALVRQQLPEKYKEIFFDQSKNGYAGYIDGGASQEEFYKFIKPILEKMDGTEELLVKLNREDLLRKQRTFDNGSIPHQIHLGELHAILRRQEDFYPFLKDNREKIEKILTFRIPYYVGPLARGNSRFAWMTRKSEETITPWNFEEVVDKGASAQSFIERMTNFDKNLPNEKVLPKHSLLYEYFTVYNELTKVKYVTEGMRKPAFLSGEQKKAIVDLLFKTNRKVTVKQLKEDYFKKIECFDSVEISGVEDRFNASLGTYHDLLKIIKDKDFLDNEENEDILEDIVLTLTLFEDREMIEERLKTYAHLFDDKVMKQLKRRRYTGWGRLSRKLINGIRDKQSGKTILDFLKSDGFANRNFMQLIHDDSLTFKEDIQKAQVSGQGDSLHEHIANLAGSPAIKKGILQTVKVVDELVKVMGRHKPENIVIEMARENQTTQKGQKNSRERMKRIEEGIKELGSQILKEHPVENTQLQNEKLYLYYLQNGRDMYVDQELDINRLSDYDVDHIVPQSFLKDDSIDNKVLTRSDKARGKSDNVPSEEVVKKMKNYWRQLLNAKLITQRKFDNLTKAERGGLSELDKAGFIKRQLVETRQITKHVAQILDSRMNTKYDENDKLIREVKVITLKSKLVSDFRKDFQFYKVREINNYHHAHDAYLNAVVGTALIKKYPKLESEFVYGDYKVYDVRKMIAKSEQEIGKATAKYFFYSNIMNFFKTEITLANGEIRKRPLIETNGETGEIVWDKGRDFATVRKVLSMPQVNIVKKTEVQTGGFSKESILPKRNSDKLIARKKDWDPKKYGGFDSPTVAYSVLVVAKVEKGKSKKLKSVKELLGITIMERSSFEKNPIDFLEAKGYKEVKKDLIIKLPKYSLFELENGRKRMLASAGELQKGNELALPSKYVNFLYLASHYEKLKGSPEDNEQKQLFVEQHKHYLDEIIEQISEFSKRVILADANLDKVLSAYNKHRDKPIREQAENIIHLFTLTNLGAPAAFKYFDTTIDRKRYTSTKEVLDATLIHQSITGLYETRIDLSQLGGDGGGGSGSSEAAAKGGTLNLEDEYRLYETSAEPEVSPGSTWLSDFPQAWAETGGMGLAVRQAPLIIPLKATSTPVSIKQYPMSQEAKLGIKPHIQRLLDQGILVPCQSPWNTPLLPVKKPGTNDYRPVQDLREVNKRVEDIHPTVPNPYNLLSGLPPSHRWYTVLDLKDAFFCLRLHPTSQPLFAFEWRDPGMGISGQLTWTRLPQGFKNSPTLFNEALHRDLADFRIQHPDLILLQYVDDILLAATSELDCQQGTRALLLTLGNLGYRASAKKAQLCQKQVKYLGYLLKEGQRWLTEARKETVMGQPTPKTPRQLREFLGKAGFCRLFIPGFAEMAAPLYPLTKPGTLFNWGPDQQKAYQEIKQALLTAPALGLPDLTKPFELFVDEKQGYAKGVLTQKLGPWRRPVAYLSKKLDPVAAGWPPCLRMVAAIAVLRKDAGKLTMGQPLVILAPHAVEALVKQPPDRWLSNARMTHYQAMLLDTDRVQFGPVVALNPATLLPLPEEGAPHDCLEILAETHGTRPDLTDQPIPDADHTWYTDGSSFLQEGQRKAGAAVTTETEVIWARALPAGTSAQRAELIALTQALKMAEGKRLNVYTDSRYAFATAHIHGEIYRRRGWLTSEGREIKNKSEILALLKALFLPKRLSIIHCLGHQKGDSAEARGNRLADQAAREAAIKTPPDTSTLLAGKRTADGSEFEKRTADGSEFESPKKKAKVE

SEQ ID NO: 1890-1898 - skipped (9 entries)

SEQ ID NO: 1899 - protein, 2094 aa, synthetic construct
MPAAKRVKLDGGDKKYSIGLDIGTNSVGWAVITDEYKVPSKKFKVLGNTDRHSIKKNLIGALLFDSGETAEATRLKRTARRRYTRRKNRICYLQEIFSNEMAKVDDSFFHRLEESFLVEEDKKHERHPIFGNIVDEVAYHEKYPTIYHLRKKLVDSTDKADLRLIYLALAHMIKFRGHFLIEGDLNPDNSDVDKLFIQLVQTYNQLFEENPINASGVDAKAILSARLSKSRRLENLIAQLPGEKKNGLFGNLIALSLGLTPNFKSNFDLAEDAKLQLSKDTYDDDLDNLLAQIGDQYADLFLAAKNLSDAILLSDILRVNTEITKAPLSASMIKRYDEHHQDLTLLKALVRQQLPEKYKEIFFDQSKNGYAGYIDGGASQEEFYKFIKPILEKMDGTEELLVKLNREDLLRKQRTFDNGSIPHQIHLGELHAILRRQEDFYPFLKDNREKIEKILTFRIPYYVGPLARGNSRFAWMTRKSEETITPWNFEEVVDKGASAQSFIERMTNFDKNLPNEKVLPKHSLLYEYFTVYNELTKVKYVTEGMRKPAFLSGEQKKAIVDLLFKTNRKVTVKQLKEDYFKKIECFDSVEISGVEDRFNASLGTYHDLLKIIKDKDFLDNEENEDILEDIVLTLTLFEDREMIEERLKTYAHLFDDKVMKQLKRRRYTGWGRLSRKLINGIRDKQSGKTILDFLKSDGFANRNFMQLIHDDSLTFKEDIQKAQVSGQGDSLHEHIANLAGSPAIKKGILQTVKVVDELVKVMGRHKPENIVIEMARENQTTQKGQKNSRERMKRIEEGIKELGSQILKEHPVENTQLQNEKLYLYYLQNGRDMYVDQELDINRLSDYDVDHIVPQSFLKDDSIDNKVLTRSDKARGKSDNVPSEEVVKKMKNYWRQLLNAKLITQRKFDNLTKAERGGLSELDKAGFIKRQLVETRQITKHVAQILDSRMNTKYDENDKLIREVKVITLKSKLVSDFRKDFQFYKVREINNYHHAHDAYLNAVVGTALIKKYPKLESEFVYGDYKVYDVRKMIAKSEQEIGKATAKYFFYSNIMNFFKTEITLANGEIRKRPLIETNGETGEIVWDKGRDFATVRKVLSMPQVNIVKKTEVQTGGFSKESILPKRNSDKLIARKKDWDPKKYGGFDSPTVAYSVLVVAKVEKGKSKKLKSVKELLGITIMERSSFEKNPIDFLEAKGYKEVKKDLIIKLPKYSLFELENGRKRMLASAGELQKGNELALPSKYVNFLYLASHYEKLKGSPEDNEQKQLFVEQHKHYLDEIIEQISEFSKRVILADANLDKVLSAYNKHRDKPIREQAENIIHLFTLTNLGAPAAFKYFDTTIDRKRYTSTKEVLDATLIHQSITGLYETRIDLSQLGGDGGGGSPAPGGGGGTLNLEDEYRLYETSAEPEVSPGSTWLSDFPQAWAETGGMGLAVRQAPLIIPLKATSTPVSIKQYPMSQEAKLGIKPHIQRLLDQGILVPCQSPWNTPLLPVKKPGTNDYRPVQDLREVNKRVEDIHPTVPNPYNLLSGLPPSHRWYTVLDLKDAFFCLRLHPTSQPLFAFEWRDPGMGISGQLTWTRLPQGFKNSPTLFNEALHRDLADFRIQHPDLILLQYVDDILLAATSELDCQQGTRALLLTLGNLGYRASAKKAQLCQKQVKYLGYLLKEGQRWLTEARKETVMGQPTPKTPRQLREFLGKAGFCRLFIPGFAEMAAPLYPLTKPGTLFNWGPDQQKAYQEIKQALLTAPALGLPDLTKPFELFVDEKQGYAKGVLTQKLGPWRRPVAYLSKKLDPVAAGWPPCLRMVAAIAVLRKDAGKLTMGQPLVILAPHAVEALVKQPPDRWLSNARMTHYQAMLLDTDRVQFGPVVALNPATLLPLPEEGAPHDCLEILAETHGTRPDLTDQPIPDADHTWYTDGSSFLQEGQRKAGAAVTTETEVIWARALPAGTSAQRAELIALTQALKMAEGKRLNVYTDSRYAFATAHIHGEIYRRRGWLTSEGREIKNKSEILALLKALFLPKRLSIIHCLGHQKGDSAEARGNRLADQAAREAAIKTPPDTSTLLAGKRTADGSEFEKRTADGSEFESPKKKAKVE

SEQ ID NO: 1900-1936 - skipped (37 entries)

SEQ ID NO: 1937 - protein, 2102 aa, synthetic construct
MPAAKRVKLDGGDKKYSIGLDIGTNSVGWAVITDEYKVPSKKFKVLGNTDRHSIKKNLIGALLFDSGETAEATRLKRTARRRYTRRKNRICYLQEIFSNEMAKVDDSFFHRLEESFLVEEDKKHERHPIFGNIVDEVAYHEKYPTIYHLRKKLVDSTDKADLRLIYLALAHMIKFRGHFLIEGDLNPDNSDVDKLFIQLVQTYNQLFEENPINASGVDAKAILSARLSKSRRLENLIAQLPGEKKNGLFGNLIALSLGLTPNFKSNFDLAEDAKLQLSKDTYDDDLDNLLAQIGDQYADLFLAAKNLSDAILLSDILRVNTEITKAPLSASMIKRYDEHHQDLTLLKALVRQQLPEKYKEIFFDQSKNGYAGYIDGGASQEEFYKFIKPILEKMDGTEELLVKLNREDLLRKQRTFDNGSIPHQIHLGELHAILRRQEDFYPFLKDNREKIEKILTFRIPYYVGPLARGNSRFAWMTRKSEETITPWNFEEVVDKGASAQSFIERMTNFDKNLPNEKVLPKHSLLYEYFTVYNELTKVKYVTEGMRKPAFLSGEQKKAIVDLLFKTNRKVTVKQLKEDYFKKIECFDSVEISGVEDRFNASLGTYHDLLKIIKDKDFLDNEENEDILEDIVLTLTLFEDREMIEERLKTYAHLFDDKVMKQLKRRRYTGWGRLSRKLINGIRDKQSGKTILDFLKSDGFANRNFMQLIHDDSLTFKEDIQKAQVSGQGDSLHEHIANLAGSPAIKKGILQTVKVVDELVKVMGRHKPENIVIEMARENQTTQKGQKNSRERMKRIEEGIKELGSQILKEHPVENTQLQNEKLYLYYLQNGRDMYVDQELDINRLSDYDVDHIVPQSFLKDDSIDNKVLTRSDKARGKSDNVPSEEVVKKMKNYWRQLLNAKLITQRKFDNLTKAERGGLSELDKAGFIKRQLVETRQITKHVAQILDSRMNTKYDENDKLIREVKVITLKSKLVSDFRKDFQFYKVREINNYHHAHDAYLNAVVGTALIKKYPKLESEFVYGDYKVYDVRKMIAKSEQEIGKATAKYFFYSNIMNFFKTEITLANGEIRKRPLIETNGETGEIVWDKGRDFATVRKVLSMPQVNIVKKTEVQTGGFSKESILPKRNSDKLIARKKDWDPKKYGGFDSPTVAYSVLVVAKVEKGKSKKLKSVKELLGITIMERSSFEKNPIDFLEAKGYKEVKKDLIIKLPKYSLFELENGRKRMLASAGELQKGNELALPSKYVNFLYLASHYEKLKGSPEDNEQKQLFVEQHKHYLDEIIEQISEFSKRVILADANLDKVLSAYNKHRDKPIREQAENIIHLFTLTNLGAPAAFKYFDTTIDRKRYTSTKEVLDATLIHQSITGLYETRIDLSQLGGDGGGGGGGSEAAAKGGTVSLQDEHRLFDIPVTTSLPDVWLQDFPQAWAETGGLGRAKCQAPIIIDLKPTAVPVSIKQYPMSLEAHMGIRQHIIKFLELGVLRPCRSPWNTPLLPVKKPGTQDYRPVQDLREINKRTVDIHPTVPNPYNLLSTLKPDYSWYTVLDLKDAFFCLPLAPQSQELFAFEWKDPERGISGQLTWTRLPQGFKNSPTLFNEALHRDLTDFRTQHPEVTLLQYVDDLLLAAPTKKACTQGTRHLLQELGEKGYRASAKKAQICQTKVTYLGYILSEGKRWLTPGRIETVARIPPPRNPREVREFLGKAGFCRLFIPGFAELAAPLYALTKPSTPFTWQTEHQLAFEALKKALLSAPALGLPDTSKPFTLFLDERQGIAKGVLTQKLGPWKRPVAYLSKKLDPVAAGWPPCLRIMAATAMLVKDSAKLTLGQPLTVITPHTLEAIVRQPPDRWITNARLTHYQALLLDTDRVQFGPPVTLNPATLLPVPENQPSPHDCRQVLAETHGTREDLKDQELPDADHTWYTDGSSYLDSGTRRAGAAVVDGHNTIWAQSLPPGTSAQKAELIALTKALELSKGKKANIYTDSRYAFATAHTHGSIYERRGWLTSEGKEIKNKAEIIALLKALFLPQEVAIIHCPGHQKGQDPVAVGNRQADRVARQAAMAEVLTLATEPDNTSHITAGKRTADGSEFEKRTADGSEFESPKKKAKVE

SEQ ID NO: 1938 - protein, 2102 aa, synthetic construct
MPAAKRVKLDGGDKKYSIGLDIGTNSVGWAVITDEYKVPSKKFKVLGNTDRHSIKKNLIGALLFDSGETAEATRLKRTARRRYTRRKNRICYLQEIFSNEMAKVDDSFFHRLEESFLVEEDKKHERHPIFGNIVDEVAYHEKYPTIYHLRKKLVDSTDKADLRLIYLALAHMIKFRGHFLIEGDLNPDNSDVDKLFIQLVQTYNQLFEENPINASGVDAKAILSARLSKSRRLENLIAQLPGEKKNGLFGNLIALSLGLTPNFKSNFDLAEDAKLQLSKDTYDDDLDNLLAQIGDQYADLFLAAKNLSDAILLSDILRVNTEITKAPLSASMIKRYDEHHQDLTLLKALVRQQLPEKYKEIFFDQSKNGYAGYIDGGASQEEFYKFIKPILEKMDGTEELLVKLNREDLLRKQRTFDNGSIPHQIHLGELHAILRRQEDFYPFLKDNREKIEKILTFRIPYYVGPLARGNSRFAWMTRKSEETITPWNFEEVVDKGASAQSFIERMTNFDKNLPNEKVLPKHSLLYEYFTVYNELTKVKYVTEGMRKPAFLSGEQKKAIVDLLFKTNRKVTVKQLKEDYFKKIECFDSVEISGVEDRFNASLGTYHDLLKIIKDKDFLDNEENEDILEDIVLTLTLFEDREMIEERLKTYAHLFDDKVMKQLKRRRYTGWGRLSRKLINGIRDKQSGKTILDFLKSDGFANRNFMQLIHDDSLTFKEDIQKAQVSGQGDSLHEHIANLAGSPAIKKGILQTVKVVDELVKVMGRHKPENIVIEMARENQTTQKGQKNSRERMKRIEEGIKELGSQILKEHPVENTQLQNEKLYLYYLQNGRDMYVDQELDINRLSDYDVDHIVPQSFLKDDSIDNKVLTRSDKARGKSDNVPSEEVVKKMKNYWRQLLNAKLITQRKFDNLTKAERGGLSELDKAGFIKRQLVETRQITKHVAQILDSRMNTKYDENDKLIREVKVITLKSKLVSDFRKDFQFYKVREINNYHHAHDAYLNAVVGTALIKKYPKLESEFVYGDYKVYDVRKMIAKSEQEIGKATAKYFFYSNIMNFFKTEITLANGEIRKRPLIETNGETGEIVWDKGRDFATVRKVLSMPQVNIVKKTEVQTGGFSKESILPKRNSDKLIARKKDWDPKKYGGFDSPTVAYSVLVVAKVEKGKSKKLKSVKELLGITIMERSSFEKNPIDFLEAKGYKEVKKDLIIKLPKYSLFELENGRKRMLASAGELQKGNELALPSKYVNFLYLASHYEKLKGSPEDNEQKQLFVEQHKHYLDEIIEQISEFSKRVILADANLDKVLSAYNKHRDKPIREQAENIIHLFTLTNLGAPAAFKYFDTTIDRKRYTSTKEVLDATLIHQSITGLYETRIDLSQLGGDGGGGGPAPEAAAKGGTVSLQDEHRLFDIPVTTSLPDVWLQDFPQAWAETGGLGRAKCQAPIIIDLKPTAVPVSIKQYPMSLEAHMGIRQHIIKFLELGVLRPCRSPWNTPLLPVKKPGTQDYRPVQDLREINKRTVDIHPTVPNPYNLLSTLKPDYSWYTVLDLKDAFFCLPLAPQSQELFAFEWKDPERGISGQLTWTRLPQGFKNSPTLFNEALHRDLTDFRTQHPEVTLLQYVDDLLLAAPTKKACTQGTRHLLQELGEKGYRASAKKAQICQTKVTYLGYILSEGKRWLTPGRIETVARIPPPRNPREVREFLGKAGFCRLFIPGFAELAAPLYALTKPSTPFTWQTEHQLAFEALKKALLSAPALGLPDTSKPFTLFLDERQGIAKGVLTQKLGPWKRPVAYLSKKLDPVAAGWPPCLRIMAATAMLVKDSAKLTLGQPLTVITPHTLEAIVRQPPDRWITNARLTHYQALLLDTDRVQFGPPVTLNPATLLPVPENQPSPHDCRQVLAETHGTREDLKDQELPDADHTWYTDGSSYLDSGTRRAGAAVVDGHNTIWAQSLPPGTSAQKAELIALTKALELSKGKKANIYTDSRYAFATAHTHGSIYERRGWLTSEGKEIKNKAEIIALLKALFLPQEVAIIHCPGHQKGQDPVAVGNRQADRVARQAAMAEVLTLATEPDNTSHITAGKRTADGSEFEKRTADGSEFESPKKKAKVE

SEQ ID NO: 1939 - protein, 2102 aa, synthetic construct
MPAAKRVKLDGGDKKYSIGLDIGTNSVGWAVITDEYKVPSKKFKVLGNTDRHSIKKNLIGALLFDSGETAEATRLKRTARRRYTRRKNRICYLQEIFSNEMAKVDDSFFHRLEESFLVEEDKKHERHPIFGNIVDEVAYHEKYPTIYHLRKKLVDSTDKADLRLIYLALAHMIKFRGHFLIEGDLNPDNSDVDKLFIQLVQTYNQLFEENPINASGVDAKAILSARLSKSRRLENLIAQLPGEKKNGLFGNLIALSLGLTPNFKSNFDLAEDAKLQLSKDTYDDDLDNLLAQIGDQYADLFLAAKNLSDAILLSDILRVNTEITKAPLSASMIKRYDEHHQDLTLLKALVRQQLPEKYKEIFFDQSKNGYAGYIDGGASQEEFYKFIKPILEKMDGTEELLVKLNREDLLRKQRTFDNGSIPHQIHLGELHAILRRQEDFYPFLKDNREKIEKILTFRIPYYVGPLARGNSRFAWMTRKSEETITPWNFEEVVDKGASAQSFIERMTNFDKNLPNEKVLPKHSLLYEYFTVYNELTKVKYVTEGMRKPAFLSGEQKKAIVDLLFKTNRKVTVKQLKEDYFKKIECFDSVEISGVEDRFNASLGTYHDLLKIIKDKDFLDNEENEDILEDIVLTLTLFEDREMIEERLKTYAHLFDDKVMKQLKRRRYTGWGRLSRKLINGIRDKQSGKTILDFLKSDGFANRNFMQLIHDDSLTFKEDIQKAQVSGQGDSLHEHIANLAGSPAIKKGILQTVKVVDELVKVMGRHKPENIVIEMARENQTTQKGQKNSRERMKRIEEGIKELGSQILKEHPVENTQLQNEKLYLYYLQNGRDMYVDQELDINRLSDYDVDHIVPQSFLKDDSIDNKVLTRSDKARGKSDNVPSEEVVKKMKNYWRQLLNAKLITQRKFDNLTKAERGGLSELDKAGFIKRQLVETRQITKHVAQILDSRMNTKYDENDKLIREVKVITLKSKLVSDFRKDFQFYKVREINNYHHAHDAYLNAVVGTALIKKYPKLESEFVYGDYKVYDVRKMIAKSEQEIGKATAKYFFYSNIMNFFKTEITLANGEIRKRPLIETNGETGEIVWDKGRDFATVRKVLSMPQVNIVKKTEVQTGGFSKESILPKRNSDKLIARKKDWDPKKYGGFDSPTVAYSVLVVAKVEKGKSKKLKSVKELLGITIMERSSFEKNPIDFLEAKGYKEVKKDLIIKLPKYSLFELENGRKRMLASAGELQKGNELALPSKYVNFLYLASHYEKLKGSPEDNEQKQLFVEQHKHYLDEIIEQISEFSKRVILADANLDKVLSAYNKHRDKPIREQAENIIHLFTLTNLGAPAAFKYFDTTIDRKRYTSTKEVLDATLIHQSITGLYETRIDLSQLGGDGGPAPGGSEAAAKGGTVSLQDEHRLFDIPVTTSLPDVWLQDFPQAWAETGGLGRAKCQAPIIIDLKPTAVPVSIKQYPMSLEAHMGIRQHIIKFLELGVLRPCRSPWNTPLLPVKKPGTQDYRPVQDLREINKRTVDIHPTVPNPYNLLSTLKPDYSWYTVLDLKDAFFCLPLAPQSQELFAFEWKDPERGISGQLTWTRLPQGFKNSPTLFNEALHRDLTDFRTQHPEVTLLQYVDDLLLAAPTKKACTQGTRHLLQELGEKGYRASAKKAQICQTKVTYLGYILSEGKRWLTPGRIETVARIPPPRNPREVREFLGKAGFCRLFIPGFAELAAPLYALTKPSTPFTWQTEHQLAFEALKKALLSAPALGLPDTSKPFTLFLDERQGIAKGVLTQKLGPWKRPVAYLSKKLDPVAAGWPPCLRIMAATAMLVKDSAKLTLGQPLTVITPHTLEAIVRQPPDRWITNARLTHYQALLLDTDRVQFGPPVTLNPATLLPVPENQPSPHDCRQVLAETHGTREDLKDQELPDADHTWYTDGSSYLDSGTRRAGAAVVDGHNTIWAQSLPPGTSAQKAELIALTKALELSKGKKANIYTDSRYAFATAHTHGSIYERRGWLTSEGKEIKNKAEIIALLKALFLPQEVAIIHCPGHQKGQDPVAVGNRQADRVARQAAMAEVLTLATEPDNTSHITAGKRTADGSEFEKRTADGSEFESPKKKAKVE

SEQ ID NO: 1940 - protein, 2097 aa, synthetic construct
MPAAKRVKLDGGDKKYSIGLDIGTNSVGWAVITDEYKVPSKKFKVLGNTDRHSIKKNLIGALLFDSGETAEATRLKRTARRRYTRRKNRICYLQEIFSNEMAKVDDSFFHRLEESFLVEEDKKHERHPIFGNIVDEVAYHEKYPTIYHLRKKLVDSTDKADLRLIYLALAHMIKFRGHFLIEGDLNPDNSDVDKLFIQLVQTYNQLFEENPINASGVDAKAILSARLSKSRRLENLIAQLPGEKKNGLFGNLIALSLGLTPNFKSNFDLAEDAKLQLSKDTYDDDLDNLLAQIGDQYADLFLAAKNLSDAILLSDILRVNTEITKAPLSASMIKRYDEHHQDLTLLKALVRQQLPEKYKEIFFDQSKNGYAGYIDGGASQEEFYKFIKPILEKMDGTEELLVKLNREDLLRKQRTFDNGSIPHQIHLGELHAILRRQEDFYPFLKDNREKIEKILTFRIPYYVGPLARGNSRFAWMTRKSEETITPWNFEEVVDKGASAQSFIERMTNFDKNLPNEKVLPKHSLLYEYFTVYNELTKVKYVTEGMRKPAFLSGEQKKAIVDLLFKTNRKVTVKQLKEDYFKKIECFDSVEISGVEDRFNASLGTYHDLLKIIKDKDFLDNEENEDILEDIVLTLTLFEDREMIEERLKTYAHLFDDKVMKQLKRRRYTGWGRLSRKLINGIRDKQSGKTILDFLKSDGFANRNFMQLIHDDSLTFKEDIQKAQVSGQGDSLHEHIANLAGSPAIKKGILQTVKVVDELVKVMGRHKPENIVIEMARENQTTQKGQKNSRERMKRIEEGIKELGSQILKEHPVENTQLQNEKLYLYYLQNGRDMYVDQELDINRLSDYDVDHIVPQSFLKDDSIDNKVLTRSDKARGKSDNVPSEEVVKKMKNYWRQLLNAKLITQRKFDNLTKAERGGLSELDKAGFIKRQLVETRQITKHVAQILDSRMNTKYDENDKLIREVKVITLKSKLVSDFRKDFQFYKVREINNYHHAHDAYLNAVVGTALIKKYPKLESEFVYGDYKVYDVRKMIAKSEQEIGKATAKYFFYSNIMNFFKTEITLANGEIRKRPLIETNGETGEIVWDKGRDFATVRKVLSMPQVNIVKKTEVQTGGFSKESILPKRNSDKLIARKKDWDPKKYGGFDSPTVAYSVLVVAKVEKGKSKKLKSVKELLGITIMERSSFEKNPIDFLEAKGYKEVKKDLIIKLPKYSLFELENGRKRMLASAGELQKGNELALPSKYVNFLYLASHYEKLKGSPEDNEQKQLFVEQHKHYLDEIIEQISEFSKRVILADANLDKVLSAYNKHRDKPIREQAENIIHLFTLTNLGAPAAFKYFDTTIDRKRYTSTKEVLDATLIHQSITGLYETRIDLSQLGGDGGGGSGGGGGTVSLQDEHRLFDIPVTTSLPDVWLQDFPQAWAETGGLGRAKCQAPIIIDLKPTAVPVSIKQYPMSLEAHMGIRQHIIKFLELGVLRPCRSPWNTPLLPVKKPGTQDYRPVQDLREINKRTVDIHPTVPNPYNLLSTLKPDYSWYTVLDLKDAFFCLPLAPQSQELFAFEWKDPERGISGQLTWTRLPQGFKNSPTLFNEALHRDLTDFRTQHPEVTLLQYVDDLLLAAPTKKACTQGTRHLLQELGEKGYRASAKKAQICQTKVTYLGYILSEGKRWLTPGRIETVARIPPPRNPREVREFLGKAGFCRLFIPGFAELAAPLYALTKPSTPFTWQTEHQLAFEALKKALLSAPALGLPDTSKPFTLFLDERQGIAKGVLTQKLGPWKRPVAYLSKKLDPVAAGWPPCLRIMAATAMLVKDSAKLTLGQPLTVITPHTLEAIVRQPPDRWITNARLTHYQALLLDTDRVQFGPPVTLNPATLLPVPENQPSPHDCRQVLAETHGTREDLKDQELPDADHTWYTDGSSYLDSGTRRAGAAVVDGHNTIWAQSLPPGTSAQKAELIALTKALELSKGKKANIYTDSRYAFATAHTHGSIYERRGWLTSEGKEIKNKAEIIALLKALFLPQEVAIIHCPGHQKGQDPVAVGNRQADRVARQAAMAEVLTLATEPDNTSHITAGKRTADGSEFEKRTADGSEFESPKKKAKVE

SEQ ID NO: 1941 - skipped

SEQ ID NO: 1942 - protein, 2100 aa, synthetic construct
MPAAKRVKLDGGDKKYSIGLDIGTNSVGWAVITDEYKVPSKKFKVLGNTDRHSIKKNLIGALLFDSGETAEATRLKRTARRRYTRRKNRICYLQEIFSNEMAKVDDSFFHRLEESFLVEEDKKHERHPIFGNIVDEVAYHEKYPTIYHLRKKLVDSTDKADLRLIYLALAHMIKFRGHFLIEGDLNPDNSDVDKLFIQLVQTYNQLFEENPINASGVDAKAILSARLSKSRRLENLIAQLPGEKKNGLFGNLIALSLGLTPNFKSNFDLAEDAKLQLSKDTYDDDLDNLLAQIGDQYADLFLAAKNLSDAILLSDILRVNTEITKAPLSASMIKRYDEHHQDLTLLKALVRQQLPEKYKEIFFDQSKNGYAGYIDGGASQEEFYKFIKPILEKMDGTEELLVKLNREDLLRKQRTFDNGSIPHQIHLGELHAILRRQEDFYPFLKDNREKIEKILTFRIPYYVGPLARGNSRFAWMTRKSEETITPWNFEEVVDKGASAQSFIERMTNFDKNLPNEKVLPKHSLLYEYFTVYNELTKVKYVTEGMRKPAFLSGEQKKAIVDLLFKTNRKVTVKQLKEDYFKKIECFDSVEISGVEDRFNASLGTYHDLLKIIKDKDFLDNEENEDILEDIVLTLTLFEDREMIEERLKTYAHLFDDKVMKQLKRRRYTGWGRLSRKLINGIRDKQSGKTILDFLKSDGFANRNFMQLIHDDSLTFKEDIQKAQVSGQGDSLHEHIANLAGSPAIKKGILQTVKVVDELVKVMGRHKPENIVIEMARENQTTQKGQKNSRERMKRIEEGIKELGSQILKEHPVENTQLQNEKLYLYYLQNGRDMYVDQELDINRLSDYDVDHIVPQSFLKDDSIDNKVLTRSDKARGKSDNVPSEEVVKKMKNYWRQLLNAKLITQRKFDNLTKAERGGLSELDKAGFIKRQLVETRQITKHVAQILDSRMNTKYDENDKLIREVKVITLKSKLVSDFRKDFQFYKVREINNYHHAHDAYLNAVVGTALIKKYPKLESEFVYGDYKVYDVRKMIAKSEQEIGKATAKYFFYSNIMNFFKTEITLANGEIRKRPLIETNGETGEIVWDKGRDFATVRKVLSMPQVNIVKKTEVQTGGFSKESILPKRNSDKLIARKKDWDPKKYGGFDSPTVAYSVLVVAKVEKGKSKKLKSVKELLGITIMERSSFEKNPIDFLEAKGYKEVKKDLIIKLPKYSLFELENGRKRMLASAGELQKGNELALPSKYVNFLYLASHYEKLKGSPEDNEQKQLFVEQHKHYLDEIIEQISEFSKRVILADANLDKVLSAYNKHRDKPIREQAENIIHLFTLTNLGAPAAFKYFDTTIDRKRYTSTKEVLDATLIHQSITGLYETRIDLSQLGGDGGGGSGGGPAPGGTVSLQDEHRLFDIPVTTSLPDVWLQDFPQAWAETGGLGRAKCQAPIIIDLKPTAVPVSIKQYPMSLEAHMGIRQHIIKFLELGVLRPCRSPWNTPLLPVKKPGTQDYRPVQDLREINKRTVDIHPTVPNPYNLLSTLKPDYSWYTVLDLKDAFFCLPLAPQSQELFAFEWKDPERGISGQLTWTRLPQGFKNSPTLFNEALHRDLTDFRTQHPEVTLLQYVDDLLLAAPTKKACTQGTRHLLQELGEKGYRASAKKAQICQTKVTYLGYILSEGKRWLTPGRIETVARIPPPRNPREVREFLGKAGFCRLFIPGFAELAAPLYALTKPSTPFTWQTEHQLAFEALKKALLSAPALGLPDTSKPFTLFLDERQGIAKGVLTQKLGPWKRPVAYLSKKLDPVAAGWPPCLRIMAATAMLVKDSAKLTLGQPLTVITPHTLEAIVRQPPDRWITNARLTHYQALLLDTDRVQFGPPVTLNPATLLPVPENQPSPHDCRQVLAETHGTREDLKDQELPDADHTWYTDGSSYLDSGTRRAGAAVVDGHNTIWAQSLPPGTSAQKAELIALTKALELSKGKKANIYTDSRYAFATAHTHGSIYERRGWLTSEGKEIKNKAEIIALLKALFLPQEVAIIHCPGHQKGQDPVAVGNRQADRVARQAAMAEVLTLATEPDNTSHITAGKRTADGSEFEKRTADGSEFESPKKKAKVE

SEQ ID NO: 1943 - protein, 2102 aa, synthetic construct
MPAAKRVKLDGGDKKYSIGLDIGTNSVGWAVITDEYKVPSKKFKVLGNTDRHSIKKNLIGALLFDSGETAEATRLKRTARRRYTRRKNRICYLQEIFSNEMAKVDDSFFHRLEESFLVEEDKKHERHPIFGNIVDEVAYHEKYPTIYHLRKKLVDSTDKADLRLIYLALAHMIKFRGHFLIEGDLNPDNSDVDKLFIQLVQTYNQLFEENPINASGVDAKAILSARLSKSRRLENLIAQLPGEKKNGLFGNLIALSLGLTPNFKSNFDLAEDAKLQLSKDTYDDDLDNLLAQIGDQYADLFLAAKNLSDAILLSDILRVNTEITKAPLSASMIKRYDEHHQDLTLLKALVRQQLPEKYKEIFFDQSKNGYAGYIDGGASQEEFYKFIKPILEKMDGTEELLVKLNREDLLRKQRTFDNGSIPHQIHLGELHAILRRQEDFYPFLKDNREKIEKILTFRIPYYVGPLARGNSRFAWMTRKSEETITPWNFEEVVDKGASAQSFIERMTNFDKNLPNEKVLPKHSLLYEYFTVYNELTKVKYVTEGMRKPAFLSGEQKKAIVDLLFKTNRKVTVKQLKEDYFKKIECFDSVEISGVEDRFNASLGTYHDLLKIIKDKDFLDNEENEDILEDIVLTLTLFEDREMIEERLKTYAHLFDDKVMKQLKRRRYTGWGRLSRKLINGIRDKQSGKTILDFLKSDGFANRNFMQLIHDDSLTFKEDIQKAQVSGQGDSLHEHIANLAGSPAIKKGILQTVKVVDELVKVMGRHKPENIVIEMARENQTTQKGQKNSRERMKRIEEGIKELGSQILKEHPVENTQLQNEKLYLYYLQNGRDMYVDQELDINRLSDYDVDHIVPQSFLKDDSIDNKVLTRSDKARGKSDNVPSEEVVKKMKNYWRQLLNAKLITQRKFDNLTKAERGGLSELDKAGFIKRQLVETRQITKHVAQILDSRMNTKYDENDKLIREVKVITLKSKLVSDFRKDFQFYKVREINNYHHAHDAYLNAVVGTALIKKYPKLESEFVYGDYKVYDVRKMIAKSEQEIGKATAKYFFYSNIMNFFKTEITLANGEIRKRPLIETNGETGEIVWDKGRDFATVRKVLSMPQVNIVKKTEVQTGGFSKESILPKRNSDKLIARKKDWDPKKYGGFDSPTVAYSVLVVAKVEKGKSKKLKSVKELLGITIMERSSFEKNPIDFLEAKGYKEVKKDLIIKLPKYSLFELENGRKRMLASAGELQKGNELALPSKYVNFLYLASHYEKLKGSPEDNEQKQLFVEQHKHYLDEIIEQISEFSKRVILADANLDKVLSAYNKHRDKPIREQAENIIHLFTLTNLGAPAAFKYFDTTIDRKRYTSTKEVLDATLIHQSITGLYETRIDLSQLGGDGGGGGEAAAKGGSGGTVSLQDEHRLFDIPVTTSLPDVWLQDFPQAWAETGGLGRAKCQAPIIIDLKPTAVPVSIKQYPMSLEAHMGIRQHIIKFLELGVLRPCRSPWNTPLLPVKKPGTQDYRPVQDLREINKRTVDIHPTVPNPYNLLSTLKPDYSWYTVLDLKDAFFCLPLAPQSQELFAFEWKDPERGISGQLTWTRLPQGFKNSPTLFNEALHRDLTDFRTQHPEVTLLQYVDDLLLAAPTKKACTQGTRHLLQELGEKGYRASAKKAQICQTKVTYLGYILSEGKRWLTPGRIETVARIPPPRNPREVREFLGKAGFCRLFIPGFAELAAPLYALTKPSTPFTWQTEHQLAFEALKKALLSAPALGLPDTSKPFTLFLDERQGIAKGVLTQKLGPWKRPVAYLSKKLDPVAAGWPPCLRIMAATAMLVKDSAKLTLGQPLTVITPHTLEAIVRQPPDRWITNARLTHYQALLLDTDRVQFGPPVTLNPATLLPVPENQPSPHDCRQVLAETHGTREDLKDQELPDADHTWYTDGSSYLDSGTRRAGAAVVDGHNTIWAQSLPPGTSAQKAELIALTKALELSKGKKANIYTDSRYAFATAHTHGSIYERRGWLTSEGKEIKNKAEIIALLKALFLPQEVAIIHCPGHQKGQDPVAVGNRQADRVARQAAMAEVLTLATEPDNTSHITAGKRTADGSEFEKRTADGSEFESPKKKAKVE

SEQ ID NO: 1944 - skipped

SEQ ID NO: 1945 - protein, 2096 aa, synthetic construct
MPAAKRVKLDGGDKKYSIGLDIGTNSVGWAVITDEYKVPSKKFKVLGNTDRHSIKKNLIGALLFDSGETAEATRLKRTARRRYTRRKNRICYLQEIFSNEMAKVDDSFFHRLEESFLVEEDKKHERHPIFGNIVDEVAYHEKYPTIYHLRKKLVDSTDKADLRLIYLALAHMIKFRGHFLIEGDLNPDNSDVDKLFIQLVQTYNQLFEENPINASGVDAKAILSARLSKSRRLENLIAQLPGEKKNGLFGNLIALSLGLTPNFKSNFDLAEDAKLQLSKDTYDDDLDNLLAQIGDQYADLFLAAKNLSDAILLSDILRVNTEITKAPLSASMIKRYDEHHQDLTLLKALVRQQLPEKYKEIFFDQSKNGYAGYIDGGASQEEFYKFIKPILEKMDGTEELLVKLNREDLLRKQRTFDNGSIPHQIHLGELHAILRRQEDFYPFLKDNREKIEKILTFRIPYYVGPLARGNSRFAWMTRKSEETITPWNFEEVVDKGASAQSFIERMTNFDKNLPNEKVLPKHSLLYEYFTVYNELTKVKYVTEGMRKPAFLSGEQKKAIVDLLFKTNRKVTVKQLKEDYFKKIECFDSVEISGVEDRFNASLGTYHDLLKIIKDKDFLDNEENEDILEDIVLTLTLFEDREMIEERLKTYAHLFDDKVMKQLKRRRYTGWGRLSRKLINGIRDKQSGKTILDFLKSDGFANRNFMQLIHDDSLTFKEDIQKAQVSGQGDSLHEHIANLAGSPAIKKGILQTVKVVDELVKVMGRHKPENIVIEMARENQTTQKGQKNSRERMKRIEEGIKELGSQILKEHPVENTQLQNEKLYLYYLQNGRDMYVDQELDINRLSDYDVDHIVPQSFLKDDSIDNKVLTRSDKARGKSDNVPSEEVVKKMKNYWRQLLNAKLITQRKFDNLTKAERGGLSELDKAGFIKRQLVETRQITKHVAQILDSRMNTKYDENDKLIREVKVITLKSKLVSDFRKDFQFYKVREINNYHHAHDAYLNAVVGTALIKKYPKLESEFVYGDYKVYDVRKMIAKSEQEIGKATAKYFFYSNIMNFFKTEITLANGEIRKRPLIETNGETGEIVWDKGRDFATVRKVLSMPQVNIVKKTEVQTGGFSKESILPKRNSDKLIARKKDWDPKKYGGFDSPTVAYSVLVVAKVEKGKSKKLKSVKELLGITIMERSSFEKNPIDFLEAKGYKEVKKDLIIKLPKYSLFELENGRKRMLASAGELQKGNELALPSKYVNFLYLASHYEKLKGSPEDNEQKQLFVEQHKHYLDEIIEQISEFSKRVILADANLDKVLSAYNKHRDKPIREQAENIIHLFTLTNLGAPAAFKYFDTTIDRKRYTSTKEVLDATLIHQSITGLYETRIDLSQLGGDGGPAPAPGGTVSLQDEHRLFDIPVTTSLPDVWLQDFPQAWAETGGLGRAKCQAPIIIDLKPTAVPVSIKQYPMSLEAHMGIRQHIIKFLELGVLRPCRSPWNTPLLPVKKPGTQDYRPVQDLREINKRTVDIHPTVPNPYNLLSTLKPDYSWYTVLDLKDAFFCLPLAPQSQELFAFEWKDPERGISGQLTWTRLPQGFKNSPTLFNEALHRDLTDFRTQHPEVTLLQYVDDLLLAAPTKKACTQGTRHLLQELGEKGYRASAKKAQICQTKVTYLGYILSEGKRWLTPGRIETVARIPPPRNPREVREFLGKAGFCRLFIPGFAELAAPLYALTKPSTPFTWQTEHQLAFEALKKALLSAPALGLPDTSKPFTLFLDERQGIAKGVLTQKLGPWKRPVAYLSKKLDPVAAGWPPCLRIMAATAMLVKDSAKLTLGQPLTVITPHTLEAIVRQPPDRWITNARLTHYQALLLDTDRVQFGPPVTLNPATLLPVPENQPSPHDCRQVLAETHGTREDLKDQELPDADHTWYTDGSSYLDSGTRRAGAAVVDGHNTIWAQSLPPGTSAQKAELIALTKALELSKGKKANIYTDSRYAFATAHTHGSIYERRGWLTSEGKEIKNKAEIIALLKALFLPQEVAIIHCPGHQKGQDPVAVGNRQADRVARQAAMAEVLTLATEPDNTSHITAGKRTADGSEFEKRTADGSEFESPKKKAKVE

SEQ ID NO: 1946-1948 - skipped (3 entries)

SEQ ID NO: 1949 - protein, 2106 aa, synthetic construct
MPAAKRVKLDGGDKKYSIGLDIGTNSVGWAVITDEYKVPSKKFKVLGNTDRHSIKKNLIGALLFDSGETAEATRLKRTARRRYTRRKNRICYLQEIFSNEMAKVDDSFFHRLEESFLVEEDKKHERHPIFGNIVDEVAYHEKYPTIYHLRKKLVDSTDKADLRLIYLALAHMIKFRGHFLIEGDLNPDNSDVDKLFIQLVQTYNQLFEENPINASGVDAKAILSARLSKSRRLENLIAQLPGEKKNGLFGNLIALSLGLTPNFKSNFDLAEDAKLQLSKDTYDDDLDNLLAQIGDQYADLFLAAKNLSDAILLSDILRVNTEITKAPLSASMIKRYDEHHQDLTLLKALVRQQLPEKYKEIFFDQSKNGYAGYIDGGASQEEFYKFIKPILEKMDGTEELLVKLNREDLLRKQRTFDNGSIPHQIHLGELHAILRRQEDFYPFLKDNREKIEKILTFRIPYYVGPLARGNSRFAWMTRKSEETITPWNFEEVVDKGASAQSFIERMTNFDKNLPNEKVLPKHSLLYEYFTVYNELTKVKYVTEGMRKPAFLSGEQKKAIVDLLFKTNRKVTVKQLKEDYFKKIECFDSVEISGVEDRFNASLGTYHDLLKIIKDKDFLDNEENEDILEDIVLTLTLFEDREMIEERLKTYAHLFDDKVMKQLKRRRYTGWGRLSRKLINGIRDKQSGKTILDFLKSDGFANRNFMQLIHDDSLTFKEDIQKAQVSGQGDSLHEHIANLAGSPAIKKGILQTVKVVDELVKVMGRHKPENIVIEMARENQTTQKGQKNSRERMKRIEEGIKELGSQILKEHPVENTQLQNEKLYLYYLQNGRDMYVDQELDINRLSDYDVDHIVPQSFLKDDSIDNKVLTRSDKARGKSDNVPSEEVVKKMKNYWRQLLNAKLITQRKFDNLTKAERGGLSELDKAGFIKRQLVETRQITKHVAQILDSRMNTKYDENDKLIREVKVITLKSKLVSDFRKDFQFYKVREINNYHHAHDAYLNAVVGTALIKKYPKLESEFVYGDYKVYDVRKMIAKSEQEIGKATAKYFFYSNIMNFFKTEITLANGEIRKRPLIETNGETGEIVWDKGRDFATVRKVLSMPQVNIVKKTEVQTGGFSKESILPKRNSDKLIARKKDWDPKKYGGFDSPTVAYSVLVVAKVEKGKSKKLKSVKELLGITIMERSSFEKNPIDFLEAKGYKEVKKDLIIKLPKYSLFELENGRKRMLASAGELQKGNELALPSKYVNFLYLASHYEKLKGSPEDNEQKQLFVEQHKHYLDEIIEQISEFSKRVILADANLDKVLSAYNKHRDKPIREQAENIIHLFTLTNLGAPAAFKYFDTTIDRKRYTSTKEVLDATLIHQSITGLYETRIDLSQLGGDGGGGGGSEAAAKGGGGSGGTVSLQDEHRLFDIPVTTSLPDVWLQDFPQAWAETGGLGRAKCQAPIIIDLKPTAVPVSIKQYPMSLEAHMGIRQHIIKFLELGVLRPCRSPWNTPLLPVKKPGTQDYRPVQDLREINKRTVDIHPTVPNPYNLLSTLKPDYSWYTVLDLKDAFFCLPLAPQSQELFAFEWKDPERGISGQLTWTRLPQGFKNSPTLFNEALHRDLTDFRTQHPEVTLLQYVDDLLLAAPTKKACTQGTRHLLQELGEKGYRASAKKAQICQTKVTYLGYILSEGKRWLTPGRIETVARIPPPRNPREVREFLGKAGFCRLFIPGFAELAAPLYALTKPSTPFTWQTEHQLAFEALKKALLSAPALGLPDTSKPFTLFLDERQGIAKGVLTQKLGPWKRPVAYLSKKLDPVAAGWPPCLRIMAATAMLVKDSAKLTLGQPLTVITPHTLEAIVRQPPDRWITNARLTHYQALLLDTDRVQFGPPVTLNPATLLPVPENQPSPHDCRQVLAETHGTREDLKDQELPDADHTWYTDGSSYLDSGTRRAGAAVVDGHNTIWAQSLPPGTSAQKAELIALTKALELSKGKKANIYTDSRYAFATAHTHGSIYERRGWLTSEGKEIKNKAEIIALLKALFLPQEVAIIHCPGHQKGQDPVAVGNRQADRVARQAAMAEVLTLATEPDNTSHITAGKRTADGSEFEKRTADGSEFESPKKKAKVE

SEQ ID NO: 1950 - skipped

SEQ ID NO: 1951 - protein, 2102 aa, synthetic construct
MPAAKRVKLDGGDKKYSIGLDIGTNSVGWAVITDEYKVPSKKFKVLGNTDRHSIKKNLIGALLFDSGETAEATRLKRTARRRYTRRKNRICYLQEIFSNEMAKVDDSFFHRLEESFLVEEDKKHERHPIFGNIVDEVAYHEKYPTIYHLRKKLVDSTDKADLRLIYLALAHMIKFRGHFLIEGDLNPDNSDVDKLFIQLVQTYNQLFEENPINASGVDAKAILSARLSKSRRLENLIAQLPGEKKNGLFGNLIALSLGLTPNFKSNFDLAEDAKLQLSKDTYDDDLDNLLAQIGDQYADLFLAAKNLSDAILLSDILRVNTEITKAPLSASMIKRYDEHHQDLTLLKALVRQQLPEKYKEIFFDQSKNGYAGYIDGGASQEEFYKFIKPILEKMDGTEELLVKLNREDLLRKQRTFDNGSIPHQIHLGELHAILRRQEDFYPFLKDNREKIEKILTFRIPYYVGPLARGNSRFAWMTRKSEETITPWNFEEVVDKGASAQSFIERMTNFDKNLPNEKVLPKHSLLYEYFTVYNELTKVKYVTEGMRKPAFLSGEQKKAIVDLLFKTNRKVTVKQLKEDYFKKIECFDSVEISGVEDRFNASLGTYHDLLKIIKDKDFLDNEENEDILEDIVLTLTLFEDREMIEERLKTYAHLFDDKVMKQLKRRRYTGWGRLSRKLINGIRDKQSGKTILDFLKSDGFANRNFMQLIHDDSLTFKEDIQKAQVSGQGDSLHEHIANLAGSPAIKKGILQTVKVVDELVKVMGRHKPENIVIEMARENQTTQKGQKNSRERMKRIEEGIKELGSQILKEHPVENTQLQNEKLYLYYLQNGRDMYVDQELDINRLSDYDVDHIVPQSFLKDDSIDNKVLTRSDKARGKSDNVPSEEVVKKMKNYWRQLLNAKLITQRKFDNLTKAERGGLSELDKAGFIKRQLVETRQITKHVAQILDSRMNTKYDENDKLIREVKVITLKSKLVSDFRKDFQFYKVREINNYHHAHDAYLNAVVGTALIKKYPKLESEFVYGDYKVYDVRKMIAKSEQEIGKATAKYFFYSNIMNFFKTEITLANGEIRKRPLIETNGETGEIVWDKGRDFATVRKVLSMPQVNIVKKTEVQTGGFSKESILPKRNSDKLIARKKDWDPKKYGGFDSPTVAYSVLVVAKVEKGKSKKLKSVKELLGITIMERSSFEKNPIDFLEAKGYKEVKKDLIIKLPKYSLFELENGRKRMLASAGELQKGNELALPSKYVNFLYLASHYEKLKGSPEDNEQKQLFVEQHKHYLDEIIEQISEFSKRVILADANLDKVLSAYNKHRDKPIREQAENIIHLFTLTNLGAPAAFKYFDTTIDRKRYTSTKEVLDATLIHQSITGLYETRIDLSQLGGDGGGGSGSSEAAAKGGTVSLQDEHRLFDIPVTTSLPDVWLQDFPQAWAETGGLGRAKCQAPIIIDLKPTAVPVSIKQYPMSLEAHMGIRQHIIKFLELGVLRPCRSPWNTPLLPVKKPGTQDYRPVQDLREINKRTVDIHPTVPNPYNLLSTLKPDYSWYTVLDLKDAFFCLPLAPQSQELFAFEWKDPERGISGQLTWTRLPQGFKNSPTLFNEALHRDLTDFRTQHPEVTLLQYVDDLLLAAPTKKACTQGTRHLLQELGEKGYRASAKKAQICQTKVTYLGYILSEGKRWLTPGRIETVARIPPPRNPREVREFLGKAGFCRLFIPGFAELAAPLYALTKPSTPFTWQTEHQLAFEALKKALLSAPALGLPDTSKPFTLFLDERQGIAKGVLTQKLGPWKRPVAYLSKKLDPVAAGWPPCLRIMAATAMLVKDSAKLTLGQPLTVITPHTLEAIVRQPPDRWITNARLTHYQALLLDTDRVQFGPPVTLNPATLLPVPENQPSPHDCRQVLAETHGTREDLKDQELPDADHTWYTDGSSYLDSGTRRAGAAVVDGHNTIWAQSLPPGTSAQKAELIALTKALELSKGKKANIYTDSRYAFATAHTHGSIYERRGWLTSEGKEIKNKAEIIALLKALFLPQEVAIIHCPGHQKGQDPVAVGNRQADRVARQAAMAEVLTLATEPDNTSHITAGKRTADGSEFEKRTADGSEFESPKKKAKVE

SEQ ID NO: 1952 - skipped

SEQ ID NO: 1953 - protein, 2098 aa, synthetic construct
MPAAKRVKLDGGDKKYSIGLDIGTNSVGWAVITDEYKVPSKKFKVLGNTDRHSIKKNLIGALLFDSGETAEATRLKRTARRRYTRRKNRICYLQEIFSNEMAKVDDSFFHRLEESFLVEEDKKHERHPIFGNIVDEVAYHEKYPTIYHLRKKLVDSTDKADLRLIYLALAHMIKFRGHFLIEGDLNPDNSDVDKLFIQLVQTYNQLFEENPINASGVDAKAILSARLSKSRRLENLIAQLPGEKKNGLFGNLIALSLGLTPNFKSNFDLAEDAKLQLSKDTYDDDLDNLLAQIGDQYADLFLAAKNLSDAILLSDILRVNTEITKAPLSASMIKRYDEHHQDLTLLKALVRQQLPEKYKEIFFDQSKNGYAGYIDGGASQEEFYKFIKPILEKMDGTEELLVKLNREDLLRKQRTFDNGSIPHQIHLGELHAILRRQEDFYPFLKDNREKIEKILTFRIPYYVGPLARGNSRFAWMTRKSEETITPWNFEEVVDKGASAQSFIERMTNFDKNLPNEKVLPKHSLLYEYFTVYNELTKVKYVTEGMRKPAFLSGEQKKAIVDLLFKTNRKVTVKQLKEDYFKKIECFDSVEISGVEDRFNASLGTYHDLLKIIKDKDFLDNEENEDILEDIVLTLTLFEDREMIEERLKTYAHLFDDKVMKQLKRRRYTGWGRLSRKLINGIRDKQSGKTILDFLKSDGFANRNFMQLIHDDSLTFKEDIQKAQVSGQGDSLHEHIANLAGSPAIKKGILQTVKVVDELVKVMGRHKPENIVIEMARENQTTQKGQKNSRERMKRIEEGIKELGSQILKEHPVENTQLQNEKLYLYYLQNGRDMYVDQELDINRLSDYDVDHIVPQSFLKDDSIDNKVLTRSDKARGKSDNVPSEEVVKKMKNYWRQLLNAKLITQRKFDNLTKAERGGLSELDKAGFIKRQLVETRQITKHVAQILDSRMNTKYDENDKLIREVKVITLKSKLVSDFRKDFQFYKVREINNYHHAHDAYLNAVVGTALIKKYPKLESEFVYGDYKVYDVRKMIAKSEQEIGKATAKYFFYSNIMNFFKTEITLANGEIRKRPLIETNGETGEIVWDKGRDFATVRKVLSMPQVNIVKKTEVQTGGFSKESILPKRNSDKLIARKKDWDPKKYGGFDSPTVAYSVLVVAKVEKGKSKKLKSVKELLGITIMERSSFEKNPIDFLEAKGYKEVKKDLIIKLPKYSLFELENGRKRMLASAGELQKGNELALPSKYVNFLYLASHYEKLKGSPEDNEQKQLFVEQHKHYLDEIIEQISEFSKRVILADANLDKVLSAYNKHRDKPIREQAENIIHLFTLTNLGAPAAFKYFDTTIDRKRYTSTKEVLDATLIHQSITGLYETRIDLSQLGGDGGPAPAPAPGGTVSLQDEHRLFDIPVTTSLPDVWLQDFPQAWAETGGLGRAKCQAPIIIDLKPTAVPVSIKQYPMSLEAHMGIRQHIIKFLELGVLRPCRSPWNTPLLPVKKPGTQDYRPVQDLREINKRTVDIHPTVPNPYNLLSTLKPDYSWYTVLDLKDAFFCLPLAPQSQELFAFEWKDPERGISGQLTWTRLPQGFKNSPTLFNEALHRDLTDFRTQHPEVTLLQYVDDLLLAAPTKKACTQGTRHLLQELGEKGYRASAKKAQICQTKVTYLGYILSEGKRWLTPGRIETVARIPPPRNPREVREFLGKAGFCRLFIPGFAELAAPLYALTKPSTPFTWQTEHQLAFEALKKALLSAPALGLPDTSKPFTLFLDERQGIAKGVLTQKLGPWKRPVAYLSKKLDPVAAGWPPCLRIMAATAMLVKDSAKLTLGQPLTVITPHTLEAIVRQPPDRWITNARLTHYQALLLDTDRVQFGPPVTLNPATLLPVPENQPSPHDCRQVLAETHGTREDLKDQELPDADHTWYTDGSSYLDSGTRRAGAAVVDGHNTIWAQSLPPGTSAQKAELIALTKALELSKGKKANIYTDSRYAFATAHTHGSIYERRGWLTSEGKEIKNKAEIIALLKALFLPQEVAIIHCPGHQKGQDPVAVGNRQADRVARQAAMAEVLTLATEPDNTSHITAGKRTADGSEFEKRTADGSEFESPKKKAKVE

SEQ ID NO: 1954-1960 - skipped (7 entries)

SEQ ID NO: 1961 - protein, 2100 aa, synthetic construct
MPAAKRVKLDGGDKKYSIGLDIGTNSVGWAVITDEYKVPSKKFKVLGNTDRHSIKKNLIGALLFDSGETAEATRLKRTARRRYTRRKNRICYLQEIFSNEMAKVDDSFFHRLEESFLVEEDKKHERHPIFGNIVDEVAYHEKYPTIYHLRKKLVDSTDKADLRLIYLALAHMIKFRGHFLIEGDLNPDNSDVDKLFIQLVQTYNQLFEENPINASGVDAKAILSARLSKSRRLENLIAQLPGEKKNGLFGNLIALSLGLTPNFKSNFDLAEDAKLQLSKDTYDDDLDNLLAQIGDQYADLFLAAKNLSDAILLSDILRVNTEITKAPLSASMIKRYDEHHQDLTLLKALVRQQLPEKYKEIFFDQSKNGYAGYIDGGASQEEFYKFIKPILEKMDGTEELLVKLNREDLLRKQRTFDNGSIPHQIHLGELHAILRRQEDFYPFLKDNREKIEKILTFRIPYYVGPLARGNSRFAWMTRKSEETITPWNFEEVVDKGASAQSFIERMTNFDKNLPNEKVLPKHSLLYEYFTVYNELTKVKYVTEGMRKPAFLSGEQKKAIVDLLFKTNRKVTVKQLKEDYFKKIECFDSVEISGVEDRFNASLGTYHDLLKIIKDKDFLDNEENEDILEDIVLTLTLFEDREMIEERLKTYAHLFDDKVMKQLKRRRYTGWGRLSRKLINGIRDKQSGKTILDFLKSDGFANRNFMQLIHDDSLTFKEDIQKAQVSGQGDSLHEHIANLAGSPAIKKGILQTVKVVDELVKVMGRHKPENIVIEMARENQTTQKGQKNSRERMKRIEEGIKELGSQILKEHPVENTQLQNEKLYLYYLQNGRDMYVDQELDINRLSDYDVDHIVPQSFLKDDSIDNKVLTRSDKARGKSDNVPSEEVVKKMKNYWRQLLNAKLITQRKFDNLTKAERGGLSELDKAGFIKRQLVETRQITKHVAQILDSRMNTKYDENDKLIREVKVITLKSKLVSDFRKDFQFYKVREINNYHHAHDAYLNAVVGTALIKKYPKLESEFVYGDYKVYDVRKMIAKSEQEIGKATAKYFFYSNIMNFFKTEITLANGEIRKRPLIETNGETGEIVWDKGRDFATVRKVLSMPQVNIVKKTEVQTGGFSKESILPKRNSDKLIARKKDWDPKKYGGFDSPTVAYSVLVVAKVEKGKSKKLKSVKELLGITIMERSSFEKNPIDFLEAKGYKEVKKDLIIKLPKYSLFELENGRKRMLASAGELQKGNELALPSKYVNFLYLASHYEKLKGSPEDNEQKQLFVEQHKHYLDEIIEQISEFSKRVILADANLDKVLSAYNKHRDKPIREQAENIIHLFTLTNLGAPAAFKYFDTTIDRKRYTSTKEVLDATLIHQSITGLYETRIDLSQLGGDGGPAPGSSGGSGGTVSLQDEHRLFDIPVTTSLPDVWLQDFPQAWAETGGLGRAKCQAPIIIDLKPTAVPVSIKQYPMSLEAHMGIRQHIIKFLELGVLRPCRSPWNTPLLPVKKPGTQDYRPVQDLREINKRTVDIHPTVPNPYNLLSTLKPDYSWYTVLDLKDAFFCLPLAPQSQELFAFEWKDPERGISGQLTWTRLPQGFKNSPTLFNEALHRDLTDFRTQHPEVTLLQYVDDLLLAAPTKKACTQGTRHLLQELGEKGYRASAKKAQICQTKVTYLGYILSEGKRWLTPGRIETVARIPPPRNPREVREFLGKAGFCRLFIPGFAELAAPLYALTKPSTPFTWQTEHQLAFEALKKALLSAPALGLPDTSKPFTLFLDERQGIAKGVLTQKLGPWKRPVAYLSKKLDPVAAGWPPCLRIMAATAMLVKDSAKLTLGQPLTVITPHTLEAIVRQPPDRWITNARLTHYQALLLDTDRVQFGPPVTLNPATLLPVPENQPSPHDCRQVLAETHGTREDLKDQELPDADHTWYTDGSSYLDSGTRRAGAAVVDGHNTIWAQSLPPGTSAQKAELIALTKALELSKGKKANIYTDSRYAFATAHTHGSIYERRGWLTSEGKEIKNKAEIIALLKALFLPQEVAIIHCPGHQKGQDPVAVGNRQADRVARQAAMAEVLTLATEPDNTSHITAGKRTADGSEFEKRTADGSEFESPKKKAKVE

SEQ ID NO: 1962-1966 - skipped (5 entries)

SEQ ID NO: 1967 - protein, 2137 aa, synthetic construct
MPAAKRVKLDGGDKKYSIGLDIGTNSVGWAVITDEYKVPSKKFKVLGNTDRHSIKKNLIGALLFDSGETAEATRLKRTARRRYTRRKNRICYLQEIFSNEMAKVDDSFFHRLEESFLVEEDKKHERHPIFGNIVDEVAYHEKYPTIYHLRKKLVDSTDKADLRLIYLALAHMIKFRGHFLIEGDLNPDNSDVDKLFIQLVQTYNQLFEENPINASGVDAKAILSARLSKSRRLENLIAQLPGEKKNGLFGNLIALSLGLTPNFKSNFDLAEDAKLQLSKDTYDDDLDNLLAQIGDQYADLFLAAKNLSDAILLSDILRVNTEITKAPLSASMIKRYDEHHQDLTLLKALVRQQLPEKYKEIFFDQSKNGYAGYIDGGASQEEFYKFIKPILEKMDGTEELLVKLNREDLLRKQRTFDNGSIPHQIHLGELHAILRRQEDFYPFLKDNREKIEKILTFRIPYYVGPLARGNSRFAWMTRKSEETITPWNFEEVVDKGASAQSFIERMTNFDKNLPNEKVLPKHSLLYEYFTVYNELTKVKYVTEGMRKPAFLSGEQKKAIVDLLFKTNRKVTVKQLKEDYFKKIECFDSVEISGVEDRFNASLGTYHDLLKIIKDKDFLDNEENEDILEDIVLTLTLFEDREMIEERLKTYAHLFDDKVMKQLKRRRYTGWGRLSRKLINGIRDKQSGKTILDFLKSDGFANRNFMQLIHDDSLTFKEDIQKAQVSGQGDSLHEHIANLAGSPAIKKGILQTVKVVDELVKVMGRHKPENIVIEMARENQTTQKGQKNSRERMKRIEEGIKELGSQILKEHPVENTQLQNEKLYLYYLQNGRDMYVDQELDINRLSDYDVDHIVPQSFLKDDSIDNKVLTRSDKARGKSDNVPSEEVVKKMKNYWRQLLNAKLITQRKFDNLTKAERGGLSELDKAGFIKRQLVETRQITKHVAQILDSRMNTKYDENDKLIREVKVITLKSKLVSDFRKDFQFYKVREINNYHHAHDAYLNAVVGTALIKKYPKLESEFVYGDYKVYDVRKMIAKSEQEIGKATAKYFFYSNIMNFFKTEITLANGEIRKRPLIETNGETGEIVWDKGRDFATVRKVLSMPQVNIVKKTEVQTGGFSKESILPKRNSDKLIARKKDWDPKKYGGFDSPTVAYSVLVVAKVEKGKSKKLKSVKELLGITIMERSSFEKNPIDFLEAKGYKEVKKDLIIKLPKYSLFELENGRKRMLASAGELQKGNELALPSKYVNFLYLASHYEKLKGSPEDNEQKQLFVEQHKHYLDEIIEQISEFSKRVILADANLDKVLSAYNKHRDKPIREQAENIIHLFTLTNLGAPAAFKYFDTTIDRKRYTSTKEVLDATLIHQSITGLYETRIDLSQLGGDGGAEAAAKEAAAKEAAAKEAAAKALEAEAAAKEAAAKEAAAKEAAAKAGGTVSLQDEHRLFDIPVTTSLPDVWLQDFPQAWAETGGLGRAKCQAPIIIDLKPTAVPVSIKQYPMSLEAHMGIRQHIIKFLELGVLRPCRSPWNTPLLPVKKPGTQDYRPVQDLREINKRTVDIHPTVPNPYNLLSTLKPDYSWYTVLDLKDAFFCLPLAPQSQELFAFEWKDPERGISGQLTWTRLPQGFKNSPTLFNEALHRDLTDFRTQHPEVTLLQYVDDLLLAAPTKKACTQGTRHLLQELGEKGYRASAKKAQICQTKVTYLGYILSEGKRWLTPGRIETVARIPPPRNPREVREFLGKAGFCRLFIPGFAELAAPLYALTKPSTPFTWQTEHQLAFEALKKALLSAPALGLPDTSKPFTLFLDERQGIAKGVLTQKLGPWKRPVAYLSKKLDPVAAGWPPCLRIMAATAMLVKDSAKLTLGQPLTVITPHTLEAIVRQPPDRWITNARLTHYQALLLDTDRVQFGPPVTLNPATLLPVPENQPSPHDCRQVLAETHGTREDLKDQELPDADHTWYTDGSSYLDSGTRRAGAAVVDGHNTIWAQSLPPGTSAQKAELIALTKALELSKGKKANIYTDSRYAFATAHTHGSIYERRGWLTSEGKEIKNKAEIIALLKALFLPQEVAIIHCPGHQKGQDPVAVGNRQADRVARQAAMAEVLTLATEPDNTSHITAGKRTADGSEFEKRTADGSEFESPKKKAKVE

SEQ ID NO: 1968 - protein, 2102 aa, synthetic construct
MPAAKRVKLDGGDKKYSIGLDIGTNSVGWAVITDEYKVPSKKFKVLGNTDRHSIKKNLIGALLFDSGETAEATRLKRTARRRYTRRKNRICYLQEIFSNEMAKVDDSFFHRLEESFLVEEDKKHERHPIFGNIVDEVAYHEKYPTIYHLRKKLVDSTDKADLRLIYLALAHMIKFRGHFLIEGDLNPDNSDVDKLFIQLVQTYNQLFEENPINASGVDAKAILSARLSKSRRLENLIAQLPGEKKNGLFGNLIALSLGLTPNFKSNFDLAEDAKLQLSKDTYDDDLDNLLAQIGDQYADLFLAAKNLSDAILLSDILRVNTEITKAPLSASMIKRYDEHHQDLTLLKALVRQQLPEKYKEIFFDQSKNGYAGYIDGGASQEEFYKFIKPILEKMDGTEELLVKLNREDLLRKQRTFDNGSIPHQIHLGELHAILRRQEDFYPFLKDNREKIEKILTFRIPYYVGPLARGNSRFAWMTRKSEETITPWNFEEVVDKGASAQSFIERMTNFDKNLPNEKVLPKHSLLYEYFTVYNELTKVKYVTEGMRKPAFLSGEQKKAIVDLLFKTNRKVTVKQLKEDYFKKIECFDSVEISGVEDRFNASLGTYHDLLKIIKDKDFLDNEENEDILEDIVLTLTLFEDREMIEERLKTYAHLFDDKVMKQLKRRRYTGWGRLSRKLINGIRDKQSGKTILDFLKSDGFANRNFMQLIHDDSLTFKEDIQKAQVSGQGDSLHEHIANLAGSPAIKKGILQTVKVVDELVKVMGRHKPENIVIEMARENQTTQKGQKNSRERMKRIEEGIKELGSQILKEHPVENTQLQNEKLYLYYLQNGRDMYVDQELDINRLSDYDVDHIVPQSFLKDDSIDNKVLTRSDKARGKSDNVPSEEVVKKMKNYWRQLLNAKLITQRKFDNLTKAERGGLSELDKAGFIKRQLVETRQITKHVAQILDSRMNTKYDENDKLIREVKVITLKSKLVSDFRKDFQFYKVREINNYHHAHDAYLNAVVGTALIKKYPKLESEFVYGDYKVYDVRKMIAKSEQEIGKATAKYFFYSNIMNFFKTEITLANGEIRKRPLIETNGETGEIVWDKGRDFATVRKVLSMPQVNIVKKTEVQTGGFSKESILPKRNSDKLIARKKDWDPKKYGGFDSPTVAYSVLVVAKVEKGKSKKLKSVKELLGITIMERSSFEKNPIDFLEAKGYKEVKKDLIIKLPKYSLFELENGRKRMLASAGELQKGNELALPSKYVNFLYLASHYEKLKGSPEDNEQKQLFVEQHKHYLDEIIEQISEFSKRVILADANLDKVLSAYNKHRDKPIREQAENIIHLFTLTNLGAPAAFKYFDTTIDRKRYTSTKEVLDATLIHQSITGLYETRIDLSQLGGDGGPAPGSSEAAAKGGTVSLQDEHRLFDIPVTTSLPDVWLQDFPQAWAETGGLGRAKCQAPIIIDLKPTAVPVSIKQYPMSLEAHMGIRQHIIKFLELGVLRPCRSPWNTPLLPVKKPGTQDYRPVQDLREINKRTVDIHPTVPNPYNLLSTLKPDYSWYTVLDLKDAFFCLPLAPQSQELFAFEWKDPERGISGQLTWTRLPQGFKNSPTLFNEALHRDLTDFRTQHPEVTLLQYVDDLLLAAPTKKACTQGTRHLLQELGEKGYRASAKKAQICQTKVTYLGYILSEGKRWLTPGRIETVARIPPPRNPREVREFLGKAGFCRLFIPGFAELAAPLYALTKPSTPFTWQTEHQLAFEALKKALLSAPALGLPDTSKPFTLFLDERQGIAKGVLTQKLGPWKRPVAYLSKKLDPVAAGWPPCLRIMAATAMLVKDSAKLTLGQPLTVITPHTLEAIVRQPPDRWITNARLTHYQALLLDTDRVQFGPPVTLNPATLLPVPENQPSPHDCRQVLAETHGTREDLKDQELPDADHTWYTDGSSYLDSGTRRAGAAVVDGHNTIWAQSLPPGTSAQKAELIALTKALELSKGKKANIYTDSRYAFATAHTHGSIYERRGWLTSEGKEIKNKAEIIALLKALFLPQEVAIIHCPGHQKGQDPVAVGNRQADRVARQAAMAEVLTLATEPDNTSHITAGKRTADGSEFEKRTADGSEFESPKKKAKVE

SEQ ID NO: 1969 - skipped

SEQ ID NO: 1970 - protein, 2097 aa, synthetic construct
MPAAKRVKLDGGDKKYSIGLDIGTNSVGWAVITDEYKVPSKKFKVLGNTDRHSIKKNLIGALLFDSGETAEATRLKRTARRRYTRRKNRICYLQEIFSNEMAKVDDSFFHRLEESFLVEEDKKHERHPIFGNIVDEVAYHEKYPTIYHLRKKLVDSTDKADLRLIYLALAHMIKFRGHFLIEGDLNPDNSDVDKLFIQLVQTYNQLFEENPINASGVDAKAILSARLSKSRRLENLIAQLPGEKKNGLFGNLIALSLGLTPNFKSNFDLAEDAKLQLSKDTYDDDLDNLLAQIGDQYADLFLAAKNLSDAILLSDILRVNTEITKAPLSASMIKRYDEHHQDLTLLKALVRQQLPEKYKEIFFDQSKNGYAGYIDGGASQEEFYKFIKPILEKMDGTEELLVKLNREDLLRKQRTFDNGSIPHQIHLGELHAILRRQEDFYPFLKDNREKIEKILTFRIPYYVGPLARGNSRFAWMTRKSEETITPWNFEEVVDKGASAQSFIERMTNFDKNLPNEKVLPKHSLLYEYFTVYNELTKVKYVTEGMRKPAFLSGEQKKAIVDLLFKTNRKVTVKQLKEDYFKKIECFDSVEISGVEDRFNASLGTYHDLLKIIKDKDFLDNEENEDILEDIVLTLTLFEDREMIEERLKTYAHLFDDKVMKQLKRRRYTGWGRLSRKLINGIRDKQSGKTILDFLKSDGFANRNFMQLIHDDSLTFKEDIQKAQVSGQGDSLHEHIANLAGSPAIKKGILQTVKVVDELVKVMGRHKPENIVIEMARENQTTQKGQKNSRERMKRIEEGIKELGSQILKEHPVENTQLQNEKLYLYYLQNGRDMYVDQELDINRLSDYDVDHIVPQSFLKDDSIDNKVLTRSDKARGKSDNVPSEEVVKKMKNYWRQLLNAKLITQRKFDNLTKAERGGLSELDKAGFIKRQLVETRQITKHVAQILDSRMNTKYDENDKLIREVKVITLKSKLVSDFRKDFQFYKVREINNYHHAHDAYLNAVVGTALIKKYPKLESEFVYGDYKVYDVRKMIAKSEQEIGKATAKYFFYSNIMNFFKTEITLANGEIRKRPLIETNGETGEIVWDKGRDFATVRKVLSMPQVNIVKKTEVQTGGFSKESILPKRNSDKLIARKKDWDPKKYGGFDSPTVAYSVLVVAKVEKGKSKKLKSVKELLGITIMERSSFEKNPIDFLEAKGYKEVKKDLIIKLPKYSLFELENGRKRMLASAGELQKGNELALPSKYVNFLYLASHYEKLKGSPEDNEQKQLFVEQHKHYLDEIIEQISEFSKRVILADANLDKVLSAYNKHRDKPIREQAENIIHLFTLTNLGAPAAFKYFDTTIDRKRYTSTKEVLDATLIHQSITGLYETRIDLSQLGGDGGGSSGSSGGTVSLQDEHRLFDIPVTTSLPDVWLQDFPQAWAETGGLGRAKCQAPIIIDLKPTAVPVSIKQYPMSLEAHMGIRQHIIKFLELGVLRPCRSPWNTPLLPVKKPGTQDYRPVQDLREINKRTVDIHPTVPNPYNLLSTLKPDYSWYTVLDLKDAFFCLPLAPQSQELFAFEWKDPERGISGQLTWTRLPQGFKNSPTLFNEALHRDLTDFRTQHPEVTLLQYVDDLLLAAPTKKACTQGTRHLLQELGEKGYRASAKKAQICQTKVTYLGYILSEGKRWLTPGRIETVARIPPPRNPREVREFLGKAGFCRLFIPGFAELAAPLYALTKPSTPFTWQTEHQLAFEALKKALLSAPALGLPDTSKPFTLFLDERQGIAKGVLTQKLGPWKRPVAYLSKKLDPVAAGWPPCLRIMAATAMLVKDSAKLTLGQPLTVITPHTLEAIVRQPPDRWITNARLTHYQALLLDTDRVQFGPPVTLNPATLLPVPENQPSPHDCRQVLAETHGTREDLKDQELPDADHTWYTDGSSYLDSGTRRAGAAVVDGHNTIWAQSLPPGTSAQKAELIALTKALELSKGKKANIYTDSRYAFATAHTHGSIYERRGWLTSEGKEIKNKAEIIALLKALFLPQEVAIIHCPGHQKGQDPVAVGNRQADRVARQAAMAEVLTLATEPDNTSHITAGKRTADGSEFEKRTADGSEFESPKKKAKVE

SEQ ID NO: 1971-1975 - skipped (5 entries)

SEQ ID NO: 1976 - protein, 2100 aa, synthetic construct
MPAAKRVKLDGGDKKYSIGLDIGTNSVGWAVITDEYKVPSKKFKVLGNTDRHSIKKNLIGALLFDSGETAEATRLKRTARRRYTRRKNRICYLQEIFSNEMAKVDDSFFHRLEESFLVEEDKKHERHPIFGNIVDEVAYHEKYPTIYHLRKKLVDSTDKADLRLIYLALAHMIKFRGHFLIEGDLNPDNSDVDKLFIQLVQTYNQLFEENPINASGVDAKAILSARLSKSRRLENLIAQLPGEKKNGLFGNLIALSLGLTPNFKSNFDLAEDAKLQLSKDTYDDDLDNLLAQIGDQYADLFLAAKNLSDAILLSDILRVNTEITKAPLSASMIKRYDEHHQDLTLLKALVRQQLPEKYKEIFFDQSKNGYAGYIDGGASQEEFYKFIKPILEKMDGTEELLVKLNREDLLRKQRTFDNGSIPHQIHLGELHAILRRQEDFYPFLKDNREKIEKILTFRIPYYVGPLARGNSRFAWMTRKSEETITPWNFEEVVDKGASAQSFIERMTNFDKNLPNEKVLPKHSLLYEYFTVYNELTKVKYVTEGMRKPAFLSGEQKKAIVDLLFKTNRKVTVKQLKEDYFKKIECFDSVEISGVEDRFNASLGTYHDLLKIIKDKDFLDNEENEDILEDIVLTLTLFEDREMIEERLKTYAHLFDDKVMKQLKRRRYTGWGRLSRKLINGIRDKQSGKTILDFLKSDGFANRNFMQLIHDDSLTFKEDIQKAQVSGQGDSLHEHIANLAGSPAIKKGILQTVKVVDELVKVMGRHKPENIVIEMARENQTTQKGQKNSRERMKRIEEGIKELGSQILKEHPVENTQLQNEKLYLYYLQNGRDMYVDQELDINRLSDYDVDHIVPQSFLKDDSIDNKVLTRSDKARGKSDNVPSEEVVKKMKNYWRQLLNAKLITQRKFDNLTKAERGGLSELDKAGFIKRQLVETRQITKHVAQILDSRMNTKYDENDKLIREVKVITLKSKLVSDFRKDFQFYKVREINNYHHAHDAYLNAVVGTALIKKYPKLESEFVYGDYKVYDVRKMIAKSEQEIGKATAKYFFYSNIMNFFKTEITLANGEIRKRPLIETNGETGEIVWDKGRDFATVRKVLSMPQVNIVKKTEVQTGGFSKESILPKRNSDKLIARKKDWDPKKYGGFDSPTVAYSVLVVAKVEKGKSKKLKSVKELLGITIMERSSFEKNPIDFLEAKGYKEVKKDLIIKLPKYSLFELENGRKRMLASAGELQKGNELALPSKYVNFLYLASHYEKLKGSPEDNEQKQLFVEQHKHYLDEIIEQISEFSKRVILADANLDKVLSAYNKHRDKPIREQAENIIHLFTLTNLGAPAAFKYFDTTIDRKRYTSTKEVLDATLIHQSITGLYETRIDLSQLGGDGGGGSPAPGGGGGTVSLQDEHRLFDIPVTTSLPDVWLQDFPQAWAETGGLGRAKCQAPIIIDLKPTAVPVSIKQYPMSLEAHMGIRQHIIKFLELGVLRPCRSPWNTPLLPVKKPGTQDYRPVQDLREINKRTVDIHPTVPNPYNLLSTLKPDYSWYTVLDLKDAFFCLPLAPQSQELFAFEWKDPERGISGQLTWTRLPQGFKNSPTLFNEALHRDLTDFRTQHPEVTLLQYVDDLLLAAPTKKACTQGTRHLLQELGEKGYRASAKKAQICQTKVTYLGYILSEGKRWLTPGRIETVARIPPPRNPREVREFLGKAGFCRLFIPGFAELAAPLYALTKPSTPFTWQTEHQLAFEALKKALLSAPALGLPDTSKPFTLFLDERQGIAKGVLTQKLGPWKRPVAYLSKKLDPVAAGWPPCLRIMAATAMLVKDSAKLTLGQPLTVITPHTLEAIVRQPPDRWITNARLTHYQALLLDTDRVQFGPPVTLNPATLLPVPENQPSPHDCRQVLAETHGTREDLKDQELPDADHTWYTDGSSYLDSGTRRAGAAVVDGHNTIWAQSLPPGTSAQKAELIALTKALELSKGKKANIYTDSRYAFATAHTHGSIYERRGWLTSEGKEIKNKAEIIALLKALFLPQEVAIIHCPGHQKGQDPVAVGNRQADRVARQAAMAEVLTLATEPDNTSHITAGKRTADGSEFEKRTADGSEFESPKKKAKVE

SEQ ID NO: 1977 - skipped

SEQ ID NO: 1978 - protein, 2100 aa, synthetic construct
MPAAKRVKLDGGDKKYSIGLDIGTNSVGWAVITDEYKVPSKKFKVLGNTDRHSIKKNLIGALLFDSGETAEATRLKRTARRRYTRRKNRICYLQEIFSNEMAKVDDSFFHRLEESFLVEEDKKHERHPIFGNIVDEVAYHEKYPTIYHLRKKLVDSTDKADLRLIYLALAHMIKFRGHFLIEGDLNPDNSDVDKLFIQLVQTYNQLFEENPINASGVDAKAILSARLSKSRRLENLIAQLPGEKKNGLFGNLIALSLGLTPNFKSNFDLAEDAKLQLSKDTYDDDLDNLLAQIGDQYADLFLAAKNLSDAILLSDILRVNTEITKAPLSASMIKRYDEHHQDLTLLKALVRQQLPEKYKEIFFDQSKNGYAGYIDGGASQEEFYKFIKPILEKMDGTEELLVKLNREDLLRKQRTFDNGSIPHQIHLGELHAILRRQEDFYPFLKDNREKIEKILTFRIPYYVGPLARGNSRFAWMTRKSEETITPWNFEEVVDKGASAQSFIERMTNFDKNLPNEKVLPKHSLLYEYFTVYNELTKVKYVTEGMRKPAFLSGEQKKAIVDLLFKTNRKVTVKQLKEDYFKKIECFDSVEISGVEDRFNASLGTYHDLLKIIKDKDFLDNEENEDILEDIVLTLTLFEDREMIEERLKTYAHLFDDKVMKQLKRRRYTGWGRLSRKLINGIRDKQSGKTILDFLKSDGFANRNFMQLIHDDSLTFKEDIQKAQVSGQGDSLHEHIANLAGSPAIKKGILQTVKVVDELVKVMGRHKPENIVIEMARENQTTQKGQKNSRERMKRIEEGIKELGSQILKEHPVENTQLQNEKLYLYYLQNGRDMYVDQELDINRLSDYDVDHIVPQSFLKDDSIDNKVLTRSDKARGKSDNVPSEEVVKKMKNYWRQLLNAKLITQRKFDNLTKAERGGLSELDKAGFIKRQLVETRQITKHVAQILDSRMNTKYDENDKLIREVKVITLKSKLVSDFRKDFQFYKVREINNYHHAHDAYLNAVVGTALIKKYPKLESEFVYGDYKVYDVRKMIAKSEQEIGKATAKYFFYSNIMNFFKTEITLANGEIRKRPLIETNGETGEIVWDKGRDFATVRKVLSMPQVNIVKKTEVQTGGFSKESILPKRNSDKLIARKKDWDPKKYGGFDSPTVAYSVLVVAKVEKGKSKKLKSVKELLGITIMERSSFEKNPIDFLEAKGYKEVKKDLIIKLPKYSLFELENGRKRMLASAGELQKGNELALPSKYVNFLYLASHYEKLKGSPEDNEQKQLFVEQHKHYLDEIIEQISEFSKRVILADANLDKVLSAYNKHRDKPIREQAENIIHLFTLTNLGAPAAFKYFDTTIDRKRYTSTKEVLDATLIHQSITGLYETRIDLSQLGGDGGPAPAPAPAPGGTVSLQDEHRLFDIPVTTSLPDVWLQDFPQAWAETGGLGRAKCQAPIIIDLKPTAVPVSIKQYPMSLEAHMGIRQHIIKFLELGVLRPCRSPWNTPLLPVKKPGTQDYRPVQDLREINKRTVDIHPTVPNPYNLLSTLKPDYSWYTVLDLKDAFFCLPLAPQSQELFAFEWKDPERGISGQLTWTRLPQGFKNSPTLFNEALHRDLTDFRTQHPEVTLLQYVDDLLLAAPTKKACTQGTRHLLQELGEKGYRASAKKAQICQTKVTYLGYILSEGKRWLTPGRIETVARIPPPRNPREVREFLGKAGFCRLFIPGFAELAAPLYALTKPSTPFTWQTEHQLAFEALKKALLSAPALGLPDTSKPFTLFLDERQGIAKGVLTQKLGPWKRPVAYLSKKLDPVAAGWPPCLRIMAATAMLVKDSAKLTLGQPLTVITPHTLEAIVRQPPDRWITNARLTHYQALLLDTDRVQFGPPVTLNPATLLPVPENQPSPHDCRQVLAETHGTREDLKDQELPDADHTWYTDGSSYLDSGTRRAGAAVVDGHNTIWAQSLPPGTSAQKAELIALTKALELSKGKKANIYTDSRYAFATAHTHGSIYERRGWLTSEGKEIKNKAEIIALLKALFLPQEVAIIHCPGHQKGQDPVAVGNRQADRVARQAAMAEVLTLATEPDNTSHITAGKRTADGSEFEKRTADGSEFESPKKKAKVE

SEQ ID NO: 1979-1990 - skipped (12 entries)

SEQ ID NO: 1991 - protein, 2100 aa, synthetic construct
MPAAKRVKLDGGDKKYSIGLDIGTNSVGWAVITDEYKVPSKKFKVLGNTDRHSIKKNLIGALLFDSGETAEATRLKRTARRRYTRRKNRICYLQEIFSNEMAKVDDSFFHRLEESFLVEEDKKHERHPIFGNIVDEVAYHEKYPTIYHLRKKLVDSTDKADLRLIYLALAHMIKFRGHFLIEGDLNPDNSDVDKLFIQLVQTYNQLFEENPINASGVDAKAILSARLSKSRRLENLIAQLPGEKKNGLFGNLIALSLGLTPNFKSNFDLAEDAKLQLSKDTYDDDLDNLLAQIGDQYADLFLAAKNLSDAILLSDILRVNTEITKAPLSASMIKRYDEHHQDLTLLKALVRQQLPEKYKEIFFDQSKNGYAGYIDGGASQEEFYKFIKPILEKMDGTEELLVKLNREDLLRKQRTFDNGSIPHQIHLGELHAILRRQEDFYPFLKDNREKIEKILTFRIPYYVGPLARGNSRFAWMTRKSEETITPWNFEEVVDKGASAQSFIERMTNFDKNLPNEKVLPKHSLLYEYFTVYNELTKVKYVTEGMRKPAFLSGEQKKAIVDLLFKTNRKVTVKQLKEDYFKKIECFDSVEISGVEDRFNASLGTYHDLLKIIKDKDFLDNEENEDILEDIVLTLTLFEDREMIEERLKTYAHLFDDKVMKQLKRRRYTGWGRLSRKLINGIRDKQSGKTILDFLKSDGFANRNFMQLIHDDSLTFKEDIQKAQVSGQGDSLHEHIANLAGSPAIKKGILQTVKVVDELVKVMGRHKPENIVIEMARENQTTQKGQKNSRERMKRIEEGIKELGSQILKEHPVENTQLQNEKLYLYYLQNGRDMYVDQELDINRLSDYDVDHIVPQSFLKDDSIDNKVLTRSDKARGKSDNVPSEEVVKKMKNYWRQLLNAKLITQRKFDNLTKAERGGLSELDKAGFIKRQLVETRQITKHVAQILDSRMNTKYDENDKLIREVKVITLKSKLVSDFRKDFQFYKVREINNYHHAHDAYLNAVVGTALIKKYPKLESEFVYGDYKVYDVRKMIAKSEQEIGKATAKYFFYSNIMNFFKTEITLANGEIRKRPLIETNGETGEIVWDKGRDFATVRKVLSMPQVNIVKKTEVQTGGFSKESILPKRNSDKLIARKKDWDPKKYGGFDSPTVAYSVLVVAKVEKGKSKKLKSVKELLGITIMERSSFEKNPIDFLEAKGYKEVKKDLIIKLPKYSLFELENGRKRMLASAGELQKGNELALPSKYVNFLYLASHYEKLKGSPEDNEQKQLFVEQHKHYLDEIIEQISEFSKRVILADANLDKVLSAYNKHRDKPIREQAENIIHLFTLTNLGAPAAFKYFDTTIDRKRYTSTKEVLDATLIHQSITGLYETRIDLSQLGGDGGGGGGSSGGSGGTVSLQDEHRLFDIPVTTSLPDVWLQDFPQAWAETGGLGRAKCQAPIIIDLKPTAVPVSIKQYPMSLEAHMGIRQHIIKFLELGVLRPCRSPWNTPLLPVKKPGTQDYRPVQDLREINKRTVDIHPTVPNPYNLLSTLKPDYSWYTVLDLKDAFFCLPLAPQSQELFAFEWKDPERGISGQLTWTRLPQGFKNSPTLFNEALHRDLTDFRTQHPEVTLLQYVDDLLLAAPTKKACTQGTRHLLQELGEKGYRASAKKAQICQTKVTYLGYILSEGKRWLTPGRIETVARIPPPRNPREVREFLGKAGFCRLFIPGFAELAAPLYALTKPSTPFTWQTEHQLAFEALKKALLSAPALGLPDTSKPFTLFLDERQGIAKGVLTQKLGPWKRPVAYLSKKLDPVAAGWPPCLRIMAATAMLVKDSAKLTLGQPLTVITPHTLEAIVRQPPDRWITNARLTHYQALLLDTDRVQFGPPVTLNPATLLPVPENQPSPHDCRQVLAETHGTREDLKDQELPDADHTWYTDGSSYLDSGTRRAGAAVVDGHNTIWAQSLPPGTSAQKAELIALTKALELSKGKKANIYTDSRYAFATAHTHGSIYERRGWLTSEGKEIKNKAEIIALLKALFLPQEVAIIHCPGHQKGQDPVAVGNRQADRVARQAAMAEVLTLATEPDNTSHITAGKRTADGSEFEKRTADGSEFESPKKKAKVE

SEQ ID NO: 1992 - protein, 2106 aa, synthetic construct
MPAAKRVKLDGGDKKYSIGLDIGTNSVGWAVITDEYKVPSKKFKVLGNTDRHSIKKNLIGALLFDSGETAEATRLKRTARRRYTRRKNRICYLQEIFSNEMAKVDDSFFHRLEESFLVEEDKKHERHPIFGNIVDEVAYHEKYPTIYHLRKKLVDSTDKADLRLIYLALAHMIKFRGHFLIEGDLNPDNSDVDKLFIQLVQTYNQLFEENPINASGVDAKAILSARLSKSRRLENLIAQLPGEKKNGLFGNLIALSLGLTPNFKSNFDLAEDAKLQLSKDTYDDDLDNLLAQIGDQYADLFLAAKNLSDAILLSDILRVNTEITKAPLSASMIKRYDEHHQDLTLLKALVRQQLPEKYKEIFFDQSKNGYAGYIDGGASQEEFYKFIKPILEKMDGTEELLVKLNREDLLRKQRTFDNGSIPHQIHLGELHAILRRQEDFYPFLKDNREKIEKILTFRIPYYVGPLARGNSRFAWMTRKSEETITPWNFEEVVDKGASAQSFIERMTNFDKNLPNEKVLPKHSLLYEYFTVYNELTKVKYVTEGMRKPAFLSGEQKKAIVDLLFKTNRKVTVKQLKEDYFKKIECFDSVEISGVEDRFNASLGTYHDLLKIIKDKDFLDNEENEDILEDIVLTLTLFEDREMIEERLKTYAHLFDDKVMKQLKRRRYTGWGRLSRKLINGIRDKQSGKTILDFLKSDGFANRNFMQLIHDDSLTFKEDIQKAQVSGQGDSLHEHIANLAGSPAIKKGILQTVKVVDELVKVMGRHKPENIVIEMARENQTTQKGQKNSRERMKRIEEGIKELGSQILKEHPVENTQLQNEKLYLYYLQNGRDMYVDQELDINRLSDYDVDHIVPQSFLKDDSIDNKVLTRSDKARGKSDNVPSEEVVKKMKNYWRQLLNAKLITQRKFDNLTKAERGGLSELDKAGFIKRQLVETRQITKHVAQILDSRMNTKYDENDKLIREVKVITLKSKLVSDFRKDFQFYKVREINNYHHAHDAYLNAVVGTALIKKYPKLESEFVYGDYKVYDVRKMIAKSEQEIGKATAKYFFYSNIMNFFKTEITLANGEIRKRPLIETNGETGEIVWDKGRDFATVRKVLSMPQVNIVKKTEVQTGGFSKESILPKRNSDKLIARKKDWDPKKYGGFDSPTVAYSVLVVAKVEKGKSKKLKSVKELLGITIMERSSFEKNPIDFLEAKGYKEVKKDLIIKLPKYSLFELENGRKRMLASAGELQKGNELALPSKYVNFLYLASHYEKLKGSPEDNEQKQLFVEQHKHYLDEIIEQISEFSKRVILADANLDKVLSAYNKHRDKPIREQAENIIHLFTLTNLGAPAAFKYFDTTIDRKRYTSTKEVLDATLIHQSITGLYETRIDLSQLGGDGGGGSGGSGGSGGSGGSGGTVSLQDEHRLFDIPVTTSLPDVWLQDFPQAWAETGGLGRAKCQAPIIIDLKPTAVPVSIKQYPMSLEAHMGIRQHIIKFLELGVLRPCRSPWNTPLLPVKKPGTQDYRPVQDLREINKRTVDIHPTVPNPYNLLSTLKPDYSWYTVLDLKDAFFCLPLAPQSQELFAFEWKDPERGISGQLTWTRLPQGFKNSPTLFNEALHRDLTDFRTQHPEVTLLQYVDDLLLAAPTKKACTQGTRHLLQELGEKGYRASAKKAQICQTKVTYLGYILSEGKRWLTPGRIETVARIPPPRNPREVREFLGKAGFCRLFIPGFAELAAPLYALTKPSTPFTWQTEHQLAFEALKKALLSAPALGLPDTSKPFTLFLDERQGIAKGVLTQKLGPWKRPVAYLSKKLDPVAAGWPPCLRIMAATAMLVKDSAKLTLGQPLTVITPHTLEAIVRQPPDRWITNARLTHYQALLLDTDRVQFGPPVTLNPATLLPVPENQPSPHDCRQVLAETHGTREDLKDQELPDADHTWYTDGSSYLDSGTRRAGAAVVDGHNTIWAQSLPPGTSAQKAELIALTKALELSKGKKANIYTDSRYAFATAHTHGSIYERRGWLTSEGKEIKNKAEIIALLKALFLPQEVAIIHCPGHQKGQDPVAVGNRQADRVARQAAMAEVLTLATEPDNTSHITAGKRTADGSEFEKRTADGSEFESPKKKAKVE

SEQ ID NO: 1993-2047 - skipped (55 entries)

SEQ ID NO: 2048 - protein, 2096 aa, synthetic construct
MPAAKRVKLDGGDKKYSIGLDIGTNSVGWAVITDEYKVPSKKFKVLGNTDRHSIKKNLIGALLFDSGETAEATRLKRTARRRYTRRKNRICYLQEIFSNEMAKVDDSFFHRLEESFLVEEDKKHERHPIFGNIVDEVAYHEKYPTIYHLRKKLVDSTDKADLRLIYLALAHMIKFRGHFLIEGDLNPDNSDVDKLFIQLVQTYNQLFEENPINASGVDAKAILSARLSKSRRLENLIAQLPGEKKNGLFGNLIALSLGLTPNFKSNFDLAEDAKLQLSKDTYDDDLDNLLAQIGDQYADLFLAAKNLSDAILLSDILRVNTEITKAPLSASMIKRYDEHHQDLTLLKALVRQQLPEKYKEIFFDQSKNGYAGYIDGGASQEEFYKFIKPILEKMDGTEELLVKLNREDLLRKQRTFDNGSIPHQIHLGELHAILRRQEDFYPFLKDNREKIEKILTFRIPYYVGPLARGNSRFAWMTRKSEETITPWNFEEVVDKGASAQSFIERMTNFDKNLPNEKVLPKHSLLYEYFTVYNELTKVKYVTEGMRKPAFLSGEQKKAIVDLLFKTNRKVTVKQLKEDYFKKIECFDSVEISGVEDRFNASLGTYHDLLKIIKDKDFLDNEENEDILEDIVLTLTLFEDREMIEERLKTYAHLFDDKVMKQLKRRRYTGWGRLSRKLINGIRDKQSGKTILDFLKSDGFANRNFMQLIHDDSLTFKEDIQKAQVSGQGDSLHEHIANLAGSPAIKKGILQTVKVVDELVKVMGRHKPENIVIEMARENQTTQKGQKNSRERMKRIEEGIKELGSQILKEHPVENTQLQNEKLYLYYLQNGRDMYVDQELDINRLSDYDVDHIVPQSFLKDDSIDNKVLTRSDKARGKSDNVPSEEVVKKMKNYWRQLLNAKLITQRKFDNLTKAERGGLSELDKAGFIKRQLVETRQITKHVAQILDSRMNTKYDENDKLIREVKVITLKSKLVSDFRKDFQFYKVREINNYHHAHDAYLNAVVGTALIKKYPKLESEFVYGDYKVYDVRKMIAKSEQEIGKATAKYFFYSNIMNFFKTEITLANGEIRKRPLIETNGETGEIVWDKGRDFATVRKVLSMPQVNIVKKTEVQTGGFSKESILPKRNSDKLIARKKDWDPKKYGGFDSPTVAYSVLVVAKVEKGKSKKLKSVKELLGITIMERSSFEKNPIDFLEAKGYKEVKKDLIIKLPKYSLFELENGRKRMLASAGELQKGNELALPSKYVNFLYLASHYEKLKGSPEDNEQKQLFVEQHKHYLDEIIEQISEFSKRVILADANLDKVLSAYNKHRDKPIREQAENIIHLFTLTNLGAPAAFKYFDTTIDRKRYTSTKEVLDATLIHQSITGLYETRIDLSQLGGDGGPAPGGSEAAAKGGLGIEDEYRLHETSTEPDVSLGSTWLSDFPQAWAETGGMGLAVRQAPLIIPLKATSTPVSIQQYPMSHEARLGIKPHIQRLLDQGILVPCQSPWNTPLLPVKKPGTNDYRPVQDLREVNKRVEDIHPTVPNPYNLLSGLPPSHQWYTVLDLKDAFFCLRLHPTSQPLFAFEWRDPGMGISGQLTWTRLPQGFKNSPTLFNEALHRDLADFRIQHPDLILLQYVDDILLAATSELDCQQGTRALLQTLGDLGYRASAKKAQICQKQVKYLGYLLREGQRWLTEARKETVMGQPVPKTPRQLREFLGKAGFCRLFIPGFAEMAAPLYPLTKPGTLFSWGPDQQKAYQEIKQALLTAPALGLPDLTKPFELFVDEKQGYAKGVLTQKLGPWRRPVAYLSKKLDPVAAGWPPCLRMVAAIAVLTKDAGKLTMGQPLVILAPHAVEALVKQPPDRWLSNARMTHYQAMLLDTDRVQFGPVVALNPATLLPLPEEGAPHDCLEILAETHGTRPDLTDQPIPDADHTWYTDGSSFLQEGQRKAGAAVTTETEVIWAGALPAGTSAQRAELIALTQALKMAEGKRLNVYTDSRYAFATAHIHGEIYRRRGWLTSEGREIKNKSEILALLKALFLPKRLSIIHCLGHQKGDSAEARGNRLADQAAREAAIKTPPDTSTLLIAGKRTADGSEFEKRTADGSEFESPKKKAKVE

SEQ ID NO: 2049 - protein, 2100 aa, synthetic construct
MPAAKRVKLDGGDKKYSIGLDIGTNSVGWAVITDEYKVPSKKFKVLGNTDRHSIKKNLIGALLFDSGETAEATRLKRTARRRYTRRKNRICYLQEIFSNEMAKVDDSFFHRLEESFLVEEDKKHERHPIFGNIVDEVAYHEKYPTIYHLRKKLVDSTDKADLRLIYLALAHMIKFRGHFLIEGDLNPDNSDVDKLFIQLVQTYNQLFEENPINASGVDAKAILSARLSKSRRLENLIAQLPGEKKNGLFGNLIALSLGLTPNFKSNFDLAEDAKLQLSKDTYDDDLDNLLAQIGDQYADLFLAAKNLSDAILLSDILRVNTEITKAPLSASMIKRYDEHHQDLTLLKALVRQQLPEKYKEIFFDQSKNGYAGYIDGGASQEEFYKFIKPILEKMDGTEELLVKLNREDLLRKQRTFDNGSIPHQIHLGELHAILRRQEDFYPFLKDNREKIEKILTFRIPYYVGPLARGNSRFAWMTRKSEETITPWNFEEVVDKGASAQSFIERMTNFDKNLPNEKVLPKHSLLYEYFTVYNELTKVKYVTEGMRKPAFLSGEQKKAIVDLLFKTNRKVTVKQLKEDYFKKIECFDSVEISGVEDRFNASLGTYHDLLKIIKDKDFLDNEENEDILEDIVLTLTLFEDREMIEERLKTYAHLFDDKVMKQLKRRRYTGWGRLSRKLINGIRDKQSGKTILDFLKSDGFANRNFMQLIHDDSLTFKEDIQKAQVSGQGDSLHEHIANLAGSPAIKKGILQTVKVVDELVKVMGRHKPENIVIEMARENQTTQKGQKNSRERMKRIEEGIKELGSQILKEHPVENTQLQNEKLYLYYLQNGRDMYVDQELDINRLSDYDVDHIVPQSFLKDDSIDNKVLTRSDKARGKSDNVPSEEVVKKMKNYWRQLLNAKLITQRKFDNLTKAERGGLSELDKAGFIKRQLVETRQITKHVAQILDSRMNTKYDENDKLIREVKVITLKSKLVSDFRKDFQFYKVREINNYHHAHDAYLNAVVGTALIKKYPKLESEFVYGDYKVYDVRKMIAKSEQEIGKATAKYFFYSNIMNFFKTEITLANGEIRKRPLIETNGETGEIVWDKGRDFATVRKVLSMPQVNIVKKTEVQTGGFSKESILPKRNSDKLIARKKDWDPKKYGGFDSPTVAYSVLVVAKVEKGKSKKLKSVKELLGITIMERSSFEKNPIDFLEAKGYKEVKKDLIIKLPKYSLFELENGRKRMLASAGELQKGNELALPSKYVNFLYLASHYEKLKGSPEDNEQKQLFVEQHKHYLDEIIEQISEFSKRVILADANLDKVLSAYNKHRDKPIREQAENIIHLFTLTNLGAPAAFKYFDTTIDRKRYTSTKEVLDATLIHQSITGLYETRIDLSQLGGDGGEAAAKGGGGSEAAAKGGLGIEDEYRLHETSTEPDVSLGSTWLSDFPQAWAETGGMGLAVRQAPLIIPLKATSTPVSIQQYPMSHEARLGIKPHIQRLLDQGILVPCQSPWNTPLLPVKKPGTNDYRPVQDLREVNKRVEDIHPTVPNPYNLLSGLPPSHQWYTVLDLKDAFFCLRLHPTSQPLFAFEWRDPGMGISGQLTWTRLPQGFKNSPTLFNEALHRDLADFRIQHPDLILLQYVDDILLAATSELDCQQGTRALLQTLGDLGYRASAKKAQICQKQVKYLGYLLREGQRWLTEARKETVMGQPVPKTPRQLREFLGKAGFCRLFIPGFAEMAAPLYPLTKPGTLFSWGPDQQKAYQEIKQALLTAPALGLPDLTKPFELFVDEKQGYAKGVLTQKLGPWRRPVAYLSKKLDPVAAGWPPCLRMVAAIAVLTKDAGKLTMGQPLVILAPHAVEALVKQPPDRWLSNARMTHYQAMLLDTDRVQFGPVVALNPATLLPLPEEGAPHDCLEILAETHGTRPDLTDQPIPDADHTWYTDGSSFLQEGQRKAGAAVTTETEVIWAGALPAGTSAQRAELIALTQALKMAEGKRLNVYTDSRYAFATAHIHGEIYRRRGWLTSEGREIKNKSEILALLKALFLPKRLSIIHCLGHQKGDSAEARGNRLADQAAREAAIKTPPDTSTLLIAGKRTADGSEFEKRTADGSEFESPKKKAKVE

SEQ ID NO: 2050 - protein, 2096 aa, synthetic construct
MPAAKRVKLDGGDKKYSIGLDIGTNSVGWAVITDEYKVPSKKFKVLGNTDRHSIKKNLIGALLFDSGETAEATRLKRTARRRYTRRKNRICYLQEIFSNEMAKVDDSFFHRLEESFLVEEDKKHERHPIFGNIVDEVAYHEKYPTIYHLRKKLVDSTDKADLRLIYLALAHMIKFRGHFLIEGDLNPDNSDVDKLFIQLVQTYNQLFEENPINASGVDAKAILSARLSKSRRLENLIAQLPGEKKNGLFGNLIALSLGLTPNFKSNFDLAEDAKLQLSKDTYDDDLDNLLAQIGDQYADLFLAAKNLSDAILLSDILRVNTEITKAPLSASMIKRYDEHHQDLTLLKALVRQQLPEKYKEIFFDQSKNGYAGYIDGGASQEEFYKFIKPILEKMDGTEELLVKLNREDLLRKQRTFDNGSIPHQIHLGELHAILRRQEDFYPFLKDNREKIEKILTFRIPYYVGPLARGNSRFAWMTRKSEETITPWNFEEVVDKGASAQSFIERMTNFDKNLPNEKVLPKHSLLYEYFTVYNELTKVKYVTEGMRKPAFLSGEQKKAIVDLLFKTNRKVTVKQLKEDYFKKIECFDSVEISGVEDRFNASLGTYHDLLKIIKDKDFLDNEENEDILEDIVLTLTLFEDREMIEERLKTYAHLFDDKVMKQLKRRRYTGWGRLSRKLINGIRDKQSGKTILDFLKSDGFANRNFMQLIHDDSLTFKEDIQKAQVSGQGDSLHEHIANLAGSPAIKKGILQTVKVVDELVKVMGRHKPENIVIEMARENQTTQKGQKNSRERMKRIEEGIKELGSQILKEHPVENTQLQNEKLYLYYLQNGRDMYVDQELDINRLSDYDVDHIVPQSFLKDDSIDNKVLTRSDKARGKSDNVPSEEVVKKMKNYWRQLLNAKLITQRKFDNLTKAERGGLSELDKAGFIKRQLVETRQITKHVAQILDSRMNTKYDENDKLIREVKVITLKSKLVSDFRKDFQFYKVREINNYHHAHDAYLNAVVGTALIKKYPKLESEFVYGDYKVYDVRKMIAKSEQEIGKATAKYFFYSNIMNFFKTEITLANGEIRKRPLIETNGETGEIVWDKGRDFATVRKVLSMPQVNIVKKTEVQTGGFSKESILPKRNSDKLIARKKDWDPKKYGGFDSPTVAYSVLVVAKVEKGKSKKLKSVKELLGITIMERSSFEKNPIDFLEAKGYKEVKKDLIIKLPKYSLFELENGRKRMLASAGELQKGNELALPSKYVNFLYLASHYEKLKGSPEDNEQKQLFVEQHKHYLDEIIEQISEFSKRVILADANLDKVLSAYNKHRDKPIREQAENIIHLFTLTNLGAPAAFKYFDTTIDRKRYTSTKEVLDATLIHQSITGLYETRIDLSQLGGDGGPAPGSSEAAAKGGLGIEDEYRLHETSTEPDVSLGSTWLSDFPQAWAETGGMGLAVRQAPLIIPLKATSTPVSIQQYPMSHEARLGIKPHIQRLLDQGILVPCQSPWNTPLLPVKKPGTNDYRPVQDLREVNKRVEDIHPTVPNPYNLLSGLPPSHQWYTVLDLKDAFFCLRLHPTSQPLFAFEWRDPGMGISGQLTWTRLPQGFKNSPTLFNEALHRDLADFRIQHPDLILLQYVDDILLAATSELDCQQGTRALLQTLGDLGYRASAKKAQICQKQVKYLGYLLREGQRWLTEARKETVMGQPVPKTPRQLREFLGKAGFCRLFIPGFAEMAAPLYPLTKPGTLFSWGPDQQKAYQEIKQALLTAPALGLPDLTKPFELFVDEKQGYAKGVLTQKLGPWRRPVAYLSKKLDPVAAGWPPCLRMVAAIAVLTKDAGKLTMGQPLVILAPHAVEALVKQPPDRWLSNARMTHYQAMLLDTDRVQFGPVVALNPATLLPLPEEGAPHDCLEILAETHGTRPDLTDQPIPDADHTWYTDGSSFLQEGQRKAGAAVTTETEVIWAGALPAGTSAQRAELIALTQALKMAEGKRLNVYTDSRYAFATAHIHGEIYRRRGWLTSEGREIKNKSEILALLKALFLPKRLSIIHCLGHQKGDSAEARGNRLADQAAREAAIKTPPDTSTLLIAGKRTADGSEFEKRTADGSEFESPKKKAKVE

SEQ ID NO: 2051-2053 - skipped (3 entries)

SEQ ID NO: 2054 - protein, 2096 aa, synthetic construct
MPAAKRVKLDGGDKKYSIGLDIGTNSVGWAVITDEYKVPSKKFKVLGNTDRHSIKKNLIGALLFDSGETAEATRLKRTARRRYTRRKNRICYLQEIFSNEMAKVDDSFFHRLEESFLVEEDKKHERHPIFGNIVDEVAYHEKYPTIYHLRKKLVDSTDKADLRLIYLALAHMIKFRGHFLIEGDLNPDNSDVDKLFIQLVQTYNQLFEENPINASGVDAKAILSARLSKSRRLENLIAQLPGEKKNGLFGNLIALSLGLTPNFKSNFDLAEDAKLQLSKDTYDDDLDNLLAQIGDQYADLFLAAKNLSDAILLSDILRVNTEITKAPLSASMIKRYDEHHQDLTLLKALVRQQLPEKYKEIFFDQSKNGYAGYIDGGASQEEFYKFIKPILEKMDGTEELLVKLNREDLLRKQRTFDNGSIPHQIHLGELHAILRRQEDFYPFLKDNREKIEKILTFRIPYYVGPLARGNSRFAWMTRKSEETITPWNFEEVVDKGASAQSFIERMTNFDKNLPNEKVLPKHSLLYEYFTVYNELTKVKYVTEGMRKPAFLSGEQKKAIVDLLFKTNRKVTVKQLKEDYFKKIECFDSVEISGVEDRFNASLGTYHDLLKIIKDKDFLDNEENEDILEDIVLTLTLFEDREMIEERLKTYAHLFDDKVMKQLKRRRYTGWGRLSRKLINGIRDKQSGKTILDFLKSDGFANRNFMQLIHDDSLTFKEDIQKAQVSGQGDSLHEHIANLAGSPAIKKGILQTVKVVDELVKVMGRHKPENIVIEMARENQTTQKGQKNSRERMKRIEEGIKELGSQILKEHPVENTQLQNEKLYLYYLQNGRDMYVDQELDINRLSDYDVDHIVPQSFLKDDSIDNKVLTRSDKARGKSDNVPSEEVVKKMKNYWRQLLNAKLITQRKFDNLTKAERGGLSELDKAGFIKRQLVETRQITKHVAQILDSRMNTKYDENDKLIREVKVITLKSKLVSDFRKDFQFYKVREINNYHHAHDAYLNAVVGTALIKKYPKLESEFVYGDYKVYDVRKMIAKSEQEIGKATAKYFFYSNIMNFFKTEITLANGEIRKRPLIETNGETGEIVWDKGRDFATVRKVLSMPQVNIVKKTEVQTGGFSKESILPKRNSDKLIARKKDWDPKKYGGFDSPTVAYSVLVVAKVEKGKSKKLKSVKELLGITIMERSSFEKNPIDFLEAKGYKEVKKDLIIKLPKYSLFELENGRKRMLASAGELQKGNELALPSKYVNFLYLASHYEKLKGSPEDNEQKQLFVEQHKHYLDEIIEQISEFSKRVILADANLDKVLSAYNKHRDKPIREQAENIIHLFTLTNLGAPAAFKYFDTTIDRKRYTSTKEVLDATLIHQSITGLYETRIDLSQLGGDGGEAAAKGGGPAPGGLGIEDEYRLHETSTEPDVSLGSTWLSDFPQAWAETGGMGLAVRQAPLIIPLKATSTPVSIQQYPMSHEARLGIKPHIQRLLDQGILVPCQSPWNTPLLPVKKPGTNDYRPVQDLREVNKRVEDIHPTVPNPYNLLSGLPPSHQWYTVLDLKDAFFCLRLHPTSQPLFAFEWRDPGMGISGQLTWTRLPQGFKNSPTLFNEALHRDLADFRIQHPDLILLQYVDDILLAATSELDCQQGTRALLQTLGDLGYRASAKKAQICQKQVKYLGYLLREGQRWLTEARKETVMGQPVPKTPRQLREFLGKAGFCRLFIPGFAEMAAPLYPLTKPGTLFSWGPDQQKAYQEIKQALLTAPALGLPDLTKPFELFVDEKQGYAKGVLTQKLGPWRRPVAYLSKKLDPVAAGWPPCLRMVAAIAVLTKDAGKLTMGQPLVILAPHAVEALVKQPPDRWLSNARMTHYQAMLLDTDRVQFGPVVALNPATLLPLPEEGAPHDCLEILAETHGTRPDLTDQPIPDADHTWYTDGSSFLQEGQRKAGAAVTTETEVIWAGALPAGTSAQRAELIALTQALKMAEGKRLNVYTDSRYAFATAHIHGEIYRRRGWLTSEGREIKNKSEILALLKALFLPKRLSIIHCLGHQKGDSAEARGNRLADQAAREAAIKTPPDTSTLLIAGKRTADGSEFEKRTADGSEFESPKKKAKVE

SEQ ID NO: 2055 - protein, 2096 aa, synthetic construct
MPAAKRVKLDGGDKKYSIGLDIGTNSVGWAVITDEYKVPSKKFKVLGNTDRHSIKKNLIGALLFDSGETAEATRLKRTARRRYTRRKNRICYLQEIFSNEMAKVDDSFFHRLEESFLVEEDKKHERHPIFGNIVDEVAYHEKYPTIYHLRKKLVDSTDKADLRLIYLALAHMIKFRGHFLIEGDLNPDNSDVDKLFIQLVQTYNQLFEENPINASGVDAKAILSARLSKSRRLENLIAQLPGEKKNGLFGNLIALSLGLTPNFKSNFDLAEDAKLQLSKDTYDDDLDNLLAQIGDQYADLFLAAKNLSDAILLSDILRVNTEITKAPLSASMIKRYDEHHQDLTLLKALVRQQLPEKYKEIFFDQSKNGYAGYIDGGASQEEFYKFIKPILEKMDGTEELLVKLNREDLLRKQRTFDNGSIPHQIHLGELHAILRRQEDFYPFLKDNREKIEKILTFRIPYYVGPLARGNSRFAWMTRKSEETITPWNFEEVVDKGASAQSFIERMTNFDKNLPNEKVLPKHSLLYEYFTVYNELTKVKYVTEGMRKPAFLSGEQKKAIVDLLFKTNRKVTVKQLKEDYFKKIECFDSVEISGVEDRFNASLGTYHDLLKIIKDKDFLDNEENEDILEDIVLTLTLFEDREMIEERLKTYAHLFDDKVMKQLKRRRYTGWGRLSRKLINGIRDKQSGKTILDFLKSDGFANRNFMQLIHDDSLTFKEDIQKAQVSGQGDSLHEHIANLAGSPAIKKGILQTVKVVDELVKVMGRHKPENIVIEMARENQTTQKGQKNSRERMKRIEEGIKELGSQILKEHPVENTQLQNEKLYLYYLQNGRDMYVDQELDINRLSDYDVDHIVPQSFLKDDSIDNKVLTRSDKARGKSDNVPSEEVVKKMKNYWRQLLNAKLITQRKFDNLTKAERGGLSELDKAGFIKRQLVETRQITKHVAQILDSRMNTKYDENDKLIREVKVITLKSKLVSDFRKDFQFYKVREINNYHHAHDAYLNAVVGTALIKKYPKLESEFVYGDYKVYDVRKMIAKSEQEIGKATAKYFFYSNIMNFFKTEITLANGEIRKRPLIETNGETGEIVWDKGRDFATVRKVLSMPQVNIVKKTEVQTGGFSKESILPKRNSDKLIARKKDWDPKKYGGFDSPTVAYSVLVVAKVEKGKSKKLKSVKELLGITIMERSSFEKNPIDFLEAKGYKEVKKDLIIKLPKYSLFELENGRKRMLASAGELQKGNELALPSKYVNFLYLASHYEKLKGSPEDNEQKQLFVEQHKHYLDEIIEQISEFSKRVILADANLDKVLSAYNKHRDKPIREQAENIIHLFTLTNLGAPAAFKYFDTTIDRKRYTSTKEVLDATLIHQSITGLYETRIDLSQLGGDGGEAAAKGGSGSSGGLGIEDEYRLHETSTEPDVSLGSTWLSDFPQAWAETGGMGLAVRQAPLIIPLKATSTPVSIQQYPMSHEARLGIKPHIQRLLDQGILVPCQSPWNTPLLPVKKPGTNDYRPVQDLREVNKRVEDIHPTVPNPYNLLSGLPPSHQWYTVLDLKDAFFCLRLHPTSQPLFAFEWRDPGMGISGQLTWTRLPQGFKNSPTLFNEALHRDLADFRIQHPDLILLQYVDDILLAATSELDCQQGTRALLQTLGDLGYRASAKKAQICQKQVKYLGYLLREGQRWLTEARKETVMGQPVPKTPRQLREFLGKAGFCRLFIPGFAEMAAPLYPLTKPGTLFSWGPDQQKAYQEIKQALLTAPALGLPDLTKPFELFVDEKQGYAKGVLTQKLGPWRRPVAYLSKKLDPVAAGWPPCLRMVAAIAVLTKDAGKLTMGQPLVILAPHAVEALVKQPPDRWLSNARMTHYQAMLLDTDRVQFGPVVALNPATLLPLPEEGAPHDCLEILAETHGTRPDLTDQPIPDADHTWYTDGSSFLQEGQRKAGAAVTTETEVIWAGALPAGTSAQRAELIALTQALKMAEGKRLNVYTDSRYAFATAHIHGEIYRRRGWLTSEGREIKNKSEILALLKALFLPKRLSIIHCLGHQKGDSAEARGNRLADQAAREAAIKTPPDTSTLLIAGKRTADGSEFEKRTADGSEFESPKKKAKVE

SEQ ID NO: 2056-2057 - skipped (2 entries)

SEQ ID NO: 2058 - protein, 2094 aa, synthetic construct
MPAAKRVKLDGGDKKYSIGLDIGTNSVGWAVITDEYKVPSKKFKVLGNTDRHSIKKNLIGALLFDSGETAEATRLKRTARRRYTRRKNRICYLQEIFSNEMAKVDDSFFHRLEESFLVEEDKKHERHPIFGNIVDEVAYHEKYPTIYHLRKKLVDSTDKADLRLIYLALAHMIKFRGHFLIEGDLNPDNSDVDKLFIQLVQTYNQLFEENPINASGVDAKAILSARLSKSRRLENLIAQLPGEKKNGLFGNLIALSLGLTPNFKSNFDLAEDAKLQLSKDTYDDDLDNLLAQIGDQYADLFLAAKNLSDAILLSDILRVNTEITKAPLSASMIKRYDEHHQDLTLLKALVRQQLPEKYKEIFFDQSKNGYAGYIDGGASQEEFYKFIKPILEKMDGTEELLVKLNREDLLRKQRTFDNGSIPHQIHLGELHAILRRQEDFYPFLKDNREKIEKILTFRIPYYVGPLARGNSRFAWMTRKSEETITPWNFEEVVDKGASAQSFIERMTNFDKNLPNEKVLPKHSLLYEYFTVYNELTKVKYVTEGMRKPAFLSGEQKKAIVDLLFKTNRKVTVKQLKEDYFKKIECFDSVEISGVEDRFNASLGTYHDLLKIIKDKDFLDNEENEDILEDIVLTLTLFEDREMIEERLKTYAHLFDDKVMKQLKRRRYTGWGRLSRKLINGIRDKQSGKTILDFLKSDGFANRNFMQLIHDDSLTFKEDIQKAQVSGQGDSLHEHIANLAGSPAIKKGILQTVKVVDELVKVMGRHKPENIVIEMARENQTTQKGQKNSRERMKRIEEGIKELGSQILKEHPVENTQLQNEKLYLYYLQNGRDMYVDQELDINRLSDYDVDHIVPQSFLKDDSIDNKVLTRSDKARGKSDNVPSEEVVKKMKNYWRQLLNAKLITQRKFDNLTKAERGGLSELDKAGFIKRQLVETRQITKHVAQILDSRMNTKYDENDKLIREVKVITLKSKLVSDFRKDFQFYKVREINNYHHAHDAYLNAVVGTALIKKYPKLESEFVYGDYKVYDVRKMIAKSEQEIGKATAKYFFYSNIMNFFKTEITLANGEIRKRPLIETNGETGEIVWDKGRDFATVRKVLSMPQVNIVKKTEVQTGGFSKESILPKRNSDKLIARKKDWDPKKYGGFDSPTVAYSVLVVAKVEKGKSKKLKSVKELLGITIMERSSFEKNPIDFLEAKGYKEVKKDLIIKLPKYSLFELENGRKRMLASAGELQKGNELALPSKYVNFLYLASHYEKLKGSPEDNEQKQLFVEQHKHYLDEIIEQISEFSKRVILADANLDKVLSAYNKHRDKPIREQAENIIHLFTLTNLGAPAAFKYFDTTIDRKRYTSTKEVLDATLIHQSITGLYETRIDLSQLGGDGGGGSPAPGGGGGLGIEDEYRLHETSTEPDVSLGSTWLSDFPQAWAETGGMGLAVRQAPLIIPLKATSTPVSIQQYPMSHEARLGIKPHIQRLLDQGILVPCQSPWNTPLLPVKKPGTNDYRPVQDLREVNKRVEDIHPTVPNPYNLLSGLPPSHQWYTVLDLKDAFFCLRLHPTSQPLFAFEWRDPGMGISGQLTWTRLPQGFKNSPTLFNEALHRDLADFRIQHPDLILLQYVDDILLAATSELDCQQGTRALLQTLGDLGYRASAKKAQICQKQVKYLGYLLREGQRWLTEARKETVMGQPVPKTPRQLREFLGKAGFCRLFIPGFAEMAAPLYPLTKPGTLFSWGPDQQKAYQEIKQALLTAPALGLPDLTKPFELFVDEKQGYAKGVLTQKLGPWRRPVAYLSKKLDPVAAGWPPCLRMVAAIAVLTKDAGKLTMGQPLVILAPHAVEALVKQPPDRWLSNARMTHYQAMLLDTDRVQFGPVVALNPATLLPLPEEGAPHDCLEILAETHGTRPDLTDQPIPDADHTWYTDGSSFLQEGQRKAGAAVTTETEVIWAGALPAGTSAQRAELIALTQALKMAEGKRLNVYTDSRYAFATAHIHGEIYRRRGWLTSEGREIKNKSEILALLKALFLPKRLSIIHCLGHQKGDSAEARGNRLADQAAREAAIKTPPDTSTLLIAGKRTADGSEFEKRTADGSEFESPKKKAKVE

SEQ ID NO: 2059 - skipped

SEQ ID NO: 2060 - protein, 2094 aa, synthetic construct
MPAAKRVKLDGGDKKYSIGLDIGTNSVGWAVITDEYKVPSKKFKVLGNTDRHSIKKNLIGALLFDSGETAEATRLKRTARRRYTRRKNRICYLQEIFSNEMAKVDDSFFHRLEESFLVEEDKKHERHPIFGNIVDEVAYHEKYPTIYHLRKKLVDSTDKADLRLIYLALAHMIKFRGHFLIEGDLNPDNSDVDKLFIQLVQTYNQLFEENPINASGVDAKAILSARLSKSRRLENLIAQLPGEKKNGLFGNLIALSLGLTPNFKSNFDLAEDAKLQLSKDTYDDDLDNLLAQIGDQYADLFLAAKNLSDAILLSDILRVNTEITKAPLSASMIKRYDEHHQDLTLLKALVRQQLPEKYKEIFFDQSKNGYAGYIDGGASQEEFYKFIKPILEKMDGTEELLVKLNREDLLRKQRTFDNGSIPHQIHLGELHAILRRQEDFYPFLKDNREKIEKILTFRIPYYVGPLARGNSRFAWMTRKSEETITPWNFEEVVDKGASAQSFIERMTNFDKNLPNEKVLPKHSLLYEYFTVYNELTKVKYVTEGMRKPAFLSGEQKKAIVDLLFKTNRKVTVKQLKEDYFKKIECFDSVEISGVEDRFNASLGTYHDLLKIIKDKDFLDNEENEDILEDIVLTLTLFEDREMIEERLKTYAHLFDDKVMKQLKRRRYTGWGRLSRKLINGIRDKQSGKTILDFLKSDGFANRNFMQLIHDDSLTFKEDIQKAQVSGQGDSLHEHIANLAGSPAIKKGILQTVKVVDELVKVMGRHKPENIVIEMARENQTTQKGQKNSRERMKRIEEGIKELGSQILKEHPVENTQLQNEKLYLYYLQNGRDMYVDQELDINRLSDYDVDHIVPQSFLKDDSIDNKVLTRSDKARGKSDNVPSEEVVKKMKNYWRQLLNAKLITQRKFDNLTKAERGGLSELDKAGFIKRQLVETRQITKHVAQILDSRMNTKYDENDKLIREVKVITLKSKLVSDFRKDFQFYKVREINNYHHAHDAYLNAVVGTALIKKYPKLESEFVYGDYKVYDVRKMIAKSEQEIGKATAKYFFYSNIMNFFKTEITLANGEIRKRPLIETNGETGEIVWDKGRDFATVRKVLSMPQVNIVKKTEVQTGGFSKESILPKRNSDKLIARKKDWDPKKYGGFDSPTVAYSVLVVAKVEKGKSKKLKSVKELLGITIMERSSFEKNPIDFLEAKGYKEVKKDLIIKLPKYSLFELENGRKRMLASAGELQKGNELALPSKYVNFLYLASHYEKLKGSPEDNEQKQLFVEQHKHYLDEIIEQISEFSKRVILADANLDKVLSAYNKHRDKPIREQAENIIHLFTLTNLGAPAAFKYFDTTIDRKRYTSTKEVLDATLIHQSITGLYETRIDLSQLGGDGGGSSPAPGGGGGLGIEDEYRLHETSTEPDVSLGSTWLSDFPQAWAETGGMGLAVRQAPLIIPLKATSTPVSIQQYPMSHEARLGIKPHIQRLLDQGILVPCQSPWNTPLLPVKKPGTNDYRPVQDLREVNKRVEDIHPTVPNPYNLLSGLPPSHQWYTVLDLKDAFFCLRLHPTSQPLFAFEWRDPGMGISGQLTWTRLPQGFKNSPTLFNEALHRDLADFRIQHPDLILLQYVDDILLAATSELDCQQGTRALLQTLGDLGYRASAKKAQICQKQVKYLGYLLREGQRWLTEARKETVMGQPVPKTPRQLREFLGKAGFCRLFIPGFAEMAAPLYPLTKPGTLFSWGPDQQKAYQEIKQALLTAPALGLPDLTKPFELFVDEKQGYAKGVLTQKLGPWRRPVAYLSKKLDPVAAGWPPCLRMVAAIAVLTKDAGKLTMGQPLVILAPHAVEALVKQPPDRWLSNARMTHYQAMLLDTDRVQFGPVVALNPATLLPLPEEGAPHDCLEILAETHGTRPDLTDQPIPDADHTWYTDGSSFLQEGQRKAGAAVTTETEVIWAGALPAGTSAQRAELIALTQALKMAEGKRLNVYTDSRYAFATAHIHGEIYRRRGWLTSEGREIKNKSEILALLKALFLPKRLSIIHCLGHQKGDSAEARGNRLADQAAREAAIKTPPDTSTLLIAGKRTADGSEFEKRTADGSEFESPKKKAKVE

SEQ ID NO: 2061-2084 - skipped (24 entries)

SEQ ID NO: 2085 - protein, 2105 aa, synthetic construct
MPAAKRVKLDGGDKKYSIGLDIGTNSVGWAVITDEYKVPSKKFKVLGNTDRHSIKKNLIGALLFDSGETAEATRLKRTARRRYTRRKNRICYLQEIFSNEMAKVDDSFFHRLEESFLVEEDKKHERHPIFGNIVDEVAYHEKYPTIYHLRKKLVDSTDKADLRLIYLALAHMIKFRGHFLIEGDLNPDNSDVDKLFIQLVQTYNQLFEENPINASGVDAKAILSARLSKSRRLENLIAQLPGEKKNGLFGNLIALSLGLTPNFKSNFDLAEDAKLQLSKDTYDDDLDNLLAQIGDQYADLFLAAKNLSDAILLSDILRVNTEITKAPLSASMIKRYDEHHQDLTLLKALVRQQLPEKYKEIFFDQSKNGYAGYIDGGASQEEFYKFIKPILEKMDGTEELLVKLNREDLLRKQRTFDNGSIPHQIHLGELHAILRRQEDFYPFLKDNREKIEKILTFRIPYYVGPLARGNSRFAWMTRKSEETITPWNFEEVVDKGASAQSFIERMTNFDKNLPNEKVLPKHSLLYEYFTVYNELTKVKYVTEGMRKPAFLSGEQKKAIVDLLFKTNRKVTVKQLKEDYFKKIECFDSVEISGVEDRFNASLGTYHDLLKIIKDKDFLDNEENEDILEDIVLTLTLFEDREMIEERLKTYAHLFDDKVMKQLKRRRYTGWGRLSRKLINGIRDKQSGKTILDFLKSDGFANRNFMQLIHDDSLTFKEDIQKAQVSGQGDSLHEHIANLAGSPAIKKGILQTVKVVDELVKVMGRHKPENIVIEMARENQTTQKGQKNSRERMKRIEEGIKELGSQILKEHPVENTQLQNEKLYLYYLQNGRDMYVDQELDINRLSDYDVDHIVPQSFLKDDSIDNKVLTRSDKARGKSDNVPSEEVVKKMKNYWRQLLNAKLITQRKFDNLTKAERGGLSELDKAGFIKRQLVETRQITKHVAQILDSRMNTKYDENDKLIREVKVITLKSKLVSDFRKDFQFYKVREINNYHHAHDAYLNAVVGTALIKKYPKLESEFVYGDYKVYDVRKMIAKSEQEIGKATAKYFFYSNIMNFFKTEITLANGEIRKRPLIETNGETGEIVWDKGRDFATVRKVLSMPQVNIVKKTEVQTGGFSKESILPKRNSDKLIARKKDWDPKKYGGFDSPTVAYSVLVVAKVEKGKSKKLKSVKELLGITIMERSSFEKNPIDFLEAKGYKEVKKDLIIKLPKYSLFELENGRKRMLASAGELQKGNELALPSKYVNFLYLASHYEKLKGSPEDNEQKQLFVEQHKHYLDEIIEQISEFSKRVILADANLDKVLSAYNKHRDKPIREQAENIIHLFTLTNLGAPAAFKYFDTTIDRKRYTSTKEVLDATLIHQSITGLYETRIDLSQLGGDGGGGGGSGGGGSGGGGSGGGGSGGLGIEDEYRLHETSTEPDVSLGSTWLSDFPQAWAETGGMGLAVRQAPLIIPLKATSTPVSIQQYPMSHEARLGIKPHIQRLLDQGILVPCQSPWNTPLLPVKKPGTNDYRPVQDLREVNKRVEDIHPTVPNPYNLLSGLPPSHQWYTVLDLKDAFFCLRLHPTSQPLFAFEWRDPGMGISGQLTWTRLPQGFKNSPTLFNEALHRDLADFRIQHPDLILLQYVDDILLAATSELDCQQGTRALLQTLGDLGYRASAKKAQICQKQVKYLGYLLREGQRWLTEARKETVMGQPVPKTPRQLREFLGKAGFCRLFIPGFAEMAAPLYPLTKPGTLFSWGPDQQKAYQEIKQALLTAPALGLPDLTKPFELFVDEKQGYAKGVLTQKLGPWRRPVAYLSKKLDPVAAGWPPCLRMVAAIAVLTKDAGKLTMGQPLVILAPHAVEALVKQPPDRWLSNARMTHYQAMLLDTDRVQFGPVVALNPATLLPLPEEGAPHDCLEILAETHGTRPDLTDQPIPDADHTWYTDGSSFLQEGQRKAGAAVTTETEVIWAGALPAGTSAQRAELIALTQALKMAEGKRLNVYTDSRYAFATAHIHGEIYRRRGWLTSEGREIKNKSEILALLKALFLPKRLSIIHCLGHQKGDSAEARGNRLADQAAREAAIKTPPDTSTLLIAGKRTADGSEFEKRTADGSEFESPKKKAKVE

SEQ ID NO: 2086 - protein, 2110 aa, synthetic construct
MPAAKRVKLDGGDKKYSIGLDIGTNSVGWAVITDEYKVPSKKFKVLGNTDRHSIKKNLIGALLFDSGETAEATRLKRTARRRYTRRKNRICYLQEIFSNEMAKVDDSFFHRLEESFLVEEDKKHERHPIFGNIVDEVAYHEKYPTIYHLRKKLVDSTDKADLRLIYLALAHMIKFRGHFLIEGDLNPDNSDVDKLFIQLVQTYNQLFEENPINASGVDAKAILSARLSKSRRLENLIAQLPGEKKNGLFGNLIALSLGLTPNFKSNFDLAEDAKLQLSKDTYDDDLDNLLAQIGDQYADLFLAAKNLSDAILLSDILRVNTEITKAPLSASMIKRYDEHHQDLTLLKALVRQQLPEKYKEIFFDQSKNGYAGYIDGGASQEEFYKFIKPILEKMDGTEELLVKLNREDLLRKQRTFDNGSIPHQIHLGELHAILRRQEDFYPFLKDNREKIEKILTFRIPYYVGPLARGNSRFAWMTRKSEETITPWNFEEVVDKGASAQSFIERMTNFDKNLPNEKVLPKHSLLYEYFTVYNELTKVKYVTEGMRKPAFLSGEQKKAIVDLLFKTNRKVTVKQLKEDYFKKIECFDSVEISGVEDRFNASLGTYHDLLKIIKDKDFLDNEENEDILEDIVLTLTLFEDREMIEERLKTYAHLFDDKVMKQLKRRRYTGWGRLSRKLINGIRDKQSGKTILDFLKSDGFANRNFMQLIHDDSLTFKEDIQKAQVSGQGDSLHEHIANLAGSPAIKKGILQTVKVVDELVKVMGRHKPENIVIEMARENQTTQKGQKNSRERMKRIEEGIKELGSQILKEHPVENTQLQNEKLYLYYLQNGRDMYVDQELDINRLSDYDVDHIVPQSFLKDDSIDNKVLTRSDKARGKSDNVPSEEVVKKMKNYWRQLLNAKLITQRKFDNLTKAERGGLSELDKAGFIKRQLVETRQITKHVAQILDSRMNTKYDENDKLIREVKVITLKSKLVSDFRKDFQFYKVREINNYHHAHDAYLNAVVGTALIKKYPKLESEFVYGDYKVYDVRKMIAKSEQEIGKATAKYFFYSNIMNFFKTEITLANGEIRKRPLIETNGETGEIVWDKGRDFATVRKVLSMPQVNIVKKTEVQTGGFSKESILPKRNSDKLIARKKDWDPKKYGGFDSPTVAYSVLVVAKVEKGKSKKLKSVKELLGITIMERSSFEKNPIDFLEAKGYKEVKKDLIIKLPKYSLFELENGRKRMLASAGELQKGNELALPSKYVNFLYLASHYEKLKGSPEDNEQKQLFVEQHKHYLDEIIEQISEFSKRVILADANLDKVLSAYNKHRDKPIREQAENIIHLFTLTNLGAPAAFKYFDTTIDRKRYTSTKEVLDATLIHQSITGLYETRIDLSQLGGDGGEAAAKEAAAKEAAAKEAAAKEAAAKGGLGIEDEYRLHETSTEPDVSLGSTWLSDFPQAWAETGGMGLAVRQAPLIIPLKATSTPVSIQQYPMSHEARLGIKPHIQRLLDQGILVPCQSPWNTPLLPVKKPGTNDYRPVQDLREVNKRVEDIHPTVPNPYNLLSGLPPSHQWYTVLDLKDAFFCLRLHPTSQPLFAFEWRDPGMGISGQLTWTRLPQGFKNSPTLFNEALHRDLADFRIQHPDLILLQYVDDILLAATSELDCQQGTRALLQTLGDLGYRASAKKAQICQKQVKYLGYLLREGQRWLTEARKETVMGQPVPKTPRQLREFLGKAGFCRLFIPGFAEMAAPLYPLTKPGTLFSWGPDQQKAYQEIKQALLTAPALGLPDLTKPFELFVDEKQGYAKGVLTQKLGPWRRPVAYLSKKLDPVAAGWPPCLRMVAAIAVLTKDAGKLTMGQPLVILAPHAVEALVKQPPDRWLSNARMTHYQAMLLDTDRVQFGPVVALNPATLLPLPEEGAPHDCLEILAETHGTRPDLTDQPIPDADHTWYTDGSSFLQEGQRKAGAAVTTETEVIWAGALPAGTSAQRAELIALTQALKMAEGKRLNVYTDSRYAFATAHIHGEIYRRRGWLTSEGREIKNKSEILALLKALFLPKRLSIIHCLGHQKGDSAEARGNRLADQAAREAAIKTPPDTSTLLIAGKRTADGSEFEKRTADGSEFESPKKKAKVE

SEQ ID NO: 2087 - protein, 2098 aa, synthetic construct
MPAAKRVKLDGGDKKYSIGLDIGTNSVGWAVITDEYKVPSKKFKVLGNTDRHSIKKNLIGALLFDSGETAEATRLKRTARRRYTRRKNRICYLQEIFSNEMAKVDDSFFHRLEESFLVEEDKKHERHPIFGNIVDEVAYHEKYPTIYHLRKKLVDSTDKADLRLIYLALAHMIKFRGHFLIEGDLNPDNSDVDKLFIQLVQTYNQLFEENPINASGVDAKAILSARLSKSRRLENLIAQLPGEKKNGLFGNLIALSLGLTPNFKSNFDLAEDAKLQLSKDTYDDDLDNLLAQIGDQYADLFLAAKNLSDAILLSDILRVNTEITKAPLSASMIKRYDEHHQDLTLLKALVRQQLPEKYKEIFFDQSKNGYAGYIDGGASQEEFYKFIKPILEKMDGTEELLVKLNREDLLRKQRTFDNGSIPHQIHLGELHAILRRQEDFYPFLKDNREKIEKILTFRIPYYVGPLARGNSRFAWMTRKSEETITPWNFEEVVDKGASAQSFIERMTNFDKNLPNEKVLPKHSLLYEYFTVYNELTKVKYVTEGMRKPAFLSGEQKKAIVDLLFKTNRKVTVKQLKEDYFKKIECFDSVEISGVEDRFNASLGTYHDLLKIIKDKDFLDNEENEDILEDIVLTLTLFEDREMIEERLKTYAHLFDDKVMKQLKRRRYTGWGRLSRKLINGIRDKQSGKTILDFLKSDGFANRNFMQLIHDDSLTFKEDIQKAQVSGQGDSLHEHIANLAGSPAIKKGILQTVKVVDELVKVMGRHKPENIVIEMARENQTTQKGQKNSRERMKRIEEGIKELGSQILKEHPVENTQLQNEKLYLYYLQNGRDMYVDQELDINRLSDYDVDHIVPQSFLKDDSIDNKVLTRSDKARGKSDNVPSEEVVKKMKNYWRQLLNAKLITQRKFDNLTKAERGGLSELDKAGFIKRQLVETRQITKHVAQILDSRMNTKYDENDKLIREVKVITLKSKLVSDFRKDFQFYKVREINNYHHAHDAYLNAVVGTALIKKYPKLESEFVYGDYKVYDVRKMIAKSEQEIGKATAKYFFYSNIMNFFKTEITLANGEIRKRPLIETNGETGEIVWDKGRDFATVRKVLSMPQVNIVKKTEVQTGGFSKESILPKRNSDKLIARKKDWDPKKYGGFDSPTVAYSVLVVAKVEKGKSKKLKSVKELLGITIMERSSFEKNPIDFLEAKGYKEVKKDLIIKLPKYSLFELENGRKRMLASAGELQKGNELALPSKYVNFLYLASHYEKLKGSPEDNEQKQLFVEQHKHYLDEIIEQISEFSKRVILADANLDKVLSAYNKHRDKPIREQAENIIHLFTLTNLGAPAAFKYFDTTIDRKRYTSTKEVLDATLIHQSITGLYETRIDLSQLGGDGGPAPAPAPAPAPAPGGLGIEDEYRLHETSTEPDVSLGSTWLSDFPQAWAETGGMGLAVRQAPLIIPLKATSTPVSIQQYPMSHEARLGIKPHIQRLLDQGILVPCQSPWNTPLLPVKKPGTNDYRPVQDLREVNKRVEDIHPTVPNPYNLLSGLPPSHQWYTVLDLKDAFFCLRLHPTSQPLFAFEWRDPGMGISGQLTWTRLPQGFKNSPTLFNEALHRDLADFRIQHPDLILLQYVDDILLAATSELDCQQGTRALLQTLGDLGYRASAKKAQICQKQVKYLGYLLREGQRWLTEARKETVMGQPVPKTPRQLREFLGKAGFCRLFIPGFAEMAAPLYPLTKPGTLFSWGPDQQKAYQEIKQALLTAPALGLPDLTKPFELFVDEKQGYAKGVLTQKLGPWRRPVAYLSKKLDPVAAGWPPCLRMVAAIAVLTKDAGKLTMGQPLVILAPHAVEALVKQPPDRWLSNARMTHYQAMLLDTDRVQFGPVVALNPATLLPLPEEGAPHDCLEILAETHGTRPDLTDQPIPDADHTWYTDGSSFLQEGQRKAGAAVTTETEVIWAGALPAGTSAQRAELIALTQALKMAEGKRLNVYTDSRYAFATAHIHGEIYRRRGWLTSEGREIKNKSEILALLKALFLPKRLSIIHCLGHQKGDSAEARGNRLADQAAREAAIKTPPDTSTLLIAGKRTADGSEFEKRTADGSEFESPKKKAKVE

SEQ ID NO: 2088 - skipped

SEQ ID NO: 2089 - protein, 2096 aa, synthetic construct; identical to SEQ ID NO: 2050

SEQ ID NO: 2090 - protein, 2100 aa, synthetic construct; identical to SEQ ID NO: 2049

SEQ ID NO: 2091 - protein, 2094 aa, synthetic construct
MPAAKRVKLDGGDKKYSIGLDIGTNSVGWAVITDEYKVPSKKFKVLGNTDRHSIKKNLIGALLFDSGETAEATRLKRTARRRYTRRKNRICYLQEIFSNEMAKVDDSFFHRLEESFLVEEDKKHERHPIFGNIVDEVAYHEKYPTIYHLRKKLVDSTDKADLRLIYLALAHMIKFRGHFLIEGDLNPDNSDVDKLFIQLVQTYNQLFEENPINASGVDAKAILSARLSKSRRLENLIAQLPGEKKNGLFGNLIALSLGLTPNFKSNFDLAEDAKLQLSKDTYDDDLDNLLAQIGDQYADLFLAAKNLSDAILLSDILRVNTEITKAPLSASMIKRYDEHHQDLTLLKALVRQQLPEKYKEIFFDQSKNGYAGYIDGGASQEEFYKFIKPILEKMDGTEELLVKLNREDLLRKQRTFDNGSIPHQIHLGELHAILRRQEDFYPFLKDNREKIEKILTFRIPYYVGPLARGNSRFAWMTRKSEETITPWNFEEVVDKGASAQSFIERMTNFDKNLPNEKVLPKHSLLYEYFTVYNELTKVKYVTEGMRKPAFLSGEQKKAIVDLLFKTNRKVTVKQLKEDYFKKIECFDSVEISGVEDRFNASLGTYHDLLKIIKDKDFLDNEENEDILEDIVLTLTLFEDREMIEERLKTYAHLFDDKVMKQLKRRRYTGWGRLSRKLINGIRDKQSGKTILDFLKSDGFANRNFMQLIHDDSLTFKEDIQKAQVSGQGDSLHEHIANLAGSPAIKKGILQTVKVVDELVKVMGRHKPENIVIEMARENQTTQKGQKNSRERMKRIEEGIKELGSQILKEHPVENTQLQNEKLYLYYLQNGRDMYVDQELDINRLSDYDVDHIVPQSFLKDDSIDNKVLTRSDKARGKSDNVPSEEVVKKMKNYWRQLLNAKLITQRKFDNLTKAERGGLSELDKAGFIKRQLVETRQITKHVAQILDSRMNTKYDENDKLIREVKVITLKSKLVSDFRKDFQFYKVREINNYHHAHDAYLNAVVGTALIKKYPKLESEFVYGDYKVYDVRKMIAKSEQEIGKATAKYFFYSNIMNFFKTEITLANGEIRKRPLIETNGETGEIVWDKGRDFATVRKVLSMPQVNIVKKTEVQTGGFSKESILPKRNSDKLIARKKDWDPKKYGGFDSPTVAYSVLVVAKVEKGKSKKLKSVKELLGITIMERSSFEKNPIDFLEAKGYKEVKKDLIIKLPKYSLFELENGRKRMLASAGELQKGNELALPSKYVNFLYLASHYEKLKGSPEDNEQKQLFVEQHKHYLDEIIEQISEFSKRVILADANLDKVLSAYNKHRDKPIREQAENIIHLFTLTNLGAPAAFKYFDTTIDRKRYTSTKEVLDATLIHQSITGLYETRIDLSQLGGDGGPAPGSSGGGGGLGIEDEYRLHETSTEPDVSLGSTWLSDFPQAWAETGGMGLAVRQAPLIIPLKATSTPVSIQQYPMSHEARLGIKPHIQRLLDQGILVPCQSPWNTPLLPVKKPGTNDYRPVQDLREVNKRVEDIHPTVPNPYNLLSGLPPSHQWYTVLDLKDAFFCLRLHPTSQPLFAFEWRDPGMGISGQLTWTRLPQGFKNSPTLFNEALHRDLADFRIQHPDLILLQYVDDILLAATSELDCQQGTRALLQTLGDLGYRASAKKAQICQKQVKYLGYLLREGQRWLTEARKETVMGQPVPKTPRQLREFLGKAGFCRLFIPGFAEMAAPLYPLTKPGTLFSWGPDQQKAYQEIKQALLTAPALGLPDLTKPFELFVDEKQGYAKGVLTQKLGPWRRPVAYLSKKLDPVAAGWPPCLRMVAAIAVLTKDAGKLTMGQPLVILAPHAVEALVKQPPDRWLSNARMTHYQAMLLDTDRVQFGPVVALNPATLLPLPEEGAPHDCLEILAETHGTRPDLTDQPIPDADHTWYTDGSSFLQEGQRKAGAAVTTETEVIWAGALPAGTSAQRAELIALTQALKMAEGKRLNVYTDSRYAFATAHIHGEIYRRRGWLTSEGREIKNKSEILALLKALFLPKRLSIIHCLGHQKGDSAEARGNRLADQAAREAAIKTPPDTSTLLIAGKRTADGSEFEKRTADGSEFESPKKKAKVE

SEQ ID NO: 2092 - protein, 2105 aa, synthetic construct
MPAAKRVKLDGGDKKYSIGLDIGTNSVGWAVITDEYKVPSKKFKVLGNTDRHSIKKNLIGALLFDSGETAEATRLKRTARRRYTRRKNRICYLQEIFSNEMAKVDDSFFHRLEESFLVEEDKKHERHPIFGNIVDEVAYHEKYPTIYHLRKKLVDSTDKADLRLIYLALAHMIKFRGHFLIEGDLNPDNSDVDKLFIQLVQTYNQLFEENPINASGVDAKAILSARLSKSRRLENLIAQLPGEKKNGLFGNLIALSLGLTPNFKSNFDLAEDAKLQLSKDTYDDDLDNLLAQIGDQYADLFLAAKNLSDAILLSDILRVNTEITKAPLSASMIKRYDEHHQDLTLLKALVRQQLPEKYKEIFFDQSKNGYAGYIDGGASQEEFYKFIKPILEKMDGTEELLVKLNREDLLRKQRTFDNGSIPHQIHLGELHAILRRQEDFYPFLKDNREKIEKILTFRIPYYVGPLARGNSRFAWMTRKSEETITPWNFEEVVDKGASAQSFIERMTNFDKNLPNEKVLPKHSLLYEYFTVYNELTKVKYVTEGMRKPAFLSGEQKKAIVDLLFKTNRKVTVKQLKEDYFKKIECFDSVEISGVEDRFNASLGTYHDLLKIIKDKDFLDNEENEDILEDIVLTLTLFEDREMIEERLKTYAHLFDDKVMKQLKRRRYTGWGRLSRKLINGIRDKQSGKTILDFLKSDGFANRNFMQLIHDDSLTFKEDIQKAQVSGQGDSLHEHIANLAGSPAIKKGILQTVKVVDELVKVMGRHKPENIVIEMARENQTTQKGQKNSRERMKRIEEGIKELGSQILKEHPVENTQLQNEKLYLYYLQNGRDMYVDQELDINRLSDYDVDHIVPQSFLKDDSIDNKVLTRSDKARGKSDNVPSEEVVKKMKNYWRQLLNAKLITQRKFDNLTKAERGGLSELDKAGFIKRQLVETRQITKHVAQILDSRMNTKYDENDKLIREVKVITLKSKLVSDFRKDFQFYKVREINNYHHAHDAYLNAVVGTALIKKYPKLESEFVYGDYKVYDVRKMIAKSEQEIGKATAKYFFYSNIMNFFKTEITLANGEIRKRPLIETNGETGEIVWDKGRDFATVRKVLSMPQVNIVKKTEVQTGGFSKESILPKRNSDKLIARKKDWDPKKYGGFDSPTVAYSVLVVAKVEKGKSKKLKSVKELLGITIMERSSFEKNPIDFLEAKGYKEVKKDLIIKLPKYSLFELENGRKRMLASAGELQKGNELALPSKYVNFLYLASHYEKLKGSPEDNEQKQLFVEQHKHYLDEIIEQISEFSKRVILADANLDKVLSAYNKHRDKPIREQAENIIHLFTLTNLGAPAAFKYFDTTIDRKRYTSTKEVLDATLIHQSITGLYETRIDLSQLGGDGGEAAAKEAAAKEAAAKEAAAKGGLGIEDEYRLHETSTEPDVSLGSTWLSDFPQAWAETGGMGLAVRQAPLIIPLKATSTPVSIQQYPMSHEARLGIKPHIQRLLDQGILVPCQSPWNTPLLPVKKPGTNDYRPVQDLREVNKRVEDIHPTVPNPYNLLSGLPPSHQWYTVLDLKDAFFCLRLHPTSQPLFAFEWRDPGMGISGQLTWTRLPQGFKNSPTLFNEALHRDLADFRIQHPDLILLQYVDDILLAATSELDCQQGTRALLQTLGDLGYRASAKKAQICQKQVKYLGYLLREGQRWLTEARKETVMGQPVPKTPRQLREFLGKAGFCRLFIPGFAEMAAPLYPLTKPGTLFSWGPDQQKAYQEIKQALLTAPALGLPDLTKPFELFVDEKQGYAKGVLTQKLGPWRRPVAYLSKKLDPVAAGWPPCLRMVAAIAVLTKDAGKLTMGQPLVILAPHAVEALVKQPPDRWLSNARMTHYQAMLLDTDRVQFGPVVALNPATLLPLPEEGAPHDCLEILAETHGTRPDLTDQPIPDADHTWYTDGSSFLQEGQRKAGAAVTTETEVIWAGALPAGTSAQRAELIALTQALKMAEGKRLNVYTDSRYAFATAHIHGEIYRRRGWLTSEGREIKNKSEILALLKALFLPKRLSIIHCLGHQKGDSAEARGNRLADQAAREAAIKTPPDTSTLLIAGKRTADGSEFEKRTADGSEFESPKKKAKVE

SEQ ID NO: 2093 - protein, 2096 aa, synthetic construct; identical to SEQ ID NO: 2048

SEQ ID NO: 2094 - protein, 2115 aa, synthetic construct
MPAAKRVKLDGGDKKYSIGLDIGTNSVGWAVITDEYKVPSKKFKVLGNTDRHSIKKNLIGALLFDSGETAEATRLKRTARRRYTRRKNRICYLQEIFSNEMAKVDDSFFHRLEESFLVEEDKKHERHPIFGNIVDEVAYHEKYPTIYHLRKKLVDSTDKADLRLIYLALAHMIKFRGHFLIEGDLNPDNSDVDKLFIQLVQTYNQLFEENPINASGVDAKAILSARLSKSRRLENLIAQLPGEKKNGLFGNLIALSLGLTPNFKSNFDLAEDAKLQLSKDTYDDDLDNLLAQIGDQYADLFLAAKNLSDAILLSDILRVNTEITKAPLSASMIKRYDEHHQDLTLLKALVRQQLPEKYKEIFFDQSKNGYAGYIDGGASQEEFYKFIKPILEKMDGTEELLVKLNREDLLRKQRTFDNGSIPHQIHLGELHAILRRQEDFYPFLKDNREKIEKILTFRIPYYVGPLARGNSRFAWMTRKSEETITPWNFEEVVDKGASAQSFIERMTNFDKNLPNEKVLPKHSLLYEYFTVYNELTKVKYVTEGMRKPAFLSGEQKKAIVDLLFKTNRKVTVKQLKEDYFKKIECFDSVEISGVEDRFNASLGTYHDLLKIIKDKDFLDNEENEDILEDIVLTLTLFEDREMIEERLKTYAHLFDDKVMKQLKRRRYTGWGRLSRKLINGIRDKQSGKTILDFLKSDGFANRNFMQLIHDDSLTFKEDIQKAQVSGQGDSLHEHIANLAGSPAIKKGILQTVKVVDELVKVMGRHKPENIVIEMARENQTTQKGQKNSRERMKRIEEGIKELGSQILKEHPVENTQLQNEKLYLYYLQNGRDMYVDQELDINRLSDYDVDHIVPQSFLKDDSIDNKVLTRSDKARGKSDNVPSEEVVKKMKNYWRQLLNAKLITQRKFDNLTKAERGGLSELDKAGFIKRQLVETRQITKHVAQILDSRMNTKYDENDKLIREVKVITLKSKLVSDFRKDFQFYKVREINNYHHAHDAYLNAVVGTALIKKYPKLESEFVYGDYKVYDVRKMIAKSEQEIGKATAKYFFYSNIMNFFKTEITLANGEIRKRPLIETNGETGEIVWDKGRDFATVRKVLSMPQVNIVKKTEVQTGGFSKESILPKRNSDKLIARKKDWDPKKYGGFDSPTVAYSVLVVAKVEKGKSKKLKSVKELLGITIMERSSFEKNPIDFLEAKGYKEVKKDLIIKLPKYSLFELENGRKRMLASAGELQKGNELALPSKYVNFLYLASHYEKLKGSPEDNEQKQLFVEQHKHYLDEIIEQISEFSKRVILADANLDKVLSAYNKHRDKPIREQAENIIHLFTLTNLGAPAAFKYFDTTIDRKRYTSTKEVLDATLIHQSITGLYETRIDLSQLGGDGGGGGGSGGGGSGGGGSGGGGSGGGGSGGGGSGGLGIEDEYRLHETSTEPDVSLGSTWLSDFPQAWAETGGMGLAVRQAPLIIPLKATSTPVSIQQYPMSHEARLGIKPHIQRLLDQGILVPCQSPWNTPLLPVKKPGTNDYRPVQDLREVNKRVEDIHPTVPNPYNLLSGLPPSHQWYTVLDLKDAFFCLRLHPTSQPLFAFEWRDPGMGISGQLTWTRLPQGFKNSPTLFNEALHRDLADFRIQHPDLILLQYVDDILLAATSELDCQQGTRALLQTLGDLGYRASAKKAQICQKQVKYLGYLLREGQRWLTEARKETVMGQPVPKTPRQLREFLGKAGFCRLFIPGFAEMAAPLYPLTKPGTLFSWGPDQQKAYQEIKQALLTAPALGLPDLTKPFELFVDEKQGYAKGVLTQKLGPWRRPVAYLSKKLDPVAAGWPPCLRMVAAIAVLTKDAGKLTMGQPLVILAPHAVEALVKQPPDRWLSNARMTHYQAMLLDTDRVQFGPVVALNPATLLPLPEEGAPHDCLEILAETHGTRPDLTDQPIPDADHTWYTDGSSFLQEGQRKAGAAVTTETEVIWAGALPAGTSAQRAELIALTQALKMAEGKRLNVYTDSRYAFATAHIHGEIYRRRGWLTSEGREIKNKSEILALLKALFLPKRLSIIHCLGHQKGDSAEARGNRLADQAAREAAIKTPPDTSTLLIAGKRTADGSEFEKRTADGSEFESPKKKAKVE

SEQ ID NO: 2095 - protein, 2096 aa, synthetic construct
MPAAKRVKLDGGDKKYSIGLDIGTNSVGWAVITDEYKVPSKKFKVLGNTDRHSIKKNLIGALLFDSGETAEATRLKRTARRRYTRRKNRICYLQEIFSNEMAKVDDSFFHRLEESFLVEEDKKHERHPIFGNIVDEVAYHEKYPTIYHLRKKLVDSTDKADLRLIYLALAHMIKFRGHFLIEGDLNPDNSDVDKLFIQLVQTYNQLFEENPINASGVDAKAILSARLSKSRRLENLIAQLPGEKKNGLFGNLIALSLGLTPNFKSNFDLAEDAKLQLSKDTYDDDLDNLLAQIGDQYADLFLAAKNLSDAILLSDILRVNTEITKAPLSASMIKRYDEHHQDLTLLKALVRQQLPEKYKEIFFDQSKNGYAGYIDGGASQEEFYKFIKPILEKMDGTEELLVKLNREDLLRKQRTFDNGSIPHQIHLGELHAILRRQEDFYPFLKDNREKIEKILTFRIPYYVGPLARGNSRFAWMTRKSEETITPWNFEEVVDKGASAQSFIERMTNFDKNLPNEKVLPKHSLLYEYFTVYNELTKVKYVTEGMRKPAFLSGEQKKAIVDLLFKTNRKVTVKQLKEDYFKKIECFDSVEISGVEDRFNASLGTYHDLLKIIKDKDFLDNEENEDILEDIVLTLTLFEDREMIEERLKTYAHLFDDKVMKQLKRRRYTGWGRLSRKLINGIRDKQSGKTILDFLKSDGFANRNFMQLIHDDSLTFKEDIQKAQVSGQGDSLHEHIANLAGSPAIKKGILQTVKVVDELVKVMGRHKPENIVIEMARENQTTQKGQKNSRERMKRIEEGIKELGSQILKEHPVENTQLQNEKLYLYYLQNGRDMYVDQELDINRLSDYDVDHIVPQSFLKDDSIDNKVLTRSDKARGKSDNVPSEEVVKKMKNYWRQLLNAKLITQRKFDNLTKAERGGLSELDKAGFIKRQLVETRQITKHVAQILDSRMNTKYDENDKLIREVKVITLKSKLVSDFRKDFQFYKVREINNYHHAHDAYLNAVVGTALIKKYPKLESEFVYGDYKVYDVRKMIAKSEQEIGKATAKYFFYSNIMNFFKTEITLANGEIRKRPLIETNGETGEIVWDKGRDFATVRKVLSMPQVNIVKKTEVQTGGFSKESILPKRNSDKLIARKKDWDPKKYGGFDSPTVAYSVLVVAKVEKGKSKKLKSVKELLGITIMERSSFEKNPIDFLEAKGYKEVKKDLIIKLPKYSLFELENGRKRMLASAGELQKGNELALPSKYVNFLYLASHYEKLKGSPEDNEQKQLFVEQHKHYLDEIIEQISEFSKRVILADANLDKVLSAYNKHRDKPIREQAENIIHLFTLTNLGAPAAFKYFDTTIDRKRYTSTKEVLDATLIHQSITGLYETRIDLSQLGGDGGPAPEAAAKGSSGGLGIEDEYRLHETSTEPDVSLGSTWLSDFPQAWAETGGMGLAVRQAPLIIPLKATSTPVSIQQYPMSHEARLGIKPHIQRLLDQGILVPCQSPWNTPLLPVKKPGTNDYRPVQDLREVNKRVEDIHPTVPNPYNLLSGLPPSHQWYTVLDLKDAFFCLRLHPTSQPLFAFEWRDPGMGISGQLTWTRLPQGFKNSPTLFNEALHRDLADFRIQHPDLILLQYVDDILLAATSELDCQQGTRALLQTLGDLGYRASAKKAQICQKQVKYLGYLLREGQRWLTEARKETVMGQPVPKTPRQLREFLGKAGFCRLFIPGFAEMAAPLYPLTKPGTLFSWGPDQQKAYQEIKQALLTAPALGLPDLTKPFELFVDEKQGYAKGVLTQKLGPWRRPVAYLSKKLDPVAAGWPPCLRMVAAIAVLTKDAGKLTMGQPLVILAPHAVEALVKQPPDRWLSNARMTHYQAMLLDTDRVQFGPVVALNPATLLPLPEEGAPHDCLEILAETHGTRPDLTDQPIPDADHTWYTDGSSFLQEGQRKAGAAVTTETEVIWAGALPAGTSAQRAELIALTQALKMAEGKRLNVYTDSRYAFATAHIHGEIYRRRGWLTSEGREIKNKSEILALLKALFLPKRLSIIHCLGHQKGDSAEARGNRLADQAAREAAIKTPPDTSTLLIAGKRTADGSEFEKRTADGSEFESPKKKAKVE

SEQ ID NO: 2096 - skipped

SEQ ID NO: 2097 - protein, 2096 aa, synthetic construct
MPAAKRVKLDGGDKKYSIGLDIGTNSVGWAVITDEYKVPSKKFKVLGNTDRHSIKKNLIGALLFDSGETAEATRLKRTARRRYTRRKNRICYLQEIFSNEMAKVDDSFFHRLEESFLVEEDKKHERHPIFGNIVDEVAYHEKYPTIYHLRKKLVDSTDKADLRLIYLALAHMIKFRGHFLIEGDLNPDNSDVDKLFIQLVQTYNQLFEENPINASGVDAKAILSARLSKSRRLENLIAQLPGEKKNGLFGNLIALSLGLTPNFKSNFDLAEDAKLQLSKDTYDDDLDNLLAQIGDQYADLFLAAKNLSDAILLSDILRVNTEITKAPLSASMIKRYDEHHQDLTLLKALVRQQLPEKYKEIFFDQSKNGYAGYIDGGASQEEFYKFIKPILEKMDGTEELLVKLNREDLLRKQRTFDNGSIPHQIHLGELHAILRRQEDFYPFLKDNREKIEKILTFRIPYYVGPLARGNSRFAWMTRKSEETITPWNFEEVVDKGASAQSFIERMTNFDKNLPNEKVLPKHSLLYEYFTVYNELTKVKYVTEGMRKPAFLSGEQKKAIVDLLFKTNRKVTVKQLKEDYFKKIECFDSVEISGVEDRFNASLGTYHDLLKIIKDKDFLDNEENEDILEDIVLTLTLFEDREMIEERLKTYAHLFDDKVMKQLKRRRYTGWGRLSRKLINGIRDKQSGKTILDFLKSDGFANRNFMQLIHDDSLTFKEDIQKAQVSGQGDSLHEHIANLAGSPAIKKGILQTVKVVDELVKVMGRHKPENIVIEMARENQTTQKGQKNSRERMKRIEEGIKELGSQILKEHPVENTQLQNEKLYLYYLQNGRDMYVDQELDINRLSDYDVDHIVPQSFLKDDSIDNKVLTRSDKARGKSDNVPSEEVVKKMKNYWRQLLNAKLITQRKFDNLTKAERGGLSELDKAGFIKRQLVETRQITKHVAQILDSRMNTKYDENDKLIREVKVITLKSKLVSDFRKDFQFYKVREINNYHHAHDAYLNAVVGTALIKKYPKLESEFVYGDYKVYDVRKMIAKSEQEIGKATAKYFFYSNIMNFFKTEITLANGEIRKRPLIETNGETGEIVWDKGRDFATVRKVLSMPQVNIVKKTEVQTGGFSKESILPKRNSDKLIARKKDWDPKKYGGFDSPTVAYSVLVVAKVEKGKSKKLKSVKELLGITIMERSSFEKNPIDFLEAKGYKEVKKDLIIKLPKYSLFELENGRKRMLASAGELQKGNELALPSKYVNFLYLASHYEKLKGSPEDNEQKQLFVEQHKHYLDEIIEQISEFSKRVILADANLDKVLSAYNKHRDKPIREQAENIIHLFTLTNLGAPAAFKYFDTTIDRKRYTSTKEVLDATLIHQSITGLYETRIDLSQLGGDGGPAPEAAAKGGSGGLGIEDEYRLHETSTEPDVSLGSTWLSDFPQAWAETGGMGLAVRQAPLIIPLKATSTPVSIQQYPMSHEARLGIKPHIQRLLDQGILVPCQSPWNTPLLPVKKPGTNDYRPVQDLREVNKRVEDIHPTVPNPYNLLSGLPPSHQWYTVLDLKDAFFCLRLHPTSQPLFAFEWRDPGMGISGQLTWTRLPQGFKNSPTLFNEALHRDLADFRIQHPDLILLQYVDDILLAATSELDCQQGTRALLQTLGDLGYRASAKKAQICQKQVKYLGYLLREGQRWLTEARKETVMGQPVPKTPRQLREFLGKAGFCRLFIPGFAEMAAPLYPLTKPGTLFSWGPDQQKAYQEIKQALLTAPALGLPDLTKPFELFVDEKQGYAKGVLTQKLGPWRRPVAYLSKKLDPVAAGWPPCLRMVAAIAVLTKDAGKLTMGQPLVILAPHAVEALVKQPPDRWLSNARMTHYQAMLLDTDRVQFGPVVALNPATLLPLPEEGAPHDCLEILAETHGTRPDLTDQPIPDADHTWYTDGSSFLQEGQRKAGAAVTTETEVIWAGALPAGTSAQRAELIALTQALKMAEGKRLNVYTDSRYAFATAHIHGEIYRRRGWLTSEGREIKNKSEILALLKALFLPKRLSIIHCLGHQKGDSAEARGNRLADQAAREAAIKTPPDTSTLLIAGKRTADGSEFEKRTADGSEFESPKKKAKVE

SEQ ID NO: 2098 - protein, 2115 aa, synthetic construct
MPAAKRVKLDGGDKKYSIGLDIGTNSVGWAVITDEYKVPSKKFKVLGNTDRHSIKKNLIGALLFDSGETAEATRLKRTARRRYTRRKNRICYLQEIFSNEMAKVDDSFFHRLEESFLVEEDKKHERHPIFGNIVDEVAYHEKYPTIYHLRKKLVDSTDKADLRLIYLALAHMIKFRGHFLIEGDLNPDNSDVDKLFIQLVQTYNQLFEENPINASGVDAKAILSARLSKSRRLENLIAQLPGEKKNGLFGNLIALSLGLTPNFKSNFDLAEDAKLQLSKDTYDDDLDNLLAQIGDQYADLFLAAKNLSDAILLSDILRVNTEITKAPLSASMIKRYDEHHQDLTLLKALVRQQLPEKYKEIFFDQSKNGYAGYIDGGASQEEFYKFIKPILEKMDGTEELLVKLNREDLLRKQRTFDNGSIPHQIHLGELHAILRRQEDFYPFLKDNREKIEKILTFRIPYYVGPLARGNSRFAWMTRKSEETITPWNFEEVVDKGASAQSFIERMTNFDKNLPNEKVLPKHSLLYEYFTVYNELTKVKYVTEGMRKPAFLSGEQKKAIVDLLFKTNRKVTVKQLKEDYFKKIECFDSVEISGVEDRFNASLGTYHDLLKIIKDKDFLDNEENEDILEDIVLTLTLFEDREMIEERLKTYAHLFDDKVMKQLKRRRYTGWGRLSRKLINGIRDKQSGKTILDFLKSDGFANRNFMQLIHDDSLTFKEDIQKAQVSGQGDSLHEHIANLAGSPAIKKGILQTVKVVDELVKVMGRHKPENIVIEMARENQTTQKGQKNSRERMKRIEEGIKELGSQILKEHPVENTQLQNEKLYLYYLQNGRDMYVDQELDINRLSDYDVDHIVPQSFLKDDSIDNKVLTRSDKARGKSDNVPSEEVVKKMKNYWRQLLNAKLITQRKFDNLTKAERGGLSELDKAGFIKRQLVETRQITKHVAQILDSRMNTKYDENDKLIREVKVITLKSKLVSDFRKDFQFYKVREINNYHHAHDAYLNAVVGTALIKKYPKLESEFVYGDYKVYDVRKMIAKSEQEIGKATAKYFFYSNIMNFFKTEITLANGEIRKRPLIETNGETGEIVWDKGRDFATVRKVLSMPQVNIVKKTEVQTGGFSKESILPKRNSDKLIARKKDWDPKKYGGFDSPTVAYSVLVVAKVEKGKSKKLKSVKELLGITIMERSSFEKNPIDFLEAKGYKEVKKDLIIKLPKYSLFELENGRKRMLASAGELQKGNELALPSKYVNFLYLASHYEKLKGSPEDNEQKQLFVEQHKHYLDEIIEQISEFSKRVILADANLDKVLSAYNKHRDKPIREQAENIIHLFTLTNLGAPAAFKYFDTTIDRKRYTSTKEVLDATLIHQSITGLYETRIDLSQLGGDGGEAAAKEAAAKEAAAKEAAAKEAAAKEAAAKGGLGIEDEYRLHETSTEPDVSLGSTWLSDFPQAWAETGGMGLAVRQAPLIIPLKATSTPVSIQQYPMSHEARLGIKPHIQRLLDQGILVPCQSPWNTPLLPVKKPGTNDYRPVQDLREVNKRVEDIHPTVPNPYNLLSGLPPSHQWYTVLDLKDAFFCLRLHPTSQPLFAFEWRDPGMGISGQLTWTRLPQGFKNSPTLFNEALHRDLADFRIQHPDLILLQYVDDILLAATSELDCQQGTRALLQTLGDLGYRASAKKAQICQKQVKYLGYLLREGQRWLTEARKETVMGQPVPKTPRQLREFLGKAGFCRLFIPGFAEMAAPLYPLTKPGTLFSWGPDQQKAYQEIKQALLTAPALGLPDLTKPFELFVDEKQGYAKGVLTQKLGPWRRPVAYLSKKLDPVAAGWPPCLRMVAAIAVLTKDAGKLTMGQPLVILAPHAVEALVKQPPDRWLSNARMTHYQAMLLDTDRVQFGPVVALNPATLLPLPEEGAPHDCLEILAETHGTRPDLTDQPIPDADHTWYTDGSSFLQEGQRKAGAAVTTETEVIWAGALPAGTSAQRAELIALTQALKMAEGKRLNVYTDSRYAFATAHIHGEIYRRRGWLTSEGREIKNKSEILALLKALFLPKRLSIIHCLGHQKGDSAEARGNRLADQAAREAAIKTPPDTSTLLIAGKRTADGSEFEKRTADGSEFESPKKKAKVE

SEQ ID NO: 2099 - protein, 2096 aa, synthetic construct
MPAAKRVKLDGGDKKYSIGLDIGTNSVGWAVITDEYKVPSKKFKVLGNTDRHSIKKNLIGALLFDSGETAEATRLKRTARRRYTRRKNRICYLQEIFSNEMAKVDDSFFHRLEESFLVEEDKKHERHPIFGNIVDEVAYHEKYPTIYHLRKKLVDSTDKADLRLIYLALAHMIKFRGHFLIEGDLNPDNSDVDKLFIQLVQTYNQLFEENPINASGVDAKAILSARLSKSRRLENLIAQLPGEKKNGLFGNLIALSLGLTPNFKSNFDLAEDAKLQLSKDTYDDDLDNLLAQIGDQYADLFLAAKNLSDAILLSDILRVNTEITKAPLSASMIKRYDEHHQDLTLLKALVRQQLPEKYKEIFFDQSKNGYAGYIDGGASQEEFYKFIKPILEKMDGTEELLVKLNREDLLRKQRTFDNGSIPHQIHLGELHAILRRQEDFYPFLKDNREKIEKILTFRIPYYVGPLARGNSRFAWMTRKSEETITPWNFEEVVDKGASAQSFIERMTNFDKNLPNEKVLPKHSLLYEYFTVYNELTKVKYVTEGMRKPAFLSGEQKKAIVDLLFKTNRKVTVKQLKEDYFKKIECFDSVEISGVEDRFNASLGTYHDLLKIIKDKDFLDNEENEDILEDIVLTLTLFEDREMIEERLKTYAHLFDDKVMKQLKRRRYTGWGRLSRKLINGIRDKQSGKTILDFLKSDGFANRNFMQLIHDDSLTFKEDIQKAQVSGQGDSLHEHIANLAGSPAIKKGILQTVKVVDELVKVMGRHKPENIVIEMARENQTTQKGQKNSRERMKRIEEGIKELGSQILKEHPVENTQLQNEKLYLYYLQNGRDMYVDQELDINRLSDYDVDHIVPQSFLKDDSIDNKVLTRSDKARGKSDNVPSEEVVKKMKNYWRQLLNAKLITQRKFDNLTKAERGGLSELDKAGFIKRQLVETRQITKHVAQILDSRMNTKYDENDKLIREVKVITLKSKLVSDFRKDFQFYKVREINNYHHAHDAYLNAVVGTALIKKYPKLESEFVYGDYKVYDVRKMIAKSEQEIGKATAKYFFYSNIMNFFKTEITLANGEIRKRPLIETNGETGEIVWDKGRDFATVRKVLSMPQVNIVKKTEVQTGGFSKESILPKRNSDKLIARKKDWDPKKYGGFDSPTVAYSVLVVAKVEKGKSKKLKSVKELLGITIMERSSFEKNPIDFLEAKGYKEVKKDLIIKLPKYSLFELENGRKRMLASAGELQKGNELALPSKYVNFLYLASHYEKLKGSPEDNEQKQLFVEQHKHYLDEIIEQISEFSKRVILADANLDKVLSAYNKHRDKPIREQAENIIHLFTLTNLGAPAAFKYFDTTIDRKRYTSTKEVLDATLIHQSITGLYETRIDLSQLGGDGGEAAAKPAPGGSGGLGIEDEYRLHETSTEPDVSLGSTWLSDFPQAWAETGGMGLAVRQAPLIIPLKATSTPVSIQQYPMSHEARLGIKPHIQRLLDQGILVPCQSPWNTPLLPVKKPGTNDYRPVQDLREVNKRVEDIHPTVPNPYNLLSGLPPSHQWYTVLDLKDAFFCLRLHPTSQPLFAFEWRDPGMGISGQLTWTRLPQGFKNSPTLFNEALHRDLADFRIQHPDLILLQYVDDILLAATSELDCQQGTRALLQTLGDLGYRASAKKAQICQKQVKYLGYLLREGQRWLTEARKETVMGQPVPKTPRQLREFLGKAGFCRLFIPGFAEMAAPLYPLTKPGTLFSWGPDQQKAYQEIKQALLTAPALGLPDLTKPFELFVDEKQGYAKGVLTQKLGPWRRPVAYLSKKLDPVAAGWPPCLRMVAAIAVLTKDAGKLTMGQPLVILAPHAVEALVKQPPDRWLSNARMTHYQAMLLDTDRVQFGPVVALNPATLLPLPEEGAPHDCLEILAETHGTRPDLTDQPIPDADHTWYTDGSSFLQEGQRKAGAAVTTETEVIWAGALPAGTSAQRAELIALTQALKMAEGKRLNVYTDSRYAFATAHIHGEIYRRRGWLTSEGREIKNKSEILALLKALFLPKRLSIIHCLGHQKGDSAEARGNRLADQAAREAAIKTPPDTSTLLIAGKRTADGSEFEKRTADGSEFESPKKKAKVE

SEQ ID NO: 2100 - protein, 2096 aa, synthetic construct
MPAAKRVKLDGGDKKYSIGLDIGTNSVGWAVITDEYKVPSKKFKVLGNTDRHSIKKNLIGALLFDSGETAEATRLKRTARRRYTRRKNRICYLQEIFSNEMAKVDDSFFHRLEESFLVEEDKKHERHPIFGNIVDEVAYHEKYPTIYHLRKKLVDSTDKADLRLIYLALAHMIKFRGHFLIEGDLNPDNSDVDKLFIQLVQTYNQLFEENPINASGVDAKAILSARLSKSRRLENLIAQLPGEKKNGLFGNLIALSLGLTPNFKSNFDLAEDAKLQLSKDTYDDDLDNLLAQIGDQYADLFLAAKNLSDAILLSDILRVNTEITKAPLSASMIKRYDEHHQDLTLLKALVRQQLPEKYKEIFFDQSKNGYAGYIDGGASQEEFYKFIKPILEKMDGTEELLVKLNREDLLRKQRTFDNGSIPHQIHLGELHAILRRQEDFYPFLKDNREKIEKILTFRIPYYVGPLARGNSRFAWMTRKSEETITPWNFEEVVDKGASAQSFIERMTNFDKNLPNEKVLPKHSLLYEYFTVYNELTKVKYVTEGMRKPAFLSGEQKKAIVDLLFKTNRKVTVKQLKEDYFKKIECFDSVEISGVEDRFNASLGTYHDLLKIIKDKDFLDNEENEDILEDIVLTLTLFEDREMIEERLKTYAHLFDDKVMKQLKRRRYTGWGRLSRKLINGIRDKQSGKTILDFLKSDGFANRNFMQLIHDDSLTFKEDIQKAQVSGQGDSLHEHIANLAGSPAIKKGILQTVKVVDELVKVMGRHKPENIVIEMARENQTTQKGQKNSRERMKRIEEGIKELGSQILKEHPVENTQLQNEKLYLYYLQNGRDMYVDQELDINRLSDYDVDHIVPQSFLKDDSIDNKVLTRSDKARGKSDNVPSEEVVKKMKNYWRQLLNAKLITQRKFDNLTKAERGGLSELDKAGFIKRQLVETRQITKHVAQILDSRMNTKYDENDKLIREVKVITLKSKLVSDFRKDFQFYKVREINNYHHAHDAYLNAVVGTALIKKYPKLESEFVYGDYKVYDVRKMIAKSEQEIGKATAKYFFYSNIMNFFKTEITLANGEIRKRPLIETNGETGEIVWDKGRDFATVRKVLSMPQVNIVKKTEVQTGGFSKESILPKRNSDKLIARKKDWDPKKYGGFDSPTVAYSVLVVAKVEKGKSKKLKSVKELLGITIMERSSFEKNPIDFLEAKGYKEVKKDLIIKLPKYSLFELENGRKRMLASAGELQKGNELALPSKYVNFLYLASHYEKLKGSPEDNEQKQLFVEQHKHYLDEIIEQISEFSKRVILADANLDKVLSAYNKHRDKPIREQAENIIHLFTLTNLGAPAAFKYFDTTIDRKRYTSTKEVLDATLIHQSITGLYETRIDLSQLGGDGGGGSGSSEAAAKGGLGIEDEYRLHETSTEPDVSLGSTWLSDFPQAWAETGGMGLAVRQAPLIIPLKATSTPVSIQQYPMSHEARLGIKPHIQRLLDQGILVPCQSPWNTPLLPVKKPGTNDYRPVQDLREVNKRVEDIHPTVPNPYNLLSGLPPSHQWYTVLDLKDAFFCLRLHPTSQPLFAFEWRDPGMGISGQLTWTRLPQGFKNSPTLFNEALHRDLADFRIQHPDLILLQYVDDILLAATSELDCQQGTRALLQTLGDLGYRASAKKAQICQKQVKYLGYLLREGQRWLTEARKETVMGQPVPKTPRQLREFLGKAGFCRLFIPGFAEMAAPLYPLTKPGTLFSWGPDQQKAYQEIKQALLTAPALGLPDLTKPFELFVDEKQGYAKGVLTQKLGPWRRPVAYLSKKLDPVAAGWPPCLRMVAAIAVLTKDAGKLTMGQPLVILAPHAVEALVKQPPDRWLSNARMTHYQAMLLDTDRVQFGPVVALNPATLLPLPEEGAPHDCLEILAETHGTRPDLTDQPIPDADHTWYTDGSSFLQEGQRKAGAAVTTETEVIWAGALPAGTSAQRAELIALTQALKMAEGKRLNVYTDSRYAFATAHIHGEIYRRRGWLTSEGREIKNKSEILALLKALFLPKRLSIIHCLGHQKGDSAEARGNRLADQAAREAAIKTPPDTSTLLIAGKRTADGSEFEKRTADGSEFESPKKKAKVE

SEQ ID NO: 2101 - protein, 2094 aa, synthetic construct
MPAAKRVKLDGGDKKYSIGLDIGTNSVGWAVITDEYKVPSKKFKVLGNTDRHSIKKNLIGALLFDSGETAEATRLKRTARRRYTRRKNRICYLQEIFSNEMAKVDDSFFHRLEESFLVEEDKKHERHPIFGNIVDEVAYHEKYPTIYHLRKKLVDSTDKADLRLIYLALAHMIKFRGHFLIEGDLNPDNSDVDKLFIQLVQTYNQLFEENPINASGVDAKAILSARLSKSRRLENLIAQLPGEKKNGLFGNLIALSLGLTPNFKSNFDLAEDAKLQLSKDTYDDDLDNLLAQIGDQYADLFLAAKNLSDAILLSDILRVNTEITKAPLSASMIKRYDEHHQDLTLLKALVRQQLPEKYKEIFFDQSKNGYAGYIDGGASQEEFYKFIKPILEKMDGTEELLVKLNREDLLRKQRTFDNGSIPHQIHLGELHAILRRQEDFYPFLKDNREKIEKILTFRIPYYVGPLARGNSRFAWMTRKSEETITPWNFEEVVDKGASAQSFIERMTNFDKNLPNEKVLPKHSLLYEYFTVYNELTKVKYVTEGMRKPAFLSGEQKKAIVDLLFKTNRKVTVKQLKEDYFKKIECFDSVEISGVEDRFNASLGTYHDLLKIIKDKDFLDNEENEDILEDIVLTLTLFEDREMIEERLKTYAHLFDDKVMKQLKRRRYTGWGRLSRKLINGIRDKQSGKTILDFLKSDGFANRNFMQLIHDDSLTFKEDIQKAQVSGQGDSLHEHIANLAGSPAIKKGILQTVKVVDELVKVMGRHKPENIVIEMARENQTTQKGQKNSRERMKRIEEGIKELGSQILKEHPVENTQLQNEKLYLYYLQNGRDMYVDQELDINRLSDYDVDHIVPQSFLKDDSIDNKVLTRSDKARGKSDNVPSEEVVKKMKNYWRQLLNAKLITQRKFDNLTKAERGGLSELDKAGFIKRQLVETRQITKHVAQILDSRMNTKYDENDKLIREVKVITLKSKLVSDFRKDFQFYKVREINNYHHAHDAYLNAVVGTALIKKYPKLESEFVYGDYKVYDVRKMIAKSEQEIGKATAKYFFYSNIMNFFKTEITLANGEIRKRPLIETNGETGEIVWDKGRDFATVRKVLSMPQVNIVKKTEVQTGGFSKESILPKRNSDKLIARKKDWDPKKYGGFDSPTVAYSVLVVAKVEKGKSKKLKSVKELLGITIMERSSFEKNPIDFLEAKGYKEVKKDLIIKLPKYSLFELENGRKRMLASAGELQKGNELALPSKYVNFLYLASHYEKLKGSPEDNEQKQLFVEQHKHYLDEIIEQISEFSKRVILADANLDKVLSAYNKHRDKPIREQAENIIHLFTLTNLGAPAAFKYFDTTIDRKRYTSTKEVLDATLIHQSITGLYETRIDLSQLGGDGGPAPGGGGSSGGLGIEDEYRLHETSTEPDVSLGSTWLSDFPQAWAETGGMGLAVRQAPLIIPLKATSTPVSIQQYPMSHEARLGIKPHIQRLLDQGILVPCQSPWNTPLLPVKKPGTNDYRPVQDLREVNKRVEDIHPTVPNPYNLLSGLPPSHQWYTVLDLKDAFFCLRLHPTSQPLFAFEWRDPGMGISGQLTWTRLPQGFKNSPTLFNEALHRDLADFRIQHPDLILLQYVDDILLAATSELDCQQGTRALLQTLGDLGYRASAKKAQICQKQVKYLGYLLREGQRWLTEARKETVMGQPVPKTPRQLREFLGKAGFCRLFIPGFAEMAAPLYPLTKPGTLFSWGPDQQKAYQEIKQALLTAPALGLPDLTKPFELFVDEKQGYAKGVLTQKLGPWRRPVAYLSKKLDPVAAGWPPCLRMVAAIAVLTKDAGKLTMGQPLVILAPHAVEALVKQPPDRWLSNARMTHYQAMLLDTDRVQFGPVVALNPATLLPLPEEGAPHDCLEILAETHGTRPDLTDQPIPDADHTWYTDGSSFLQEGQRKAGAAVTTETEVIWAGALPAGTSAQRAELIALTQALKMAEGKRLNVYTDSRYAFATAHIHGEIYRRRGWLTSEGREIKNKSEILALLKALFLPKRLSIIHCLGHQKGDSAEARGNRLADQAAREAAIKTPPDTSTLLIAGKRTADGSEFEKRTADGSEFESPKKKAKVE

SEQ ID NO: 2102 - protein, 2096 aa, synthetic construct
MPAAKRVKLDGGDKKYSIGLDIGTNSVGWAVITDEYKVPSKKFKVLGNTDRHSIKKNLIGALLFDSGETAEATRLKRTARRRYTRRKNRICYLQEIFSNEMAKVDDSFFHRLEESFLVEEDKKHERHPIFGNIVDEVAYHEKYPTIYHLRKKLVDSTDKADLRLIYLALAHMIKFRGHFLIEGDLNPDNSDVDKLFIQLVQTYNQLFEENPINASGVDAKAILSARLSKSRRLENLIAQLPGEKKNGLFGNLIALSLGLTPNFKSNFDLAEDAKLQLSKDTYDDDLDNLLAQIGDQYADLFLAAKNLSDAILLSDILRVNTEITKAPLSASMIKRYDEHHQDLTLLKALVRQQLPEKYKEIFFDQSKNGYAGYIDGGASQEEFYKFIKPILEKMDGTEELLVKLNREDLLRKQRTFDNGSIPHQIHLGELHAILRRQEDFYPFLKDNREKIEKILTFRIPYYVGPLARGNSRFAWMTRKSEETITPWNFEEVVDKGASAQSFIERMTNFDKNLPNEKVLPKHSLLYEYFTVYNELTKVKYVTEGMRKPAFLSGEQKKAIVDLLFKTNRKVTVKQLKEDYFKKIECFDSVEISGVEDRFNASLGTYHDLLKIIKDKDFLDNEENEDILEDIVLTLTLFEDREMIEERLKTYAHLFDDKVMKQLKRRRYTGWGRLSRKLINGIRDKQSGKTILDFLKSDGFANRNFMQLIHDDSLTFKEDIQKAQVSGQGDSLHEHIANLAGSPAIKKGILQTVKVVDELVKVMGRHKPENIVIEMARENQTTQKGQKNSRERMKRIEEGIKELGSQILKEHPVENTQLQNEKLYLYYLQNGRDMYVDQELDINRLSDYDVDHIVPQSFLKDDSIDNKVLTRSDKARGKSDNVPSEEVVKKMKNYWRQLLNAKLITQRKFDNLTKAERGGLSELDKAGFIKRQLVETRQITKHVAQILDSRMNTKYDENDKLIREVKVITLKSKLVSDFRKDFQFYKVREINNYHHAHDAYLNAVVGTALIKKYPKLESEFVYGDYKVYDVRKMIAKSEQEIGKATAKYFFYSNIMNFFKTEITLANGEIRKRPLIETNGETGEIVWDKGRDFATVRKVLSMPQVNIVKKTEVQTGGFSKESILPKRNSDKLIARKKDWDPKKYGGFDSPTVAYSVLVVAKVEKGKSKKLKSVKELLGITIMERSSFEKNPIDFLEAKGYKEVKKDLIIKLPKYSLFELENGRKRMLASAGELQKGNELALPSKYVNFLYLASHYEKLKGSPEDNEQKQLFVEQHKHYLDEIIEQISEFSKRVILADANLDKVLSAYNKHRDKPIREQAENIIHLFTLTNLGAPAAFKYFDTTIDRKRYTSTKEVLDATLIHQSITGLYETRIDLSQLGGDGGGGSEAAAKGGGGGLGIEDEYRLHETSTEPDVSLGSTWLSDFPQAWAETGGMGLAVRQAPLIIPLKATSTPVSIQQYPMSHEARLGIKPHIQRLLDQGILVPCQSPWNTPLLPVKKPGTNDYRPVQDLREVNKRVEDIHPTVPNPYNLLSGLPPSHQWYTVLDLKDAFFCLRLHPTSQPLFAFEWRDPGMGISGQLTWTRLPQGFKNSPTLFNEALHRDLADFRIQHPDLILLQYVDDILLAATSELDCQQGTRALLQTLGDLGYRASAKKAQICQKQVKYLGYLLREGQRWLTEARKETVMGQPVPKTPRQLREFLGKAGFCRLFIPGFAEMAAPLYPLTKPGTLFSWGPDQQKAYQEIKQALLTAPALGLPDLTKPFELFVDEKQGYAKGVLTQKLGPWRRPVAYLSKKLDPVAAGWPPCLRMVAAIAVLTKDAGKLTMGQPLVILAPHAVEALVKQPPDRWLSNARMTHYQAMLLDTDRVQFGPVVALNPATLLPLPEEGAPHDCLEILAETHGTRPDLTDQPIPDADHTWYTDGSSFLQEGQRKAGAAVTTETEVIWAGALPAGTSAQRAELIALTQALKMAEGKRLNVYTDSRYAFATAHIHGEIYRRRGWLTSEGREIKNKSEILALLKALFLPKRLSIIHCLGHQKGDSAEARGNRLADQAAREAAIKTPPDTSTLLIAGKRTADGSEFEKRTADGSEFESPKKKAKVE

SEQ ID NO: 2103 - skipped

SEQ ID NO: 2104 - protein, 2093 aa, synthetic construct
MPAAKRVKLDGGDKKYSIGLDIGTNSVGWAVITDEYKVPSKKFKVLGNTDRHSIKKNLIGALLFDSGETAEATRLKRTARRRYTRRKNRICYLQEIFSNEMAKVDDSFFHRLEESFLVEEDKKHERHPIFGNIVDEVAYHEKYPTIYHLRKKLVDSTDKADLRLIYLALAHMIKFRGHFLIEGDLNPDNSDVDKLFIQLVQTYNQLFEENPINASGVDAKAILSARLSKSRRLENLIAQLPGEKKNGLFGNLIALSLGLTPNFKSNFDLAEDAKLQLSKDTYDDDLDNLLAQIGDQYADLFLAAKNLSDAILLSDILRVNTEITKAPLSASMIKRYDEHHQDLTLLKALVRQQLPEKYKEIFFDQSKNGYAGYIDGGASQEEFYKFIKPILEKMDGTEELLVKLNREDLLRKQRTFDNGSIPHQIHLGELHAILRRQEDFYPFLKDNREKIEKILTFRIPYYVGPLARGNSRFAWMTRKSEETITPWNFEEVVDKGASAQSFIERMTNFDKNLPNEKVLPKHSLLYEYFTVYNELTKVKYVTEGMRKPAFLSGEQKKAIVDLLFKTNRKVTVKQLKEDYFKKIECFDSVEISGVEDRFNASLGTYHDLLKIIKDKDFLDNEENEDILEDIVLTLTLFEDREMIEERLKTYAHLFDDKVMKQLKRRRYTGWGRLSRKLINGIRDKQSGKTILDFLKSDGFANRNFMQLIHDDSLTFKEDIQKAQVSGQGDSLHEHIANLAGSPAIKKGILQTVKVVDELVKVMGRHKPENIVIEMARENQTTQKGQKNSRERMKRIEEGIKELGSQILKEHPVENTQLQNEKLYLYYLQNGRDMYVDQELDINRLSDYDVDHIVPQSFLKDDSIDNKVLTRSDKARGKSDNVPSEEVVKKMKNYWRQLLNAKLITQRKFDNLTKAERGGLSELDKAGFIKRQLVETRQITKHVAQILDSRMNTKYDENDKLIREVKVITLKSKLVSDFRKDFQFYKVREINNYHHAHDAYLNAVVGTALIKKYPKLESEFVYGDYKVYDVRKMIAKSEQEIGKATAKYFFYSNIMNFFKTEITLANGEIRKRPLIETNGETGEIVWDKGRDFATVRKVLSMPQVNIVKKTEVQTGGFSKESILPKRNSDKLIARKKDWDPKKYGGFDSPTVAYSVLVVAKVEKGKSKKLKSVKELLGITIMERSSFEKNPIDFLEAKGYKEVKKDLIIKLPKYSLFELENGRKRMLASAGELQKGNELALPSKYVNFLYLASHYEKLKGSPEDNEQKQLFVEQHKHYLDEIIEQISEFSKRVILADANLDKVLSAYNKHRDKPIREQAENIIHLFTLTNLGAPAAFKYFDTTIDRKRYTSTKEVLDATLIHQSITGLYETRIDLSQLGGDGGEAAAKGGSGGLGIEDEYRLHETSTEPDVSLGSTWLSDFPQAWAETGGMGLAVRQAPLIIPLKATSTPVSIQQYPMSHEARLGIKPHIQRLLDQGILVPCQSPWNTPLLPVKKPGTNDYRPVQDLREVNKRVEDIHPTVPNPYNLLSGLPPSHQWYTVLDLKDAFFCLRLHPTSQPLFAFEWRDPGMGISGQLTWTRLPQGFKNSPTLFNEALHRDLADFRIQHPDLILLQYVDDILLAATSELDCQQGTRALLQTLGDLGYRASAKKAQICQKQVKYLGYLLREGQRWLTEARKETVMGQPVPKTPRQLREFLGKAGFCRLFIPGFAEMAAPLYPLTKPGTLFSWGPDQQKAYQEIKQALLTAPALGLPDLTKPFELFVDEKQGYAKGVLTQKLGPWRRPVAYLSKKLDPVAAGWPPCLRMVAAIAVLTKDAGKLTMGQPLVILAPHAVEALVKQPPDRWLSNARMTHYQAMLLDTDRVQFGPVVALNPATLLPLPEEGAPHDCLEILAETHGTRPDLTDQPIPDADHTWYTDGSSFLQEGQRKAGAAVTTETEVIWAGALPAGTSAQRAELIALTQALKMAEGKRLNVYTDSRYAFATAHIHGEIYRRRGWLTSEGREIKNKSEILALLKALFLPKRLSIIHCLGHQKGDSAEARGNRLADQAAREAAIKTPPDTSTLLIAGKRTADGSEFEKRTADGSEFESPKKKAKVE

SEQ ID NO: 2105 - protein, 2093 aa, synthetic construct
MPAAKRVKLDGGDKKYSIGLDIGTNSVGWAVITDEYKVPSKKFKVLGNTDRHSIKKNLIGALLFDSGETAEATRLKRTARRRYTRRKNRICYLQEIFSNEMAKVDDSFFHRLEESFLVEEDKKHERHPIFGNIVDEVAYHEKYPTIYHLRKKLVDSTDKADLRLIYLALAHMIKFRGHFLIEGDLNPDNSDVDKLFIQLVQTYNQLFEENPINASGVDAKAILSARLSKSRRLENLIAQLPGEKKNGLFGNLIALSLGLTPNFKSNFDLAEDAKLQLSKDTYDDDLDNLLAQIGDQYADLFLAAKNLSDAILLSDILRVNTEITKAPLSASMIKRYDEHHQDLTLLKALVRQQLPEKYKEIFFDQSKNGYAGYIDGGASQEEFYKFIKPILEKMDGTEELLVKLNREDLLRKQRTFDNGSIPHQIHLGELHAILRRQEDFYPFLKDNREKIEKILTFRIPYYVGPLARGNSRFAWMTRKSEETITPWNFEEVVDKGASAQSFIERMTNFDKNLPNEKVLPKHSLLYEYFTVYNELTKVKYVTEGMRKPAFLSGEQKKAIVDLLFKTNRKVTVKQLKEDYFKKIECFDSVEISGVEDRFNASLGTYHDLLKIIKDKDFLDNEENEDILEDIVLTLTLFEDREMIEERLKTYAHLFDDKVMKQLKRRRYTGWGRLSRKLINGIRDKQSGKTILDFLKSDGFANRNFMQLIHDDSLTFKEDIQKAQVSGQGDSLHEHIANLAGSPAIKKGILQTVKVVDELVKVMGRHKPENIVIEMARENQTTQKGQKNSRERMKRIEEGIKELGSQILKEHPVENTQLQNEKLYLYYLQNGRDMYVDQELDINRLSDYDVDHIVPQSFLKDDSIDNKVLTRSDKARGKSDNVPSEEVVKKMKNYWRQLLNAKLITQRKFDNLTKAERGGLSELDKAGFIKRQLVETRQITKHVAQILDSRMNTKYDENDKLIREVKVITLKSKLVSDFRKDFQFYKVREINNYHHAHDAYLNAVVGTALIKKYPKLESEFVYGDYKVYDVRKMIAKSEQEIGKATAKYFFYSNIMNFFKTEITLANGEIRKRPLIETNGETGEIVWDKGRDFATVRKVLSMPQVNIVKKTEVQTGGFSKESILPKRNSDKLIARKKDWDPKKYGGFDSPTVAYSVLVVAKVEKGKSKKLKSVKELLGITIMERSSFEKNPIDFLEAKGYKEVKKDLIIKLPKYSLFELENGRKRMLASAGELQKGNELALPSKYVNFLYLASHYEKLKGSPEDNEQKQLFVEQHKHYLDEIIEQISEFSKRVILADANLDKVLSAYNKHRDKPIREQAENIIHLFTLTNLGAPAAFKYFDTTIDRKRYTSTKEVLDATLIHQSITGLYETRIDLSQLGGDGGGGSEAAAKGGLGIEDEYRLHETSTEPDVSLGSTWLSDFPQAWAETGGMGLAVRQAPLIIPLKATSTPVSIQQYPMSHEARLGIKPHIQRLLDQGILVPCQSPWNTPLLPVKKPGTNDYRPVQDLREVNKRVEDIHPTVPNPYNLLSGLPPSHQWYTVLDLKDAFFCLRLHPTSQPLFAFEWRDPGMGISGQLTWTRLPQGFKNSPTLFNEALHRDLADFRIQHPDLILLQYVDDILLAATSELDCQQGTRALLQTLGDLGYRASAKKAQICQKQVKYLGYLLREGQRWLTEARKETVMGQPVPKTPRQLREFLGKAGFCRLFIPGFAEMAAPLYPLTKPGTLFSWGPDQQKAYQEIKQALLTAPALGLPDLTKPFELFVDEKQGYAKGVLTQKLGPWRRPVAYLSKKLDPVAAGWPPCLRMVAAIAVLTKDAGKLTMGQPLVILAPHAVEALVKQPPDRWLSNARMTHYQAMLLDTDRVQFGPVVALNPATLLPLPEEGAPHDCLEILAETHGTRPDLTDQPIPDADHTWYTDGSSFLQEGQRKAGAAVTTETEVIWAGALPAGTSAQRAELIALTQALKMAEGKRLNVYTDSRYAFATAHIHGEIYRRRGWLTSEGREIKNKSEILALLKALFLPKRLSIIHCLGHQKGDSAEARGNRLADQAAREAAIKTPPDTSTLLIAGKRTADGSEFEKRTADGSEFESPKKKAKVE

SEQ ID NO: 2106 - protein, 2100 aa, synthetic construct
MPAAKRVKLDGGDKKYSIGLDIGTNSVGWAVITDEYKVPSKKFKVLGNTDRHSIKKNLIGALLFDSGETAEATRLKRTARRRYTRRKNRICYLQEIFSNEMAKVDDSFFHRLEESFLVEEDKKHERHPIFGNIVDEVAYHEKYPTIYHLRKKLVDSTDKADLRLIYLALAHMIKFRGHFLIEGDLNPDNSDVDKLFIQLVQTYNQLFEENPINASGVDAKAILSARLSKSRRLENLIAQLPGEKKNGLFGNLIALSLGLTPNFKSNFDLAEDAKLQLSKDTYDDDLDNLLAQIGDQYADLFLAAKNLSDAILLSDILRVNTEITKAPLSASMIKRYDEHHQDLTLLKALVRQQLPEKYKEIFFDQSKNGYAGYIDGGASQEEFYKFIKPILEKMDGTEELLVKLNREDLLRKQRTFDNGSIPHQIHLGELHAILRRQEDFYPFLKDNREKIEKILTFRIPYYVGPLARGNSRFAWMTRKSEETITPWNFEEVVDKGASAQSFIERMTNFDKNLPNEKVLPKHSLLYEYFTVYNELTKVKYVTEGMRKPAFLSGEQKKAIVDLLFKTNRKVTVKQLKEDYFKKIECFDSVEISGVEDRFNASLGTYHDLLKIIKDKDFLDNEENEDILEDIVLTLTLFEDREMIEERLKTYAHLFDDKVMKQLKRRRYTGWGRLSRKLINGIRDKQSGKTILDFLKSDGFANRNFMQLIHDDSLTFKEDIQKAQVSGQGDSLHEHIANLAGSPAIKKGILQTVKVVDELVKVMGRHKPENIVIEMARENQTTQKGQKNSRERMKRIEEGIKELGSQILKEHPVENTQLQNEKLYLYYLQNGRDMYVDQELDINRLSDYDVDHIVPQSFLKDDSIDNKVLTRSDKARGKSDNVPSEEVVKKMKNYWRQLLNAKLITQRKFDNLTKAERGGLSELDKAGFIKRQLVETRQITKHVAQILDSRMNTKYDENDKLIREVKVITLKSKLVSDFRKDFQFYKVREINNYHHAHDAYLNAVVGTALIKKYPKLESEFVYGDYKVYDVRKMIAKSEQEIGKATAKYFFYSNIMNFFKTEITLANGEIRKRPLIETNGETGEIVWDKGRDFATVRKVLSMPQVNIVKKTEVQTGGFSKESILPKRNSDKLIARKKDWDPKKYGGFDSPTVAYSVLVVAKVEKGKSKKLKSVKELLGITIMERSSFEKNPIDFLEAKGYKEVKKDLIIKLPKYSLFELENGRKRMLASAGELQKGNELALPSKYVNFLYLASHYEKLKGSPEDNEQKQLFVEQHKHYLDEIIEQISEFSKRVILADANLDKVLSAYNKHRDKPIREQAENIIHLFTLTNLGAPAAFKYFDTTIDRKRYTSTKEVLDATLIHQSITGLYETRIDLSQLGGDGGGGGGSEAAAKGGGGSGGLGIEDEYRLHETSTEPDVSLGSTWLSDFPQAWAETGGMGLAVRQAPLIIPLKATSTPVSIQQYPMSHEARLGIKPHIQRLLDQGILVPCQSPWNTPLLPVKKPGTNDYRPVQDLREVNKRVEDIHPTVPNPYNLLSGLPPSHQWYTVLDLKDAFFCLRLHPTSQPLFAFEWRDPGMGISGQLTWTRLPQGFKNSPTLFNEALHRDLADFRIQHPDLILLQYVDDILLAATSELDCQQGTRALLQTLGDLGYRASAKKAQICQKQVKYLGYLLREGQRWLTEARKETVMGQPVPKTPRQLREFLGKAGFCRLFIPGFAEMAAPLYPLTKPGTLFSWGPDQQKAYQEIKQALLTAPALGLPDLTKPFELFVDEKQGYAKGVLTQKLGPWRRPVAYLSKKLDPVAAGWPPCLRMVAAIAVLTKDAGKLTMGQPLVILAPHAVEALVKQPPDRWLSNARMTHYQAMLLDTDRVQFGPVVALNPATLLPLPEEGAPHDCLEILAETHGTRPDLTDQPIPDADHTWYTDGSSFLQEGQRKAGAAVTTETEVIWAGALPAGTSAQRAELIALTQALKMAEGKRLNVYTDSRYAFATAHIHGEIYRRRGWLTSEGREIKNKSEILALLKALFLPKRLSIIHCLGHQKGDSAEARGNRLADQAAREAAIKTPPDTSTLLIAGKRTADGSEFEKRTADGSEFESPKKKAKVE

SEQ ID NO: 2107-2108 - skipped (2 entries)

SEQ ID NO: 2109 - protein, 2096 aa, synthetic construct
MPAAKRVKLDGGDKKYSIGLDIGTNSVGWAVITDEYKVPSKKFKVLGNTDRHSIKKNLIGALLFDSGETAEATRLKRTARRRYTRRKNRICYLQEIFSNEMAKVDDSFFHRLEESFLVEEDKKHERHPIFGNIVDEVAYHEKYPTIYHLRKKLVDSTDKADLRLIYLALAHMIKFRGHFLIEGDLNPDNSDVDKLFIQLVQTYNQLFEENPINASGVDAKAILSARLSKSRRLENLIAQLPGEKKNGLFGNLIALSLGLTPNFKSNFDLAEDAKLQLSKDTYDDDLDNLLAQIGDQYADLFLAAKNLSDAILLSDILRVNTEITKAPLSASMIKRYDEHHQDLTLLKALVRQQLPEKYKEIFFDQSKNGYAGYIDGGASQEEFYKFIKPILEKMDGTEELLVKLNREDLLRKQRTFDNGSIPHQIHLGELHAILRRQEDFYPFLKDNREKIEKILTFRIPYYVGPLARGNSRFAWMTRKSEETITPWNFEEVVDKGASAQSFIERMTNFDKNLPNEKVLPKHSLLYEYFTVYNELTKVKYVTEGMRKPAFLSGEQKKAIVDLLFKTNRKVTVKQLKEDYFKKIECFDSVEISGVEDRFNASLGTYHDLLKIIKDKDFLDNEENEDILEDIVLTLTLFEDREMIEERLKTYAHLFDDKVMKQLKRRRYTGWGRLSRKLINGIRDKQSGKTILDFLKSDGFANRNFMQLIHDDSLTFKEDIQKAQVSGQGDSLHEHIANLAGSPAIKKGILQTVKVVDELVKVMGRHKPENIVIEMARENQTTQKGQKNSRERMKRIEEGIKELGSQILKEHPVENTQLQNEKLYLYYLQNGRDMYVDQELDINRLSDYDVDHIVPQSFLKDDSIDNKVLTRSDKARGKSDNVPSEEVVKKMKNYWRQLLNAKLITQRKFDNLTKAERGGLSELDKAGFIKRQLVETRQITKHVAQILDSRMNTKYDENDKLIREVKVITLKSKLVSDFRKDFQFYKVREINNYHHAHDAYLNAVVGTALIKKYPKLESEFVYGDYKVYDVRKMIAKSEQEIGKATAKYFFYSNIMNFFKTEITLANGEIRKRPLIETNGETGEIVWDKGRDFATVRKVLSMPQVNIVKKTEVQTGGFSKESILPKRNSDKLIARKKDWDPKKYGGFDSPTVAYSVLVVAKVEKGKSKKLKSVKELLGITIMERSSFEKNPIDFLEAKGYKEVKKDLIIKLPKYSLFELENGRKRMLASAGELQKGNELALPSKYVNFLYLASHYEKLKGSPEDNEQKQLFVEQHKHYLDEIIEQISEFSKRVILADANLDKVLSAYNKHRDKPIREQAENIIHLFTLTNLGAPAAFKYFDTTIDRKRYTSTKEVLDATLIHQSITGLYETRIDLSQLGGDGGGSSEAAAKPAPGGLGIEDEYRLHETSTEPDVSLGSTWLSDFPQAWAETGGMGLAVRQAPLIIPLKATSTPVSIQQYPMSHEARLGIKPHIQRLLDQGILVPCQSPWNTPLLPVKKPGTNDYRPVQDLREVNKRVEDIHPTVPNPYNLLSGLPPSHQWYTVLDLKDAFFCLRLHPTSQPLFAFEWRDPGMGISGQLTWTRLPQGFKNSPTLFNEALHRDLADFRIQHPDLILLQYVDDILLAATSELDCQQGTRALLQTLGDLGYRASAKKAQICQKQVKYLGYLLREGQRWLTEARKETVMGQPVPKTPRQLREFLGKAGFCRLFIPGFAEMAAPLYPLTKPGTLFSWGPDQQKAYQEIKQALLTAPALGLPDLTKPFELFVDEKQGYAKGVLTQKLGPWRRPVAYLSKKLDPVAAGWPPCLRMVAAIAVLTKDAGKLTMGQPLVILAPHAVEALVKQPPDRWLSNARMTHYQAMLLDTDRVQFGPVVALNPATLLPLPEEGAPHDCLEILAETHGTRPDLTDQPIPDADHTWYTDGSSFLQEGQRKAGAAVTTETEVIWAGALPAGTSAQRAELIALTQALKMAEGKRLNVYTDSRYAFATAHIHGEIYRRRGWLTSEGREIKNKSEILALLKALFLPKRLSIIHCLGHQKGDSAEARGNRLADQAAREAAIKTPPDTSTLLIAGKRTADGSEFEKRTADGSEFESPKKKAKVE

SEQ ID NO: 2110 - protein, 2092 aa, synthetic construct
MPAAKRVKLDGGDKKYSIGLDIGTNSVGWAVITDEYKVPSKKFKVLGNTDRHSIKKNLIGALLFDSGETAEATRLKRTARRRYTRRKNRICYLQEIFSNEMAKVDDSFFHRLEESFLVEEDKKHERHPIFGNIVDEVAYHEKYPTIYHLRKKLVDSTDKADLRLIYLALAHMIKFRGHFLIEGDLNPDNSDVDKLFIQLVQTYNQLFEENPINASGVDAKAILSARLSKSRRLENLIAQLPGEKKNGLFGNLIALSLGLTPNFKSNFDLAEDAKLQLSKDTYDDDLDNLLAQIGDQYADLFLAAKNLSDAILLSDILRVNTEITKAPLSASMIKRYDEHHQDLTLLKALVRQQLPEKYKEIFFDQSKNGYAGYIDGGASQEEFYKFIKPILEKMDGTEELLVKLNREDLLRKQRTFDNGSIPHQIHLGELHAILRRQEDFYPFLKDNREKIEKILTFRIPYYVGPLARGNSRFAWMTRKSEETITPWNFEEVVDKGASAQSFIERMTNFDKNLPNEKVLPKHSLLYEYFTVYNELTKVKYVTEGMRKPAFLSGEQKKAIVDLLFKTNRKVTVKQLKEDYFKKIECFDSVEISGVEDRFNASLGTYHDLLKIIKDKDFLDNEENEDILEDIVLTLTLFEDREMIEERLKTYAHLFDDKVMKQLKRRRYTGWGRLSRKLINGIRDKQSGKTILDFLKSDGFANRNFMQLIHDDSLTFKEDIQKAQVSGQGDSLHEHIANLAGSPAIKKGILQTVKVVDELVKVMGRHKPENIVIEMARENQTTQKGQKNSRERMKRIEEGIKELGSQILKEHPVENTQLQNEKLYLYYLQNGRDMYVDQELDINRLSDYDVDHIVPQSFLKDDSIDNKVLTRSDKARGKSDNVPSEEVVKKMKNYWRQLLNAKLITQRKFDNLTKAERGGLSELDKAGFIKRQLVETRQITKHVAQILDSRMNTKYDENDKLIREVKVITLKSKLVSDFRKDFQFYKVREINNYHHAHDAYLNAVVGTALIKKYPKLESEFVYGDYKVYDVRKMIAKSEQEIGKATAKYFFYSNIMNFFKTEITLANGEIRKRPLIETNGETGEIVWDKGRDFATVRKVLSMPQVNIVKKTEVQTGGFSKESILPKRNSDKLIARKKDWDPKKYGGFDSPTVAYSVLVVAKVEKGKSKKLKSVKELLGITIMERSSFEKNPIDFLEAKGYKEVKKDLIIKLPKYSLFELENGRKRMLASAGELQKGNELALPSKYVNFLYLASHYEKLKGSPEDNEQKQLFVEQHKHYLDEIIEQISEFSKRVILADANLDKVLSAYNKHRDKPIREQAENIIHLFTLTNLGAPAAFKYFDTTIDRKRYTSTKEVLDATLIHQSITGLYETRIDLSQLGGDGGGGGGGGGGGLGIEDEYRLHETSTEPDVSLGSTWLSDFPQAWAETGGMGLAVRQAPLIIPLKATSTPVSIQQYPMSHEARLGIKPHIQRLLDQGILVPCQSPWNTPLLPVKKPGTNDYRPVQDLREVNKRVEDIHPTVPNPYNLLSGLPPSHQWYTVLDLKDAFFCLRLHPTSQPLFAFEWRDPGMGISGQLTWTRLPQGFKNSPTLFNEALHRDLADFRIQHPDLILLQYVDDILLAATSELDCQQGTRALLQTLGDLGYRASAKKAQICQKQVKYLGYLLREGQRWLTEARKETVMGQPVPKTPRQLREFLGKAGFCRLFIPGFAEMAAPLYPLTKPGTLFSWGPDQQKAYQEIKQALLTAPALGLPDLTKPFELFVDEKQGYAKGVLTQKLGPWRRPVAYLSKKLDPVAAGWPPCLRMVAAIAVLTKDAGKLTMGQPLVILAPHAVEALVKQPPDRWLSNARMTHYQAMLLDTDRVQFGPVVALNPATLLPLPEEGAPHDCLEILAETHGTRPDLTDQPIPDADHTWYTDGSSFLQEGQRKAGAAVTTETEVIWAGALPAGTSAQRAELIALTQALKMAEGKRLNVYTDSRYAFATAHIHGEIYRRRGWLTSEGREIKNKSEILALLKALFLPKRLSIIHCLGHQKGDSAEARGNRLADQAAREAAIKTPPDTSTLLIAGKRTADGSEFEKRTADGSEFESPKKKAKVE

SEQ ID NO: 2111 - skipped

SEQ ID NO: 2112 - protein, 2096 aa, synthetic construct
MPAAKRVKLDGGDKKYSIGLDIGTNSVGWAVITDEYKVPSKKFKVLGNTDRHSIKKNLIGALLFDSGETAEATRLKRTARRRYTRRKNRICYLQEIFSNEMAKVDDSFFHRLEESFLVEEDKKHERHPIFGNIVDEVAYHEKYPTIYHLRKKLVDSTDKADLRLIYLALAHMIKFRGHFLIEGDLNPDNSDVDKLFIQLVQTYNQLFEENPINASGVDAKAILSARLSKSRRLENLIAQLPGEKKNGLFGNLIALSLGLTPNFKSNFDLAEDAKLQLSKDTYDDDLDNLLAQIGDQYADLFLAAKNLSDAILLSDILRVNTEITKAPLSASMIKRYDEHHQDLTLLKALVRQQLPEKYKEIFFDQSKNGYAGYIDGGASQEEFYKFIKPILEKMDGTEELLVKLNREDLLRKQRTFDNGSIPHQIHLGELHAILRRQEDFYPFLKDNREKIEKILTFRIPYYVGPLARGNSRFAWMTRKSEETITPWNFEEVVDKGASAQSFIERMTNFDKNLPNEKVLPKHSLLYEYFTVYNELTKVKYVTEGMRKPAFLSGEQKKAIVDLLFKTNRKVTVKQLKEDYFKKIECFDSVEISGVEDRFNASLGTYHDLLKIIKDKDFLDNEENEDILEDIVLTLTLFEDREMIEERLKTYAHLFDDKVMKQLKRRRYTGWGRLSRKLINGIRDKQSGKTILDFLKSDGFANRNFMQLIHDDSLTFKEDIQKAQVSGQGDSLHEHIANLAGSPAIKKGILQTVKVVDELVKVMGRHKPENIVIEMARENQTTQKGQKNSRERMKRIEEGIKELGSQILKEHPVENTQLQNEKLYLYYLQNGRDMYVDQELDINRLSDYDVDHIVPQSFLKDDSIDNKVLTRSDKARGKSDNVPSEEVVKKMKNYWRQLLNAKLITQRKFDNLTKAERGGLSELDKAGFIKRQLVETRQITKHVAQILDSRMNTKYDENDKLIREVKVITLKSKLVSDFRKDFQFYKVREINNYHHAHDAYLNAVVGTALIKKYPKLESEFVYGDYKVYDVRKMIAKSEQEIGKATAKYFFYSNIMNFFKTEITLANGEIRKRPLIETNGETGEIVWDKGRDFATVRKVLSMPQVNIVKKTEVQTGGFSKESILPKRNSDKLIARKKDWDPKKYGGFDSPTVAYSVLVVAKVEKGKSKKLKSVKELLGITIMERSSFEKNPIDFLEAKGYKEVKKDLIIKLPKYSLFELENGRKRMLASAGELQKGNELALPSKYVNFLYLASHYEKLKGSPEDNEQKQLFVEQHKHYLDEIIEQISEFSKRVILADANLDKVLSAYNKHRDKPIREQAENIIHLFTLTNLGAPAAFKYFDTTIDRKRYTSTKEVLDATLIHQSITGLYETRIDLSQLGGDGGEAAAKGGSPAPGGLGIEDEYRLHETSTEPDVSLGSTWLSDFPQAWAETGGMGLAVRQAPLIIPLKATSTPVSIQQYPMSHEARLGIKPHIQRLLDQGILVPCQSPWNTPLLPVKKPGTNDYRPVQDLREVNKRVEDIHPTVPNPYNLLSGLPPSHQWYTVLDLKDAFFCLRLHPTSQPLFAFEWRDPGMGISGQLTWTRLPQGFKNSPTLFNEALHRDLADFRIQHPDLILLQYVDDILLAATSELDCQQGTRALLQTLGDLGYRASAKKAQICQKQVKYLGYLLREGQRWLTEARKETVMGQPVPKTPRQLREFLGKAGFCRLFIPGFAEMAAPLYPLTKPGTLFSWGPDQQKAYQEIKQALLTAPALGLPDLTKPFELFVDEKQGYAKGVLTQKLGPWRRPVAYLSKKLDPVAAGWPPCLRMVAAIAVLTKDAGKLTMGQPLVILAPHAVEALVKQPPDRWLSNARMTHYQAMLLDTDRVQFGPVVALNPATLLPLPEEGAPHDCLEILAETHGTRPDLTDQPIPDADHTWYTDGSSFLQEGQRKAGAAVTTETEVIWAGALPAGTSAQRAELIALTQALKMAEGKRLNVYTDSRYAFATAHIHGEIYRRRGWLTSEGREIKNKSEILALLKALFLPKRLSIIHCLGHQKGDSAEARGNRLADQAAREAAIKTPPDTSTLLIAGKRTADGSEFEKRTADGSEFESPKKKAKVE

SEQ ID NO: 2113 - skipped

SEQ ID NO: 2114 - protein, 2094 aa, synthetic construct; identical to SEQ ID NO: 2060

SEQ ID NO: 2115 - protein, 2093 aa, synthetic construct
MPAAKRVKLDGGDKKYSIGLDIGTNSVGWAVITDEYKVPSKKFKVLGNTDRHSIKKNLIGALLFDSGETAEATRLKRTARRRYTRRKNRICYLQEIFSNEMAKVDDSFFHRLEESFLVEEDKKHERHPIFGNIVDEVAYHEKYPTIYHLRKKLVDSTDKADLRLIYLALAHMIKFRGHFLIEGDLNPDNSDVDKLFIQLVQTYNQLFEENPINASGVDAKAILSARLSKSRRLENLIAQLPGEKKNGLFGNLIALSLGLTPNFKSNFDLAEDAKLQLSKDTYDDDLDNLLAQIGDQYADLFLAAKNLSDAILLSDILRVNTEITKAPLSASMIKRYDEHHQDLTLLKALVRQQLPEKYKEIFFDQSKNGYAGYIDGGASQEEFYKFIKPILEKMDGTEELLVKLNREDLLRKQRTFDNGSIPHQIHLGELHAILRRQEDFYPFLKDNREKIEKILTFRIPYYVGPLARGNSRFAWMTRKSEETITPWNFEEVVDKGASAQSFIERMTNFDKNLPNEKVLPKHSLLYEYFTVYNELTKVKYVTEGMRKPAFLSGEQKKAIVDLLFKTNRKVTVKQLKEDYFKKIECFDSVEISGVEDRFNASLGTYHDLLKIIKDKDFLDNEENEDILEDIVLTLTLFEDREMIEERLKTYAHLFDDKVMKQLKRRRYTGWGRLSRKLINGIRDKQSGKTILDFLKSDGFANRNFMQLIHDDSLTFKEDIQKAQVSGQGDSLHEHIANLAGSPAIKKGILQTVKVVDELVKVMGRHKPENIVIEMARENQTTQKGQKNSRERMKRIEEGIKELGSQILKEHPVENTQLQNEKLYLYYLQNGRDMYVDQELDINRLSDYDVDHIVPQSFLKDDSIDNKVLTRSDKARGKSDNVPSEEVVKKMKNYWRQLLNAKLITQRKFDNLTKAERGGLSELDKAGFIKRQLVETRQITKHVAQILDSRMNTKYDENDKLIREVKVITLKSKLVSDFRKDFQFYKVREINNYHHAHDAYLNAVVGTALIKKYPKLESEFVYGDYKVYDVRKMIAKSEQEIGKATAKYFFYSNIMNFFKTEITLANGEIRKRPLIETNGETGEIVWDKGRDFATVRKVLSMPQVNIVKKTEVQTGGFSKESILPKRNSDKLIARKKDWDPKKYGGFDSPTVAYSVLVVAKVEKGKSKKLKSVKELLGITIMERSSFEKNPIDFLEAKGYKEVKKDLIIKLPKYSLFELENGRKRMLASAGELQKGNELALPSKYVNFLYLASHYEKLKGSPEDNEQKQLFVEQHKHYLDEIIEQISEFSKRVILADANLDKVLSAYNKHRDKPIREQAENIIHLFTLTNLGAPAAFKYFDTTIDRKRYTSTKEVLDATLIHQSITGLYETRIDLSQLGGDGGGSSEAAAKGGLGIEDEYRLHETSTEPDVSLGSTWLSDFPQAWAETGGMGLAVRQAPLIIPLKATSTPVSIQQYPMSHEARLGIKPHIQRLLDQGILVPCQSPWNTPLLPVKKPGTNDYRPVQDLREVNKRVEDIHPTVPNPYNLLSGLPPSHQWYTVLDLKDAFFCLRLHPTSQPLFAFEWRDPGMGISGQLTWTRLPQGFKNSPTLFNEALHRDLADFRIQHPDLILLQYVDDILLAATSELDCQQGTRALLQTLGDLGYRASAKKAQICQKQVKYLGYLLREGQRWLTEARKETVMGQPVPKTPRQLREFLGKAGFCRLFIPGFAEMAAPLYPLTKPGTLFSWGPDQQKAYQEIKQALLTAPALGLPDLTKPFELFVDEKQGYAKGVLTQKLGPWRRPVAYLSKKLDPVAAGWPPCLRMVAAIAVLTKDAGKLTMGQPLVILAPHAVEALVKQPPDRWLSNARMTHYQAMLLDTDRVQFGPVVALNPATLLPLPEEGAPHDCLEILAETHGTRPDLTDQPIPDADHTWYTDGSSFLQEGQRKAGAAVTTETEVIWAGALPAGTSAQRAELIALTQALKMAEGKRLNVYTDSRYAFATAHIHGEIYRRRGWLTSEGREIKNKSEILALLKALFLPKRLSIIHCLGHQKGDSAEARGNRLADQAAREAAIKTPPDTSTLLIAGKRTADGSEFEKRTADGSEFESPKKKAKVE

SEQ ID NO: 2116 - protein, 2100 aa, synthetic construct
MPAAKRVKLDGGDKKYSIGLDIGTNSVGWAVITDEYKVPSKKFKVLGNTDRHSIKKNLIGALLFDSGETAEATRLKRTARRRYTRRKNRICYLQEIFSNEMAKVDDSFFHRLEESFLVEEDKKHERHPIFGNIVDEVAYHEKYPTIYHLRKKLVDSTDKADLRLIYLALAHMIKFRGHFLIEGDLNPDNSDVDKLFIQLVQTYNQLFEENPINASGVDAKAILSARLSKSRRLENLIAQLPGEKKNGLFGNLIALSLGLTPNFKSNFDLAEDAKLQLSKDTYDDDLDNLLAQIGDQYADLFLAAKNLSDAILLSDILRVNTEITKAPLSASMIKRYDEHHQDLTLLKALVRQQLPEKYKEIFFDQSKNGYAGYIDGGASQEEFYKFIKPILEKMDGTEELLVKLNREDLLRKQRTFDNGSIPHQIHLGELHAILRRQEDFYPFLKDNREKIEKILTFRIPYYVGPLARGNSRFAWMTRKSEETITPWNFEEVVDKGASAQSFIERMTNFDKNLPNEKVLPKHSLLYEYFTVYNELTKVKYVTEGMRKPAFLSGEQKKAIVDLLFKTNRKVTVKQLKEDYFKKIECFDSVEISGVEDRFNASLGTYHDLLKIIKDKDFLDNEENEDILEDIVLTLTLFEDREMIEERLKTYAHLFDDKVMKQLKRRRYTGWGRLSRKLINGIRDKQSGKTILDFLKSDGFANRNFMQLIHDDSLTFKEDIQKAQVSGQGDSLHEHIANLAGSPAIKKGILQTVKVVDELVKVMGRHKPENIVIEMARENQTTQKGQKNSRERMKRIEEGIKELGSQILKEHPVENTQLQNEKLYLYYLQNGRDMYVDQELDINRLSDYDVDHIVPQSFLKDDSIDNKVLTRSDKARGKSDNVPSEEVVKKMKNYWRQLLNAKLITQRKFDNLTKAERGGLSELDKAGFIKRQLVETRQITKHVAQILDSRMNTKYDENDKLIREVKVITLKSKLVSDFRKDFQFYKVREINNYHHAHDAYLNAVVGTALIKKYPKLESEFVYGDYKVYDVRKMIAKSEQEIGKATAKYFFYSNIMNFFKTEITLANGEIRKRPLIETNGETGEIVWDKGRDFATVRKVLSMPQVNIVKKTEVQTGGFSKESILPKRNSDKLIARKKDWDPKKYGGFDSPTVAYSVLVVAKVEKGKSKKLKSVKELLGITIMERSSFEKNPIDFLEAKGYKEVKKDLIIKLPKYSLFELENGRKRMLASAGELQKGNELALPSKYVNFLYLASHYEKLKGSPEDNEQKQLFVEQHKHYLDEIIEQISEFSKRVILADANLDKVLSAYNKHRDKPIREQAENIIHLFTLTNLGAPAAFKYFDTTIDRKRYTSTKEVLDATLIHQSITGLYETRIDLSQLGGDGGGGGGSGGGGSGGGGSGGLGIEDEYRLHETSTEPDVSLGSTWLSDFPQAWAETGGMGLAVRQAPLIIPLKATSTPVSIQQYPMSHEARLGIKPHIQRLLDQGILVPCQSPWNTPLLPVKKPGTNDYRPVQDLREVNKRVEDIHPTVPNPYNLLSGLPPSHQWYTVLDLKDAFFCLRLHPTSQPLFAFEWRDPGMGISGQLTWTRLPQGFKNSPTLFNEALHRDLADFRIQHPDLILLQYVDDILLAATSELDCQQGTRALLQTLGDLGYRASAKKAQICQKQVKYLGYLLREGQRWLTEARKETVMGQPVPKTPRQLREFLGKAGFCRLFIPGFAEMAAPLYPLTKPGTLFSWGPDQQKAYQEIKQALLTAPALGLPDLTKPFELFVDEKQGYAKGVLTQKLGPWRRPVAYLSKKLDPVAAGWPPCLRMVAAIAVLTKDAGKLTMGQPLVILAPHAVEALVKQPPDRWLSNARMTHYQAMLLDTDRVQFGPVVALNPATLLPLPEEGAPHDCLEILAETHGTRPDLTDQPIPDADHTWYTDGSSFLQEGQRKAGAAVTTETEVIWAGALPAGTSAQRAELIALTQALKMAEGKRLNVYTDSRYAFATAHIHGEIYRRRGWLTSEGREIKNKSEILALLKALFLPKRLSIIHCLGHQKGDSAEARGNRLADQAAREAAIKTPPDTSTLLIAGKRTADGSEFEKRTADGSEFESPKKKAKVE

SEQ ID NO: 2117 - protein, 2096 aa, synthetic construct
MPAAKRVKLDGGDKKYSIGLDIGTNSVGWAVITDEYKVPSKKFKVLGNTDRHSIKKNLIGALLFDSGETAEATRLKRTARRRYTRRKNRICYLQEIFSNEMAKVDDSFFHRLEESFLVEEDKKHERHPIFGNIVDEVAYHEKYPTIYHLRKKLVDSTDKADLRLIYLALAHMIKFRGHFLIEGDLNPDNSDVDKLFIQLVQTYNQLFEENPINASGVDAKAILSARLSKSRRLENLIAQLPGEKKNGLFGNLIALSLGLTPNFKSNFDLAEDAKLQLSKDTYDDDLDNLLAQIGDQYADLFLAAKNLSDAILLSDILRVNTEITKAPLSASMIKRYDEHHQDLTLLKALVRQQLPEKYKEIFFDQSKNGYAGYIDGGASQEEFYKFIKPILEKMDGTEELLVKLNREDLLRKQRTFDNGSIPHQIHLGELHAILRRQEDFYPFLKDNREKIEKILTFRIPYYVGPLARGNSRFAWMTRKSEETITPWNFEEVVDKGASAQSFIERMTNFDKNLPNEKVLPKHSLLYEYFTVYNELTKVKYVTEGMRKPAFLSGEQKKAIVDLLFKTNRKVTVKQLKEDYFKKIECFDSVEISGVEDRFNASLGTYHDLLKIIKDKDFLDNEENEDILEDIVLTLTLFEDREMIEERLKTYAHLFDDKVMKQLKRRRYTGWGRLSRKLINGIRDKQSGKTILDFLKSDGFANRNFMQLIHDDSLTFKEDIQKAQVSGQGDSLHEHIANLAGSPAIKKGILQTVKVVDELVKVMGRHKPENIVIEMARENQTTQKGQKNSRERMKRIEEGIKELGSQILKEHPVENTQLQNEKLYLYYLQNGRDMYVDQELDINRLSDYDVDHIVPQSFLKDDSIDNKVLTRSDKARGKSDNVPSEEVVKKMKNYWRQLLNAKLITQRKFDNLTKAERGGLSELDKAGFIKRQLVETRQITKHVAQILDSRMNTKYDENDKLIREVKVITLKSKLVSDFRKDFQFYKVREINNYHHAHDAYLNAVVGTALIKKYPKLESEFVYGDYKVYDVRKMIAKSEQEIGKATAKYFFYSNIMNFFKTEITLANGEIRKRPLIETNGETGEIVWDKGRDFATVRKVLSMPQVNIVKKTEVQTGGFSKESILPKRNSDKLIARKKDWDPKKYGGFDSPTVAYSVLVVAKVEKGKSKKLKSVKELLGITIMERSSFEKNPIDFLEAKGYKEVKKDLIIKLPKYSLFELENGRKRMLASAGELQKGNELALPSKYVNFLYLASHYEKLKGSPEDNEQKQLFVEQHKHYLDEIIEQISEFSKRVILADANLDKVLSAYNKHRDKPIREQAENIIHLFTLTNLGAPAAFKYFDTTIDRKRYTSTKEVLDATLIHQSITGLYETRIDLSQLGGDGGGSSGGSEAAAKGGLGIEDEYRLHETSTEPDVSLGSTWLSDFPQAWAETGGMGLAVRQAPLIIPLKATSTPVSIQQYPMSHEARLGIKPHIQRLLDQGILVPCQSPWNTPLLPVKKPGTNDYRPVQDLREVNKRVEDIHPTVPNPYNLLSGLPPSHQWYTVLDLKDAFFCLRLHPTSQPLFAFEWRDPGMGISGQLTWTRLPQGFKNSPTLFNEALHRDLADFRIQHPDLILLQYVDDILLAATSELDCQQGTRALLQTLGDLGYRASAKKAQICQKQVKYLGYLLREGQRWLTEARKETVMGQPVPKTPRQLREFLGKAGFCRLFIPGFAEMAAPLYPLTKPGTLFSWGPDQQKAYQEIKQALLTAPALGLPDLTKPFELFVDEKQGYAKGVLTQKLGPWRRPVAYLSKKLDPVAAGWPPCLRMVAAIAVLTKDAGKLTMGQPLVILAPHAVEALVKQPPDRWLSNARMTHYQAMLLDTDRVQFGPVVALNPATLLPLPEEGAPHDCLEILAETHGTRPDLTDQPIPDADHTWYTDGSSFLQEGQRKAGAAVTTETEVIWAGALPAGTSAQRAELIALTQALKMAEGKRLNVYTDSRYAFATAHIHGEIYRRRGWLTSEGREIKNKSEILALLKALFLPKRLSIIHCLGHQKGDSAEARGNRLADQAAREAAIKTPPDTSTLLIAGKRTADGSEFEKRTADGSEFESPKKKAKVE

SEQ ID NO: 2118-2119 - skipped (2 entries)

SEQ ID NO: 2120 - protein, 2096 aa, synthetic construct
MPAAKRVKLDGGDKKYSIGLDIGTNSVGWAVITDEYKVPSKKFKVLGNTDRHSIKKNLIGALLFDSGETAEATRLKRTARRRYTRRKNRICYLQEIFSNEMAKVDDSFFHRLEESFLVEEDKKHERHPIFGNIVDEVAYHEKYPTIYHLRKKLVDSTDKADLRLIYLALAHMIKFRGHFLIEGDLNPDNSDVDKLFIQLVQTYNQLFEENPINASGVDAKAILSARLSKSRRLENLIAQLPGEKKNGLFGNLIALSLGLTPNFKSNFDLAEDAKLQLSKDTYDDDLDNLLAQIGDQYADLFLAAKNLSDAILLSDILRVNTEITKAPLSASMIKRYDEHHQDLTLLKALVRQQLPEKYKEIFFDQSKNGYAGYIDGGASQEEFYKFIKPILEKMDGTEELLVKLNREDLLRKQRTFDNGSIPHQIHLGELHAILRRQEDFYPFLKDNREKIEKILTFRIPYYVGPLARGNSRFAWMTRKSEETITPWNFEEVVDKGASAQSFIERMTNFDKNLPNEKVLPKHSLLYEYFTVYNELTKVKYVTEGMRKPAFLSGEQKKAIVDLLFKTNRKVTVKQLKEDYFKKIECFDSVEISGVEDRFNASLGTYHDLLKIIKDKDFLDNEENEDILEDIVLTLTLFEDREMIEERLKTYAHLFDDKVMKQLKRRRYTGWGRLSRKLINGIRDKQSGKTILDFLKSDGFANRNFMQLIHDDSLTFKEDIQKAQVSGQGDSLHEHIANLAGSPAIKKGILQTVKVVDELVKVMGRHKPENIVIEMARENQTTQKGQKNSRERMKRIEEGIKELGSQILKEHPVENTQLQNEKLYLYYLQNGRDMYVDQELDINRLSDYDVDHIVPQSFLKDDSIDNKVLTRSDKARGKSDNVPSEEVVKKMKNYWRQLLNAKLITQRKFDNLTKAERGGLSELDKAGFIKRQLVETRQITKHVAQILDSRMNTKYDENDKLIREVKVITLKSKLVSDFRKDFQFYKVREINNYHHAHDAYLNAVVGTALIKKYPKLESEFVYGDYKVYDVRKMIAKSEQEIGKATAKYFFYSNIMNFFKTEITLANGEIRKRPLIETNGETGEIVWDKGRDFATVRKVLSMPQVNIVKKTEVQTGGFSKESILPKRNSDKLIARKKDWDPKKYGGFDSPTVAYSVLVVAKVEKGKSKKLKSVKELLGITIMERSSFEKNPIDFLEAKGYKEVKKDLIIKLPKYSLFELENGRKRMLASAGELQKGNELALPSKYVNFLYLASHYEKLKGSPEDNEQKQLFVEQHKHYLDEIIEQISEFSKRVILADANLDKVLSAYNKHRDKPIREQAENIIHLFTLTNLGAPAAFKYFDTTIDRKRYTSTKEVLDATLIHQSITGLYETRIDLSQLGGDGGPAPEAAAKGGGGGLGIEDEYRLHETSTEPDVSLGSTWLSDFPQAWAETGGMGLAVRQAPLIIPLKATSTPVSIQQYPMSHEARLGIKPHIQRLLDQGILVPCQSPWNTPLLPVKKPGTNDYRPVQDLREVNKRVEDIHPTVPNPYNLLSGLPPSHQWYTVLDLKDAFFCLRLHPTSQPLFAFEWRDPGMGISGQLTWTRLPQGFKNSPTLFNEALHRDLADFRIQHPDLILLQYVDDILLAATSELDCQQGTRALLQTLGDLGYRASAKKAQICQKQVKYLGYLLREGQRWLTEARKETVMGQPVPKTPRQLREFLGKAGFCRLFIPGFAEMAAPLYPLTKPGTLFSWGPDQQKAYQEIKQALLTAPALGLPDLTKPFELFVDEKQGYAKGVLTQKLGPWRRPVAYLSKKLDPVAAGWPPCLRMVAAIAVLTKDAGKLTMGQPLVILAPHAVEALVKQPPDRWLSNARMTHYQAMLLDTDRVQFGPVVALNPATLLPLPEEGAPHDCLEILAETHGTRPDLTDQPIPDADHTWYTDGSSFLQEGQRKAGAAVTTETEVIWAGALPAGTSAQRAELIALTQALKMAEGKRLNVYTDSRYAFATAHIHGEIYRRRGWLTSEGREIKNKSEILALLKALFLPKRLSIIHCLGHQKGDSAEARGNRLADQAAREAAIKTPPDTSTLLIAGKRTADGSEFEKRTADGSEFESPKKKAKVE

SEQ ID NO: 2121 - skipped

SEQ ID NO: 2122 - protein, 2094 aa, synthetic construct; identical to SEQ ID NO: 2058

SEQ ID NO: 2123 - protein, 2096 aa, synthetic construct; identical to SEQ ID NO: 2054

SEQ ID NO: 2124-2130 - skipped (7 entries)

SEQ ID NO: 2131 - protein, 2088 aa, synthetic construct
MPAAKRVKLDGGDKKYSIGLDIGTNSVGWAVITDEYKVPSKKFKVLGNTDRHSIKKNLIGALLFDSGETAEATRLKRTARRRYTRRKNRICYLQEIFSNEMAKVDDSFFHRLEESFLVEEDKKHERHPIFGNIVDEVAYHEKYPTIYHLRKKLVDSTDKADLRLIYLALAHMIKFRGHFLIEGDLNPDNSDVDKLFIQLVQTYNQLFEENPINASGVDAKAILSARLSKSRRLENLIAQLPGEKKNGLFGNLIALSLGLTPNFKSNFDLAEDAKLQLSKDTYDDDLDNLLAQIGDQYADLFLAAKNLSDAILLSDILRVNTEITKAPLSASMIKRYDEHHQDLTLLKALVRQQLPEKYKEIFFDQSKNGYAGYIDGGASQEEFYKFIKPILEKMDGTEELLVKLNREDLLRKQRTFDNGSIPHQIHLGELHAILRRQEDFYPFLKDNREKIEKILTFRIPYYVGPLARGNSRFAWMTRKSEETITPWNFEEVVDKGASAQSFIERMTNFDKNLPNEKVLPKHSLLYEYFTVYNELTKVKYVTEGMRKPAFLSGEQKKAIVDLLFKTNRKVTVKQLKEDYFKKIECFDSVEISGVEDRFNASLGTYHDLLKIIKDKDFLDNEENEDILEDIVLTLTLFEDREMIEERLKTYAHLFDDKVMKQLKRRRYTGWGRLSRKLINGIRDKQSGKTILDFLKSDGFANRNFMQLIHDDSLTFKEDIQKAQVSGQGDSLHEHIANLAGSPAIKKGILQTVKVVDELVKVMGRHKPENIVIEMARENQTTQKGQKNSRERMKRIEEGIKELGSQILKEHPVENTQLQNEKLYLYYLQNGRDMYVDQELDINRLSDYDVDHIVPQSFLKDDSIDNKVLTRSDKARGKSDNVPSEEVVKKMKNYWRQLLNAKLITQRKFDNLTKAERGGLSELDKAGFIKRQLVETRQITKHVAQILDSRMNTKYDENDKLIREVKVITLKSKLVSDFRKDFQFYKVREINNYHHAHDAYLNAVVGTALIKKYPKLESEFVYGDYKVYDVRKMIAKSEQEIGKATAKYFFYSNIMNFFKTEITLANGEIRKRPLIETNGETGEIVWDKGRDFATVRKVLSMPQVNIVKKTEVQTGGFSKESILPKRNSDKLIARKKDWDPKKYGGFDSPTVAYSVLVVAKVEKGKSKKLKSVKELLGITIMERSSFEKNPIDFLEAKGYKEVKKDLIIKLPKYSLFELENGRKRMLASAGELQKGNELALPSKYVNFLYLASHYEKLKGSPEDNEQKQLFVEQHKHYLDEIIEQISEFSKRVILADANLDKVLSAYNKHRDKPIREQAENIIHLFTLTNLGAPAAFKYFDTTIDRKRYTSTKEVLDATLIHQSITGLYETRIDLSQLGGDGGGGSGGLGIEDEYRLHETSTEPDVSLGSTWLSDFPQAWAETGGMGLAVRQAPLIIPLKATSTPVSIQQYPMSHEARLGIKPHIQRLLDQGILVPCQSPWNTPLLPVKKPGTNDYRPVQDLREVNKRVEDIHPTVPNPYNLLSGLPPSHQWYTVLDLKDAFFCLRLHPTSQPLFAFEWRDPGMGISGQLTWTRLPQGFKNSPTLFNEALHRDLADFRIQHPDLILLQYVDDILLAATSELDCQQGTRALLQTLGDLGYRASAKKAQICQKQVKYLGYLLREGQRWLTEARKETVMGQPVPKTPRQLREFLGKAGFCRLFIPGFAEMAAPLYPLTKPGTLFSWGPDQQKAYQEIKQALLTAPALGLPDLTKPFELFVDEKQGYAKGVLTQKLGPWRRPVAYLSKKLDPVAAGWPPCLRMVAAIAVLTKDAGKLTMGQPLVILAPHAVEALVKQPPDRWLSNARMTHYQAMLLDTDRVQFGPVVALNPATLLPLPEEGAPHDCLEILAETHGTRPDLTDQPIPDADHTWYTDGSSFLQEGQRKAGAAVTTETEVIWAGALPAGTSAQRAELIALTQALKMAEGKRLNVYTDSRYAFATAHIHGEIYRRRGWLTSEGREIKNKSEILALLKALFLPKRLSIIHCLGHQKGDSAEARGNRLADQAAREAAIKTPPDTSTLLIAGKRTADGSEFEKRTADGSEFESPKKKAKVE

SEQ ID NO: 2132 - protein, 2096 aa, synthetic construct
MPAAKRVKLDGGDKKYSIGLDIGTNSVGWAVITDEYKVPSKKFKVLGNTDRHSIKKNLIGALLFDSGETAEATRLKRTARRRYTRRKNRICYLQEIFSNEMAKVDDSFFHRLEESFLVEEDKKHERHPIFGNIVDEVAYHEKYPTIYHLRKKLVDSTDKADLRLIYLALAHMIKFRGHFLIEGDLNPDNSDVDKLFIQLVQTYNQLFEENPINASGVDAKAILSARLSKSRRLENLIAQLPGEKKNGLFGNLIALSLGLTPNFKSNFDLAEDAKLQLSKDTYDDDLDNLLAQIGDQYADLFLAAKNLSDAILLSDILRVNTEITKAPLSASMIKRYDEHHQDLTLLKALVRQQLPEKYKEIFFDQSKNGYAGYIDGGASQEEFYKFIKPILEKMDGTEELLVKLNREDLLRKQRTFDNGSIPHQIHLGELHAILRRQEDFYPFLKDNREKIEKILTFRIPYYVGPLARGNSRFAWMTRKSEETITPWNFEEVVDKGASAQSFIERMTNFDKNLPNEKVLPKHSLLYEYFTVYNELTKVKYVTEGMRKPAFLSGEQKKAIVDLLFKTNRKVTVKQLKEDYFKKIECFDSVEISGVEDRFNASLGTYHDLLKIIKDKDFLDNEENEDILEDIVLTLTLFEDREMIEERLKTYAHLFDDKVMKQLKRRRYTGWGRLSRKLINGIRDKQSGKTILDFLKSDGFANRNFMQLIHDDSLTFKEDIQKAQVSGQGDSLHEHIANLAGSPAIKKGILQTVKVVDELVKVMGRHKPENIVIEMARENQTTQKGQKNSRERMKRIEEGIKELGSQILKEHPVENTQLQNEKLYLYYLQNGRDMYVDQELDINRLSDYDVDHIVPQSFLKDDSIDNKVLTRSDKARGKSDNVPSEEVVKKMKNYWRQLLNAKLITQRKFDNLTKAERGGLSELDKAGFIKRQLVETRQITKHVAQILDSRMNTKYDENDKLIREVKVITLKSKLVSDFRKDFQFYKVREINNYHHAHDAYLNAVVGTALIKKYPKLESEFVYGDYKVYDVRKMIAKSEQEIGKATAKYFFYSNIMNFFKTEITLANGEIRKRPLIETNGETGEIVWDKGRDFATVRKVLSMPQVNIVKKTEVQTGGFSKESILPKRNSDKLIARKKDWDPKKYGGFDSPTVAYSVLVVAKVEKGKSKKLKSVKELLGITIMERSSFEKNPIDFLEAKGYKEVKKDLIIKLPKYSLFELENGRKRMLASAGELQKGNELALPSKYVNFLYLASHYEKLKGSPEDNEQKQLFVEQHKHYLDEIIEQISEFSKRVILADANLDKVLSAYNKHRDKPIREQAENIIHLFTLTNLGAPAAFKYFDTTIDRKRYTSTKEVLDATLIHQSITGLYETRIDLSQLGGDGGGGGEAAAKGGSGGLGIEDEYRLHETSTEPDVSLGSTWLSDFPQAWAETGGMGLAVRQAPLIIPLKATSTPVSIQQYPMSHEARLGIKPHIQRLLDQGILVPCQSPWNTPLLPVKKPGTNDYRPVQDLREVNKRVEDIHPTVPNPYNLLSGLPPSHQWYTVLDLKDAFFCLRLHPTSQPLFAFEWRDPGMGISGQLTWTRLPQGFKNSPTLFNEALHRDLADFRIQHPDLILLQYVDDILLAATSELDCQQGTRALLQTLGDLGYRASAKKAQICQKQVKYLGYLLREGQRWLTEARKETVMGQPVPKTPRQLREFLGKAGFCRLFIPGFAEMAAPLYPLTKPGTLFSWGPDQQKAYQEIKQALLTAPALGLPDLTKPFELFVDEKQGYAKGVLTQKLGPWRRPVAYLSKKLDPVAAGWPPCLRMVAAIAVLTKDAGKLTMGQPLVILAPHAVEALVKQPPDRWLSNARMTHYQAMLLDTDRVQFGPVVALNPATLLPLPEEGAPHDCLEILAETHGTRPDLTDQPIPDADHTWYTDGSSFLQEGQRKAGAAVTTETEVIWAGALPAGTSAQRAELIALTQALKMAEGKRLNVYTDSRYAFATAHIHGEIYRRRGWLTSEGREIKNKSEILALLKALFLPKRLSIIHCLGHQKGDSAEARGNRLADQAAREAAIKTPPDTSTLLIAGKRTADGSEFEKRTADGSEFESPKKKAKVE

SEQ ID NO: 2133 - protein, 2094 aa, synthetic construct
MPAAKRVKLDGGDKKYSIGLDIGTNSVGWAVITDEYKVPSKKFKVLGNTDRHSIKKNLIGALLFDSGETAEATRLKRTARRRYTRRKNRICYLQEIFSNEMAKVDDSFFHRLEESFLVEEDKKHERHPIFGNIVDEVAYHEKYPTIYHLRKKLVDSTDKADLRLIYLALAHMIKFRGHFLIEGDLNPDNSDVDKLFIQLVQTYNQLFEENPINASGVDAKAILSARLSKSRRLENLIAQLPGEKKNGLFGNLIALSLGLTPNFKSNFDLAEDAKLQLSKDTYDDDLDNLLAQIGDQYADLFLAAKNLSDAILLSDILRVNTEITKAPLSASMIKRYDEHHQDLTLLKALVRQQLPEKYKEIFFDQSKNGYAGYIDGGASQEEFYKFIKPILEKMDGTEELLVKLNREDLLRKQRTFDNGSIPHQIHLGELHAILRRQEDFYPFLKDNREKIEKILTFRIPYYVGPLARGNSRFAWMTRKSEETITPWNFEEVVDKGASAQSFIERMTNFDKNLPNEKVLPKHSLLYEYFTVYNELTKVKYVTEGMRKPAFLSGEQKKAIVDLLFKTNRKVTVKQLKEDYFKKIECFDSVEISGVEDRFNASLGTYHDLLKIIKDKDFLDNEENEDILEDIVLTLTLFEDREMIEERLKTYAHLFDDKVMKQLKRRRYTGWGRLSRKLINGIRDKQSGKTILDFLKSDGFANRNFMQLIHDDSLTFKEDIQKAQVSGQGDSLHEHIANLAGSPAIKKGILQTVKVVDELVKVMGRHKPENIVIEMARENQTTQKGQKNSRERMKRIEEGIKELGSQILKEHPVENTQLQNEKLYLYYLQNGRDMYVDQELDINRLSDYDVDHIVPQSFLKDDSIDNKVLTRSDKARGKSDNVPSEEVVKKMKNYWRQLLNAKLITQRKFDNLTKAERGGLSELDKAGFIKRQLVETRQITKHVAQILDSRMNTKYDENDKLIREVKVITLKSKLVSDFRKDFQFYKVREINNYHHAHDAYLNAVVGTALIKKYPKLESEFVYGDYKVYDVRKMIAKSEQEIGKATAKYFFYSNIMNFFKTEITLANGEIRKRPLIETNGETGEIVWDKGRDFATVRKVLSMPQVNIVKKTEVQTGGFSKESILPKRNSDKLIARKKDWDPKKYGGFDSPTVAYSVLVVAKVEKGKSKKLKSVKELLGITIMERSSFEKNPIDFLEAKGYKEVKKDLIIKLPKYSLFELENGRKRMLASAGELQKGNELALPSKYVNFLYLASHYEKLKGSPEDNEQKQLFVEQHKHYLDEIIEQISEFSKRVILADANLDKVLSAYNKHRDKPIREQAENIIHLFTLTNLGAPAAFKYFDTTIDRKRYTSTKEVLDATLIHQSITGLYETRIDLSQLGGDGGGGGGGSPAPGGLGIEDEYRLHETSTEPDVSLGSTWLSDFPQAWAETGGMGLAVRQAPLIIPLKATSTPVSIQQYPMSHEARLGIKPHIQRLLDQGILVPCQSPWNTPLLPVKKPGTNDYRPVQDLREVNKRVEDIHPTVPNPYNLLSGLPPSHQWYTVLDLKDAFFCLRLHPTSQPLFAFEWRDPGMGISGQLTWTRLPQGFKNSPTLFNEALHRDLADFRIQHPDLILLQYVDDILLAATSELDCQQGTRALLQTLGDLGYRASAKKAQICQKQVKYLGYLLREGQRWLTEARKETVMGQPVPKTPRQLREFLGKAGFCRLFIPGFAEMAAPLYPLTKPGTLFSWGPDQQKAYQEIKQALLTAPALGLPDLTKPFELFVDEKQGYAKGVLTQKLGPWRRPVAYLSKKLDPVAAGWPPCLRMVAAIAVLTKDAGKLTMGQPLVILAPHAVEALVKQPPDRWLSNARMTHYQAMLLDTDRVQFGPVVALNPATLLPLPEEGAPHDCLEILAETHGTRPDLTDQPIPDADHTWYTDGSSFLQEGQRKAGAAVTTETEVIWAGALPAGTSAQRAELIALTQALKMAEGKRLNVYTDSRYAFATAHIHGEIYRRRGWLTSEGREIKNKSEILALLKALFLPKRLSIIHCLGHQKGDSAEARGNRLADQAAREAAIKTPPDTSTLLIAGKRTADGSEFEKRTADGSEFESPKKKAKVE

SEQ ID NO: 2134-2136 - skipped (3 entries)

SEQ ID NO: 2137 - protein, 2097 aa, synthetic construct
MPAAKRVKLDGGDKKYSIGLDIGTNSVGWAVITDEYKVPSKKFKVLGNTDRHSIKKNLIGALLFDSGETAEATRLKRTARRRYTRRKNRICYLQEIFSNEMAKVDDSFFHRLEESFLVEEDKKHERHPIFGNIVDEVAYHEKYPTIYHLRKKLVDSTDKADLRLIYLALAHMIKFRGHFLIEGDLNPDNSDVDKLFIQLVQTYNQLFEENPINASGVDAKAILSARLSKSRRLENLIAQLPGEKKNGLFGNLIALSLGLTPNFKSNFDLAEDAKLQLSKDTYDDDLDNLLAQIGDQYADLFLAAKNLSDAILLSDILRVNTEITKAPLSASMIKRYDEHHQDLTLLKALVRQQLPEKYKEIFFDQSKNGYAGYIDGGASQEEFYKFIKPILEKMDGTEELLVKLNREDLLRKQRTFDNGSIPHQIHLGELHAILRRQEDFYPFLKDNREKIEKILTFRIPYYVGPLARGNSRFAWMTRKSEETITPWNFEEVVDKGASAQSFIERMTNFDKNLPNEKVLPKHSLLYEYFTVYNELTKVKYVTEGMRKPAFLSGEQKKAIVDLLFKTNRKVTVKQLKEDYFKKIECFDSVEISGVEDRFNASLGTYHDLLKIIKDKDFLDNEENEDILEDIVLTLTLFEDREMIEERLKTYAHLFDDKVMKQLKRRRYTGWGRLSRKLINGIRDKQSGKTILDFLKSDGFANRNFMQLIHDDSLTFKEDIQKAQVSGQGDSLHEHIANLAGSPAIKKGILQTVKVVDELVKVMGRHKPENIVIEMARENQTTQKGQKNSRERMKRIEEGIKELGSQILKEHPVENTQLQNEKLYLYYLQNGRDMYVDQELDINRLSDYDVDHIVPQSFLKDDSIDNKVLTRSDKARGKSDNVPSEEVVKKMKNYWRQLLNAKLITQRKFDNLTKAERGGLSELDKAGFIKRQLVETRQITKHVAQILDSRMNTKYDENDKLIREVKVITLKSKLVSDFRKDFQFYKVREINNYHHAHDAYLNAVVGTALIKKYPKLESEFVYGDYKVYDVRKMIAKSEQEIGKATAKYFFYSNIMNFFKTEITLANGEIRKRPLIETNGETGEIVWDKGRDFATVRKVLSMPQVNIVKKTEVQTGGFSKESILPKRNSDKLIARKKDWDPKKYGGFDSPTVAYSVLVVAKVEKGKSKKLKSVKELLGITIMERSSFEKNPIDFLEAKGYKEVKKDLIIKLPKYSLFELENGRKRMLASAGELQKGNELALPSKYVNFLYLASHYEKLKGSPEDNEQKQLFVEQHKHYLDEIIEQISEFSKRVILADANLDKVLSAYNKHRDKPIREQAENIIHLFTLTNLGAPAAFKYFDTTIDRKRYTSTKEVLDATLIHQSITGLYETRIDLSQLGGDGGGGSGGSGGSGGSGGLGIEDEYRLHETSTEPDVSLGSTWLSDFPQAWAETGGMGLAVRQAPLIIPLKATSTPVSIQQYPMSHEARLGIKPHIQRLLDQGILVPCQSPWNTPLLPVKKPGTNDYRPVQDLREVNKRVEDIHPTVPNPYNLLSGLPPSHQWYTVLDLKDAFFCLRLHPTSQPLFAFEWRDPGMGISGQLTWTRLPQGFKNSPTLFNEALHRDLADFRIQHPDLILLQYVDDILLAATSELDCQQGTRALLQTLGDLGYRASAKKAQICQKQVKYLGYLLREGQRWLTEARKETVMGQPVPKTPRQLREFLGKAGFCRLFIPGFAEMAAPLYPLTKPGTLFSWGPDQQKAYQEIKQALLTAPALGLPDLTKPFELFVDEKQGYAKGVLTQKLGPWRRPVAYLSKKLDPVAAGWPPCLRMVAAIAVLTKDAGKLTMGQPLVILAPHAVEALVKQPPDRWLSNARMTHYQAMLLDTDRVQFGPVVALNPATLLPLPEEGAPHDCLEILAETHGTRPDLTDQPIPDADHTWYTDGSSFLQEGQRKAGAAVTTETEVIWAGALPAGTSAQRAELIALTQALKMAEGKRLNVYTDSRYAFATAHIHGEIYRRRGWLTSEGREIKNKSEILALLKALFLPKRLSIIHCLGHQKGDSAEARGNRLADQAAREAAIKTPPDTSTLLIAGKRTADGSEFEKRTADGSEFESPKKKAKVE

SEQ ID NO: 2138-2139 - skipped (2 entries)

SEQ ID NO: 2140 - protein, 2103 aa, synthetic construct
MPAAKRVKLDGGDKKYSIGLDIGTNSVGWAVITDEYKVPSKKFKVLGNTDRHSIKKNLIGALLFDSGETAEATRLKRTARRRYTRRKNRICYLQEIFSNEMAKVDDSFFHRLEESFLVEEDKKHERHPIFGNIVDEVAYHEKYPTIYHLRKKLVDSTDKADLRLIYLALAHMIKFRGHFLIEGDLNPDNSDVDKLFIQLVQTYNQLFEENPINASGVDAKAILSARLSKSRRLENLIAQLPGEKKNGLFGNLIALSLGLTPNFKSNFDLAEDAKLQLSKDTYDDDLDNLLAQIGDQYADLFLAAKNLSDAILLSDILRVNTEITKAPLSASMIKRYDEHHQDLTLLKALVRQQLPEKYKEIFFDQSKNGYAGYIDGGASQEEFYKFIKPILEKMDGTEELLVKLNREDLLRKQRTFDNGSIPHQIHLGELHAILRRQEDFYPFLKDNREKIEKILTFRIPYYVGPLARGNSRFAWMTRKSEETITPWNFEEVVDKGASAQSFIERMTNFDKNLPNEKVLPKHSLLYEYFTVYNELTKVKYVTEGMRKPAFLSGEQKKAIVDLLFKTNRKVTVKQLKEDYFKKIECFDSVEISGVEDRFNASLGTYHDLLKIIKDKDFLDNEENEDILEDIVLTLTLFEDREMIEERLKTYAHLFDDKVMKQLKRRRYTGWGRLSRKLINGIRDKQSGKTILDFLKSDGFANRNFMQLIHDDSLTFKEDIQKAQVSGQGDSLHEHIANLAGSPAIKKGILQTVKVVDELVKVMGRHKPENIVIEMARENQTTQKGQKNSRERMKRIEEGIKELGSQILKEHPVENTQLQNEKLYLYYLQNGRDMYVDQELDINRLSDYDVDHIVPQSFLKDDSIDNKVLTRSDKARGKSDNVPSEEVVKKMKNYWRQLLNAKLITQRKFDNLTKAERGGLSELDKAGFIKRQLVETRQITKHVAQILDSRMNTKYDENDKLIREVKVITLKSKLVSDFRKDFQFYKVREINNYHHAHDAYLNAVVGTALIKKYPKLESEFVYGDYKVYDVRKMIAKSEQEIGKATAKYFFYSNIMNFFKTEITLANGEIRKRPLIETNGETGEIVWDKGRDFATVRKVLSMPQVNIVKKTEVQTGGFSKESILPKRNSDKLIARKKDWDPKKYGGFDSPTVAYSVLVVAKVEKGKSKKLKSVKELLGITIMERSSFEKNPIDFLEAKGYKEVKKDLIIKLPKYSLFELENGRKRMLASAGELQKGNELALPSKYVNFLYLASHYEKLKGSPEDNEQKQLFVEQHKHYLDEIIEQISEFSKRVILADANLDKVLSAYNKHRDKPIREQAENIIHLFTLTNLGAPAAFKYFDTTIDRKRYTSTKEVLDATLIHQSITGLYETRIDLSQLGGDGGGSSGSSGSSGSSGSSGSSGGLGIEDEYRLHETSTEPDVSLGSTWLSDFPQAWAETGGMGLAVRQAPLIIPLKATSTPVSIQQYPMSHEARLGIKPHIQRLLDQGILVPCQSPWNTPLLPVKKPGTNDYRPVQDLREVNKRVEDIHPTVPNPYNLLSGLPPSHQWYTVLDLKDAFFCLRLHPTSQPLFAFEWRDPGMGISGQLTWTRLPQGFKNSPTLFNEALHRDLADFRIQHPDLILLQYVDDILLAATSELDCQQGTRALLQTLGDLGYRASAKKAQICQKQVKYLGYLLREGQRWLTEARKETVMGQPVPKTPRQLREFLGKAGFCRLFIPGFAEMAAPLYPLTKPGTLFSWGPDQQKAYQEIKQALLTAPALGLPDLTKPFELFVDEKQGYAKGVLTQKLGPWRRPVAYLSKKLDPVAAGWPPCLRMVAAIAVLTKDAGKLTMGQPLVILAPHAVEALVKQPPDRWLSNARMTHYQAMLLDTDRVQFGPVVALNPATLLPLPEEGAPHDCLEILAETHGTRPDLTDQPIPDADHTWYTDGSSFLQEGQRKAGAAVTTETEVIWAGALPAGTSAQRAELIALTQALKMAEGKRLNVYTDSRYAFATAHIHGEIYRRRGWLTSEGREIKNKSEILALLKALFLPKRLSIIHCLGHQKGDSAEARGNRLADQAAREAAIKTPPDTSTLLIAGKRTADGSEFEKRTADGSEFESPKKKAKVE

SEQ ID NO: 2141 - skipped

SEQ ID NO: 2142 - protein, 2094 aa, synthetic construct
MPAAKRVKLDGGDKKYSIGLDIGTNSVGWAVITDEYKVPSKKFKVLGNTDRHSIKKNLIGALLFDSGETAEATRLKRTARRRYTRRKNRICYLQEIFSNEMAKVDDSFFHRLEESFLVEEDKKHERHPIFGNIVDEVAYHEKYPTIYHLRKKLVDSTDKADLRLIYLALAHMIKFRGHFLIEGDLNPDNSDVDKLFIQLVQTYNQLFEENPINASGVDAKAILSARLSKSRRLENLIAQLPGEKKNGLFGNLIALSLGLTPNFKSNFDLAEDAKLQLSKDTYDDDLDNLLAQIGDQYADLFLAAKNLSDAILLSDILRVNTEITKAPLSASMIKRYDEHHQDLTLLKALVRQQLPEKYKEIFFDQSKNGYAGYIDGGASQEEFYKFIKPILEKMDGTEELLVKLNREDLLRKQRTFDNGSIPHQIHLGELHAILRRQEDFYPFLKDNREKIEKILTFRIPYYVGPLARGNSRFAWMTRKSEETITPWNFEEVVDKGASAQSFIERMTNFDKNLPNEKVLPKHSLLYEYFTVYNELTKVKYVTEGMRKPAFLSGEQKKAIVDLLFKTNRKVTVKQLKEDYFKKIECFDSVEISGVEDRFNASLGTYHDLLKIIKDKDFLDNEENEDILEDIVLTLTLFEDREMIEERLKTYAHLFDDKVMKQLKRRRYTGWGRLSRKLINGIRDKQSGKTILDFLKSDGFANRNFMQLIHDDSLTFKEDIQKAQVSGQGDSLHEHIANLAGSPAIKKGILQTVKVVDELVKVMGRHKPENIVIEMARENQTTQKGQKNSRERMKRIEEGIKELGSQILKEHPVENTQLQNEKLYLYYLQNGRDMYVDQELDINRLSDYDVDHIVPQSFLKDDSIDNKVLTRSDKARGKSDNVPSEEVVKKMKNYWRQLLNAKLITQRKFDNLTKAERGGLSELDKAGFIKRQLVETRQITKHVAQILDSRMNTKYDENDKLIREVKVITLKSKLVSDFRKDFQFYKVREINNYHHAHDAYLNAVVGTALIKKYPKLESEFVYGDYKVYDVRKMIAKSEQEIGKATAKYFFYSNIMNFFKTEITLANGEIRKRPLIETNGETGEIVWDKGRDFATVRKVLSMPQVNIVKKTEVQTGGFSKESILPKRNSDKLIARKKDWDPKKYGGFDSPTVAYSVLVVAKVEKGKSKKLKSVKELLGITIMERSSFEKNPIDFLEAKGYKEVKKDLIIKLPKYSLFELENGRKRMLASAGELQKGNELALPSKYVNFLYLASHYEKLKGSPEDNEQKQLFVEQHKHYLDEIIEQISEFSKRVILADANLDKVLSAYNKHRDKPIREQAENIIHLFTLTNLGAPAAFKYFDTTIDRKRYTSTKEVLDATLIHQSITGLYETRIDLSQLGGDGGGSSGSSGSSGGLGIEDEYRLHETSTEPDVSLGSTWLSDFPQAWAETGGMGLAVRQAPLIIPLKATSTPVSIQQYPMSHEARLGIKPHIQRLLDQGILVPCQSPWNTPLLPVKKPGTNDYRPVQDLREVNKRVEDIHPTVPNPYNLLSGLPPSHQWYTVLDLKDAFFCLRLHPTSQPLFAFEWRDPGMGISGQLTWTRLPQGFKNSPTLFNEALHRDLADFRIQHPDLILLQYVDDILLAATSELDCQQGTRALLQTLGDLGYRASAKKAQICQKQVKYLGYLLREGQRWLTEARKETVMGQPVPKTPRQLREFLGKAGFCRLFIPGFAEMAAPLYPLTKPGTLFSWGPDQQKAYQEIKQALLTAPALGLPDLTKPFELFVDEKQGYAKGVLTQKLGPWRRPVAYLSKKLDPVAAGWPPCLRMVAAIAVLTKDAGKLTMGQPLVILAPHAVEALVKQPPDRWLSNARMTHYQAMLLDTDRVQFGPVVALNPATLLPLPEEGAPHDCLEILAETHGTRPDLTDQPIPDADHTWYTDGSSFLQEGQRKAGAAVTTETEVIWAGALPAGTSAQRAELIALTQALKMAEGKRLNVYTDSRYAFATAHIHGEIYRRRGWLTSEGREIKNKSEILALLKALFLPKRLSIIHCLGHQKGDSAEARGNRLADQAAREAAIKTPPDTSTLLIAGKRTADGSEFEKRTADGSEFESPKKKAKVE

SEQ ID NO: 2143 - skipped

SEQ ID NO: 2144 - protein, 2090 aa, synthetic construct
MPAAKRVKLDGGDKKYSIGLDIGTNSVGWAVITDEYKVPSKKFKVLGNTDRHSIKKNLIGALLFDSGETAEATRLKRTARRRYTRRKNRICYLQEIFSNEMAKVDDSFFHRLEESFLVEEDKKHERHPIFGNIVDEVAYHEKYPTIYHLRKKLVDSTDKADLRLIYLALAHMIKFRGHFLIEGDLNPDNSDVDKLFIQLVQTYNQLFEENPINASGVDAKAILSARLSKSRRLENLIAQLPGEKKNGLFGNLIALSLGLTPNFKSNFDLAEDAKLQLSKDTYDDDLDNLLAQIGDQYADLFLAAKNLSDAILLSDILRVNTEITKAPLSASMIKRYDEHHQDLTLLKALVRQQLPEKYKEIFFDQSKNGYAGYIDGGASQEEFYKFIKPILEKMDGTEELLVKLNREDLLRKQRTFDNGSIPHQIHLGELHAILRRQEDFYPFLKDNREKIEKILTFRIPYYVGPLARGNSRFAWMTRKSEETITPWNFEEVVDKGASAQSFIERMTNFDKNLPNEKVLPKHSLLYEYFTVYNELTKVKYVTEGMRKPAFLSGEQKKAIVDLLFKTNRKVTVKQLKEDYFKKIECFDSVEISGVEDRFNASLGTYHDLLKIIKDKDFLDNEENEDILEDIVLTLTLFEDREMIEERLKTYAHLFDDKVMKQLKRRRYTGWGRLSRKLINGIRDKQSGKTILDFLKSDGFANRNFMQLIHDDSLTFKEDIQKAQVSGQGDSLHEHIANLAGSPAIKKGILQTVKVVDELVKVMGRHKPENIVIEMARENQTTQKGQKNSRERMKRIEEGIKELGSQILKEHPVENTQLQNEKLYLYYLQNGRDMYVDQELDINRLSDYDVDHIVPQSFLKDDSIDNKVLTRSDKARGKSDNVPSEEVVKKMKNYWRQLLNAKLITQRKFDNLTKAERGGLSELDKAGFIKRQLVETRQITKHVAQILDSRMNTKYDENDKLIREVKVITLKSKLVSDFRKDFQFYKVREINNYHHAHDAYLNAVVGTALIKKYPKLESEFVYGDYKVYDVRKMIAKSEQEIGKATAKYFFYSNIMNFFKTEITLANGEIRKRPLIETNGETGEIVWDKGRDFATVRKVLSMPQVNIVKKTEVQTGGFSKESILPKRNSDKLIARKKDWDPKKYGGFDSPTVAYSVLVVAKVEKGKSKKLKSVKELLGITIMERSSFEKNPIDFLEAKGYKEVKKDLIIKLPKYSLFELENGRKRMLASAGELQKGNELALPSKYVNFLYLASHYEKLKGSPEDNEQKQLFVEQHKHYLDEIIEQISEFSKRVILADANLDKVLSAYNKHRDKPIREQAENIIHLFTLTNLGAPAAFKYFDTTIDRKRYTSTKEVLDATLIHQSITGLYETRIDLSQLGGDGGPAPAPGGLGIEDEYRLHETSTEPDVSLGSTWLSDFPQAWAETGGMGLAVRQAPLIIPLKATSTPVSIQQYPMSHEARLGIKPHIQRLLDQGILVPCQSPWNTPLLPVKKPGTNDYRPVQDLREVNKRVEDIHPTVPNPYNLLSGLPPSHQWYTVLDLKDAFFCLRLHPTSQPLFAFEWRDPGMGISGQLTWTRLPQGFKNSPTLFNEALHRDLADFRIQHPDLILLQYVDDILLAATSELDCQQGTRALLQTLGDLGYRASAKKAQICQKQVKYLGYLLREGQRWLTEARKETVMGQPVPKTPRQLREFLGKAGFCRLFIPGFAEMAAPLYPLTKPGTLFSWGPDQQKAYQEIKQALLTAPALGLPDLTKPFELFVDEKQGYAKGVLTQKLGPWRRPVAYLSKKLDPVAAGWPPCLRMVAAIAVLTKDAGKLTMGQPLVILAPHAVEALVKQPPDRWLSNARMTHYQAMLLDTDRVQFGPVVALNPATLLPLPEEGAPHDCLEILAETHGTRPDLTDQPIPDADHTWYTDGSSFLQEGQRKAGAAVTTETEVIWAGALPAGTSAQRAELIALTQALKMAEGKRLNVYTDSRYAFATAHIHGEIYRRRGWLTSEGREIKNKSEILALLKALFLPKRLSIIHCLGHQKGDSAEARGNRLADQAAREAAIKTPPDTSTLLIAGKRTADGSEFEKRTADGSEFESPKKKAKVE

SEQ ID NO: 2145 - protein, 2096 aa, synthetic construct
MPAAKRVKLDGGDKKYSIGLDIGTNSVGWAVITDEYKVPSKKFKVLGNTDRHSIKKNLIGALLFDSGETAEATRLKRTARRRYTRRKNRICYLQEIFSNEMAKVDDSFFHRLEESFLVEEDKKHERHPIFGNIVDEVAYHEKYPTIYHLRKKLVDSTDKADLRLIYLALAHMIKFRGHFLIEGDLNPDNSDVDKLFIQLVQTYNQLFEENPINASGVDAKAILSARLSKSRRLENLIAQLPGEKKNGLFGNLIALSLGLTPNFKSNFDLAEDAKLQLSKDTYDDDLDNLLAQIGDQYADLFLAAKNLSDAILLSDILRVNTEITKAPLSASMIKRYDEHHQDLTLLKALVRQQLPEKYKEIFFDQSKNGYAGYIDGGASQEEFYKFIKPILEKMDGTEELLVKLNREDLLRKQRTFDNGSIPHQIHLGELHAILRRQEDFYPFLKDNREKIEKILTFRIPYYVGPLARGNSRFAWMTRKSEETITPWNFEEVVDKGASAQSFIERMTNFDKNLPNEKVLPKHSLLYEYFTVYNELTKVKYVTEGMRKPAFLSGEQKKAIVDLLFKTNRKVTVKQLKEDYFKKIECFDSVEISGVEDRFNASLGTYHDLLKIIKDKDFLDNEENEDILEDIVLTLTLFEDREMIEERLKTYAHLFDDKVMKQLKRRRYTGWGRLSRKLINGIRDKQSGKTILDFLKSDGFANRNFMQLIHDDSLTFKEDIQKAQVSGQGDSLHEHIANLAGSPAIKKGILQTVKVVDELVKVMGRHKPENIVIEMARENQTTQKGQKNSRERMKRIEEGIKELGSQILKEHPVENTQLQNEKLYLYYLQNGRDMYVDQELDINRLSDYDVDHIVPQSFLKDDSIDNKVLTRSDKARGKSDNVPSEEVVKKMKNYWRQLLNAKLITQRKFDNLTKAERGGLSELDKAGFIKRQLVETRQITKHVAQILDSRMNTKYDENDKLIREVKVITLKSKLVSDFRKDFQFYKVREINNYHHAHDAYLNAVVGTALIKKYPKLESEFVYGDYKVYDVRKMIAKSEQEIGKATAKYFFYSNIMNFFKTEITLANGEIRKRPLIETNGETGEIVWDKGRDFATVRKVLSMPQVNIVKKTEVQTGGFSKESILPKRNSDKLIARKKDWDPKKYGGFDSPTVAYSVLVVAKVEKGKSKKLKSVKELLGITIMERSSFEKNPIDFLEAKGYKEVKKDLIIKLPKYSLFELENGRKRMLASAGELQKGNELALPSKYVNFLYLASHYEKLKGSPEDNEQKQLFVEQHKHYLDEIIEQISEFSKRVILADANLDKVLSAYNKHRDKPIREQAENIIHLFTLTNLGAPAAFKYFDTTIDRKRYTSTKEVLDATLIHQSITGLYETRIDLSQLGGDGGGGGGSSEAAAKGGLGIEDEYRLHETSTEPDVSLGSTWLSDFPQAWAETGGMGLAVRQAPLIIPLKATSTPVSIQQYPMSHEARLGIKPHIQRLLDQGILVPCQSPWNTPLLPVKKPGTNDYRPVQDLREVNKRVEDIHPTVPNPYNLLSGLPPSHQWYTVLDLKDAFFCLRLHPTSQPLFAFEWRDPGMGISGQLTWTRLPQGFKNSPTLFNEALHRDLADFRIQHPDLILLQYVDDILLAATSELDCQQGTRALLQTLGDLGYRASAKKAQICQKQVKYLGYLLREGQRWLTEARKETVMGQPVPKTPRQLREFLGKAGFCRLFIPGFAEMAAPLYPLTKPGTLFSWGPDQQKAYQEIKQALLTAPALGLPDLTKPFELFVDEKQGYAKGVLTQKLGPWRRPVAYLSKKLDPVAAGWPPCLRMVAAIAVLTKDAGKLTMGQPLVILAPHAVEALVKQPPDRWLSNARMTHYQAMLLDTDRVQFGPVVALNPATLLPLPEEGAPHDCLEILAETHGTRPDLTDQPIPDADHTWYTDGSSFLQEGQRKAGAAVTTETEVIWAGALPAGTSAQRAELIALTQALKMAEGKRLNVYTDSRYAFATAHIHGEIYRRRGWLTSEGREIKNKSEILALLKALFLPKRLSIIHCLGHQKGDSAEARGNRLADQAAREAAIKTPPDTSTLLIAGKRTADGSEFEKRTADGSEFESPKKKAKVE

SEQ ID NO: 2146 - protein, 2096 aa, synthetic construct
MPAAKRVKLDGGDKKYSIGLDIGTNSVGWAVITDEYKVPSKKFKVLGNTDRHSIKKNLIGALLFDSGETAEATRLKRTARRRYTRRKNRICYLQEIFSNEMAKVDDSFFHRLEESFLVEEDKKHERHPIFGNIVDEVAYHEKYPTIYHLRKKLVDSTDKADLRLIYLALAHMIKFRGHFLIEGDLNPDNSDVDKLFIQLVQTYNQLFEENPINASGVDAKAILSARLSKSRRLENLIAQLPGEKKNGLFGNLIALSLGLTPNFKSNFDLAEDAKLQLSKDTYDDDLDNLLAQIGDQYADLFLAAKNLSDAILLSDILRVNTEITKAPLSASMIKRYDEHHQDLTLLKALVRQQLPEKYKEIFFDQSKNGYAGYIDGGASQEEFYKFIKPILEKMDGTEELLVKLNREDLLRKQRTFDNGSIPHQIHLGELHAILRRQEDFYPFLKDNREKIEKILTFRIPYYVGPLARGNSRFAWMTRKSEETITPWNFEEVVDKGASAQSFIERMTNFDKNLPNEKVLPKHSLLYEYFTVYNELTKVKYVTEGMRKPAFLSGEQKKAIVDLLFKTNRKVTVKQLKEDYFKKIECFDSVEISGVEDRFNASLGTYHDLLKIIKDKDFLDNEENEDILEDIVLTLTLFEDREMIEERLKTYAHLFDDKVMKQLKRRRYTGWGRLSRKLINGIRDKQSGKTILDFLKSDGFANRNFMQLIHDDSLTFKEDIQKAQVSGQGDSLHEHIANLAGSPAIKKGILQTVKVVDELVKVMGRHKPENIVIEMARENQTTQKGQKNSRERMKRIEEGIKELGSQILKEHPVENTQLQNEKLYLYYLQNGRDMYVDQELDINRLSDYDVDHIVPQSFLKDDSIDNKVLTRSDKARGKSDNVPSEEVVKKMKNYWRQLLNAKLITQRKFDNLTKAERGGLSELDKAGFIKRQLVETRQITKHVAQILDSRMNTKYDENDKLIREVKVITLKSKLVSDFRKDFQFYKVREINNYHHAHDAYLNAVVGTALIKKYPKLESEFVYGDYKVYDVRKMIAKSEQEIGKATAKYFFYSNIMNFFKTEITLANGEIRKRPLIETNGETGEIVWDKGRDFATVRKVLSMPQVNIVKKTEVQTGGFSKESILPKRNSDKLIARKKDWDPKKYGGFDSPTVAYSVLVVAKVEKGKSKKLKSVKELLGITIMERSSFEKNPIDFLEAKGYKEVKKDLIIKLPKYSLFELENGRKRMLASAGELQKGNELALPSKYVNFLYLASHYEKLKGSPEDNEQKQLFVEQHKHYLDEIIEQISEFSKRVILADANLDKVLSAYNKHRDKPIREQAENIIHLFTLTNLGAPAAFKYFDTTIDRKRYTSTKEVLDATLIHQSITGLYETRIDLSQLGGDGGGGSEAAAKPAPGGLGIEDEYRLHETSTEPDVSLGSTWLSDFPQAWAETGGMGLAVRQAPLIIPLKATSTPVSIQQYPMSHEARLGIKPHIQRLLDQGILVPCQSPWNTPLLPVKKPGTNDYRPVQDLREVNKRVEDIHPTVPNPYNLLSGLPPSHQWYTVLDLKDAFFCLRLHPTSQPLFAFEWRDPGMGISGQLTWTRLPQGFKNSPTLFNEALHRDLADFRIQHPDLILLQYVDDILLAATSELDCQQGTRALLQTLGDLGYRASAKKAQICQKQVKYLGYLLREGQRWLTEARKETVMGQPVPKTPRQLREFLGKAGFCRLFIPGFAEMAAPLYPLTKPGTLFSWGPDQQKAYQEIKQALLTAPALGLPDLTKPFELFVDEKQGYAKGVLTQKLGPWRRPVAYLSKKLDPVAAGWPPCLRMVAAIAVLTKDAGKLTMGQPLVILAPHAVEALVKQPPDRWLSNARMTHYQAMLLDTDRVQFGPVVALNPATLLPLPEEGAPHDCLEILAETHGTRPDLTDQPIPDADHTWYTDGSSFLQEGQRKAGAAVTTETEVIWAGALPAGTSAQRAELIALTQALKMAEGKRLNVYTDSRYAFATAHIHGEIYRRRGWLTSEGREIKNKSEILALLKALFLPKRLSIIHCLGHQKGDSAEARGNRLADQAAREAAIKTPPDTSTLLIAGKRTADGSEFEKRTADGSEFESPKKKAKVE

SEQ ID NO: 2147 - skipped

SEQ ID NO: 2148 - protein, 2091 aa, synthetic construct
MPAAKRVKLDGGDKKYSIGLDIGTNSVGWAVITDEYKVPSKKFKVLGNTDRHSIKKNLIGALLFDSGETAEATRLKRTARRRYTRRKNRICYLQEIFSNEMAKVDDSFFHRLEESFLVEEDKKHERHPIFGNIVDEVAYHEKYPTIYHLRKKLVDSTDKADLRLIYLALAHMIKFRGHFLIEGDLNPDNSDVDKLFIQLVQTYNQLFEENPINASGVDAKAILSARLSKSRRLENLIAQLPGEKKNGLFGNLIALSLGLTPNFKSNFDLAEDAKLQLSKDTYDDDLDNLLAQIGDQYADLFLAAKNLSDAILLSDILRVNTEITKAPLSASMIKRYDEHHQDLTLLKALVRQQLPEKYKEIFFDQSKNGYAGYIDGGASQEEFYKFIKPILEKMDGTEELLVKLNREDLLRKQRTFDNGSIPHQIHLGELHAILRRQEDFYPFLKDNREKIEKILTFRIPYYVGPLARGNSRFAWMTRKSEETITPWNFEEVVDKGASAQSFIERMTNFDKNLPNEKVLPKHSLLYEYFTVYNELTKVKYVTEGMRKPAFLSGEQKKAIVDLLFKTNRKVTVKQLKEDYFKKIECFDSVEISGVEDRFNASLGTYHDLLKIIKDKDFLDNEENEDILEDIVLTLTLFEDREMIEERLKTYAHLFDDKVMKQLKRRRYTGWGRLSRKLINGIRDKQSGKTILDFLKSDGFANRNFMQLIHDDSLTFKEDIQKAQVSGQGDSLHEHIANLAGSPAIKKGILQTVKVVDELVKVMGRHKPENIVIEMARENQTTQKGQKNSRERMKRIEEGIKELGSQILKEHPVENTQLQNEKLYLYYLQNGRDMYVDQELDINRLSDYDVDHIVPQSFLKDDSIDNKVLTRSDKARGKSDNVPSEEVVKKMKNYWRQLLNAKLITQRKFDNLTKAERGGLSELDKAGFIKRQLVETRQITKHVAQILDSRMNTKYDENDKLIREVKVITLKSKLVSDFRKDFQFYKVREINNYHHAHDAYLNAVVGTALIKKYPKLESEFVYGDYKVYDVRKMIAKSEQEIGKATAKYFFYSNIMNFFKTEITLANGEIRKRPLIETNGETGEIVWDKGRDFATVRKVLSMPQVNIVKKTEVQTGGFSKESILPKRNSDKLIARKKDWDPKKYGGFDSPTVAYSVLVVAKVEKGKSKKLKSVKELLGITIMERSSFEKNPIDFLEAKGYKEVKKDLIIKLPKYSLFELENGRKRMLASAGELQKGNELALPSKYVNFLYLASHYEKLKGSPEDNEQKQLFVEQHKHYLDEIIEQISEFSKRVILADANLDKVLSAYNKHRDKPIREQAENIIHLFTLTNLGAPAAFKYFDTTIDRKRYTSTKEVLDATLIHQSITGLYETRIDLSQLGGDGGGGSGGGGGLGIEDEYRLHETSTEPDVSLGSTWLSDFPQAWAETGGMGLAVRQAPLIIPLKATSTPVSIQQYPMSHEARLGIKPHIQRLLDQGILVPCQSPWNTPLLPVKKPGTNDYRPVQDLREVNKRVEDIHPTVPNPYNLLSGLPPSHQWYTVLDLKDAFFCLRLHPTSQPLFAFEWRDPGMGISGQLTWTRLPQGFKNSPTLFNEALHRDLADFRIQHPDLILLQYVDDILLAATSELDCQQGTRALLQTLGDLGYRASAKKAQICQKQVKYLGYLLREGQRWLTEARKETVMGQPVPKTPRQLREFLGKAGFCRLFIPGFAEMAAPLYPLTKPGTLFSWGPDQQKAYQEIKQALLTAPALGLPDLTKPFELFVDEKQGYAKGVLTQKLGPWRRPVAYLSKKLDPVAAGWPPCLRMVAAIAVLTKDAGKLTMGQPLVILAPHAVEALVKQPPDRWLSNARMTHYQAMLLDTDRVQFGPVVALNPATLLPLPEEGAPHDCLEILAETHGTRPDLTDQPIPDADHTWYTDGSSFLQEGQRKAGAAVTTETEVIWAGALPAGTSAQRAELIALTQALKMAEGKRLNVYTDSRYAFATAHIHGEIYRRRGWLTSEGREIKNKSEILALLKALFLPKRLSIIHCLGHQKGDSAEARGNRLADQAAREAAIKTPPDTSTLLIAGKRTADGSEFEKRTADGSEFESPKKKAKVE

SEQ ID NO: 2149 - protein, 2096 aa, synthetic construct
MPAAKRVKLDGGDKKYSIGLDIGTNSVGWAVITDEYKVPSKKFKVLGNTDRHSIKKNLIGALLFDSGETAEATRLKRTARRRYTRRKNRICYLQEIFSNEMAKVDDSFFHRLEESFLVEEDKKHERHPIFGNIVDEVAYHEKYPTIYHLRKKLVDSTDKADLRLIYLALAHMIKFRGHFLIEGDLNPDNSDVDKLFIQLVQTYNQLFEENPINASGVDAKAILSARLSKSRRLENLIAQLPGEKKNGLFGNLIALSLGLTPNFKSNFDLAEDAKLQLSKDTYDDDLDNLLAQIGDQYADLFLAAKNLSDAILLSDILRVNTEITKAPLSASMIKRYDEHHQDLTLLKALVRQQLPEKYKEIFFDQSKNGYAGYIDGGASQEEFYKFIKPILEKMDGTEELLVKLNREDLLRKQRTFDNGSIPHQIHLGELHAILRRQEDFYPFLKDNREKIEKILTFRIPYYVGPLARGNSRFAWMTRKSEETITPWNFEEVVDKGASAQSFIERMTNFDKNLPNEKVLPKHSLLYEYFTVYNELTKVKYVTEGMRKPAFLSGEQKKAIVDLLFKTNRKVTVKQLKEDYFKKIECFDSVEISGVEDRFNASLGTYHDLLKIIKDKDFLDNEENEDILEDIVLTLTLFEDREMIEERLKTYAHLFDDKVMKQLKRRRYTGWGRLSRKLINGIRDKQSGKTILDFLKSDGFANRNFMQLIHDDSLTFKEDIQKAQVSGQGDSLHEHIANLAGSPAIKKGILQTVKVVDELVKVMGRHKPENIVIEMARENQTTQKGQKNSRERMKRIEEGIKELGSQILKEHPVENTQLQNEKLYLYYLQNGRDMYVDQELDINRLSDYDVDHIVPQSFLKDDSIDNKVLTRSDKARGKSDNVPSEEVVKKMKNYWRQLLNAKLITQRKFDNLTKAERGGLSELDKAGFIKRQLVETRQITKHVAQILDSRMNTKYDENDKLIREVKVITLKSKLVSDFRKDFQFYKVREINNYHHAHDAYLNAVVGTALIKKYPKLESEFVYGDYKVYDVRKMIAKSEQEIGKATAKYFFYSNIMNFFKTEITLANGEIRKRPLIETNGETGEIVWDKGRDFATVRKVLSMPQVNIVKKTEVQTGGFSKESILPKRNSDKLIARKKDWDPKKYGGFDSPTVAYSVLVVAKVEKGKSKKLKSVKELLGITIMERSSFEKNPIDFLEAKGYKEVKKDLIIKLPKYSLFELENGRKRMLASAGELQKGNELALPSKYVNFLYLASHYEKLKGSPEDNEQKQLFVEQHKHYLDEIIEQISEFSKRVILADANLDKVLSAYNKHRDKPIREQAENIIHLFTLTNLGAPAAFKYFDTTIDRKRYTSTKEVLDATLIHQSITGLYETRIDLSQLGGDGGGSSPAPEAAAKGGLGIEDEYRLHETSTEPDVSLGSTWLSDFPQAWAETGGMGLAVRQAPLIIPLKATSTPVSIQQYPMSHEARLGIKPHIQRLLDQGILVPCQSPWNTPLLPVKKPGTNDYRPVQDLREVNKRVEDIHPTVPNPYNLLSGLPPSHQWYTVLDLKDAFFCLRLHPTSQPLFAFEWRDPGMGISGQLTWTRLPQGFKNSPTLFNEALHRDLADFRIQHPDLILLQYVDDILLAATSELDCQQGTRALLQTLGDLGYRASAKKAQICQKQVKYLGYLLREGQRWLTEARKETVMGQPVPKTPRQLREFLGKAGFCRLFIPGFAEMAAPLYPLTKPGTLFSWGPDQQKAYQEIKQALLTAPALGLPDLTKPFELFVDEKQGYAKGVLTQKLGPWRRPVAYLSKKLDPVAAGWPPCLRMVAAIAVLTKDAGKLTMGQPLVILAPHAVEALVKQPPDRWLSNARMTHYQAMLLDTDRVQFGPVVALNPATLLPLPEEGAPHDCLEILAETHGTRPDLTDQPIPDADHTWYTDGSSFLQEGQRKAGAAVTTETEVIWAGALPAGTSAQRAELIALTQALKMAEGKRLNVYTDSRYAFATAHIHGEIYRRRGWLTSEGREIKNKSEILALLKALFLPKRLSIIHCLGHQKGDSAEARGNRLADQAAREAAIKTPPDTSTLLIAGKRTADGSEFEKRTADGSEFESPKKKAKVE

SEQ ID NO: 2150 - skipped

SEQ ID NO: 2151 - protein, 2094 aa, synthetic construct
MPAAKRVKLDGGDKKYSIGLDIGTNSVGWAVITDEYKVPSKKFKVLGNTDRHSIKKNLIGALLFDSGETAEATRLKRTARRRYTRRKNRICYLQEIFSNEMAKVDDSFFHRLEESFLVEEDKKHERHPIFGNIVDEVAYHEKYPTIYHLRKKLVDSTDKADLRLIYLALAHMIKFRGHFLIEGDLNPDNSDVDKLFIQLVQTYNQLFEENPINASGVDAKAILSARLSKSRRLENLIAQLPGEKKNGLFGNLIALSLGLTPNFKSNFDLAEDAKLQLSKDTYDDDLDNLLAQIGDQYADLFLAAKNLSDAILLSDILRVNTEITKAPLSASMIKRYDEHHQDLTLLKALVRQQLPEKYKEIFFDQSKNGYAGYIDGGASQEEFYKFIKPILEKMDGTEELLVKLNREDLLRKQRTFDNGSIPHQIHLGELHAILRRQEDFYPFLKDNREKIEKILTFRIPYYVGPLARGNSRFAWMTRKSEETITPWNFEEVVDKGASAQSFIERMTNFDKNLPNEKVLPKHSLLYEYFTVYNELTKVKYVTEGMRKPAFLSGEQKKAIVDLLFKTNRKVTVKQLKEDYFKKIECFDSVEISGVEDRFNASLGTYHDLLKIIKDKDFLDNEENEDILEDIVLTLTLFEDREMIEERLKTYAHLFDDKVMKQLKRRRYTGWGRLSRKLINGIRDKQSGKTILDFLKSDGFANRNFMQLIHDDSLTFKEDIQKAQVSGQGDSLHEHIANLAGSPAIKKGILQTVKVVDELVKVMGRHKPENIVIEMARENQTTQKGQKNSRERMKRIEEGIKELGSQILKEHPVENTQLQNEKLYLYYLQNGRDMYVDQELDINRLSDYDVDHIVPQSFLKDDSIDNKVLTRSDKARGKSDNVPSEEVVKKMKNYWRQLLNAKLITQRKFDNLTKAERGGLSELDKAGFIKRQLVETRQITKHVAQILDSRMNTKYDENDKLIREVKVITLKSKLVSDFRKDFQFYKVREINNYHHAHDAYLNAVVGTALIKKYPKLESEFVYGDYKVYDVRKMIAKSEQEIGKATAKYFFYSNIMNFFKTEITLANGEIRKRPLIETNGETGEIVWDKGRDFATVRKVLSMPQVNIVKKTEVQTGGFSKESILPKRNSDKLIARKKDWDPKKYGGFDSPTVAYSVLVVAKVEKGKSKKLKSVKELLGITIMERSSFEKNPIDFLEAKGYKEVKKDLIIKLPKYSLFELENGRKRMLASAGELQKGNELALPSKYVNFLYLASHYEKLKGSPEDNEQKQLFVEQHKHYLDEIIEQISEFSKRVILADANLDKVLSAYNKHRDKPIREQAENIIHLFTLTNLGAPAAFKYFDTTIDRKRYTSTKEVLDATLIHQSITGLYETRIDLSQLGGDGGPAPGGGGGSGGLGIEDEYRLHETSTEPDVSLGSTWLSDFPQAWAETGGMGLAVRQAPLIIPLKATSTPVSIQQYPMSHEARLGIKPHIQRLLDQGILVPCQSPWNTPLLPVKKPGTNDYRPVQDLREVNKRVEDIHPTVPNPYNLLSGLPPSHQWYTVLDLKDAFFCLRLHPTSQPLFAFEWRDPGMGISGQLTWTRLPQGFKNSPTLFNEALHRDLADFRIQHPDLILLQYVDDILLAATSELDCQQGTRALLQTLGDLGYRASAKKAQICQKQVKYLGYLLREGQRWLTEARKETVMGQPVPKTPRQLREFLGKAGFCRLFIPGFAEMAAPLYPLTKPGTLFSWGPDQQKAYQEIKQALLTAPALGLPDLTKPFELFVDEKQGYAKGVLTQKLGPWRRPVAYLSKKLDPVAAGWPPCLRMVAAIAVLTKDAGKLTMGQPLVILAPHAVEALVKQPPDRWLSNARMTHYQAMLLDTDRVQFGPVVALNPATLLPLPEEGAPHDCLEILAETHGTRPDLTDQPIPDADHTWYTDGSSFLQEGQRKAGAAVTTETEVIWAGALPAGTSAQRAELIALTQALKMAEGKRLNVYTDSRYAFATAHIHGEIYRRRGWLTSEGREIKNKSEILALLKALFLPKRLSIIHCLGHQKGDSAEARGNRLADQAAREAAIKTPPDTSTLLIAGKRTADGSEFEKRTADGSEFESPKKKAKVE

SEQ ID NO: 2152-2153 - skipped (2 entries)

SEQ ID NO: 2154 - protein, 2094 aa, synthetic construct
MPAAKRVKLDGGDKKYSIGLDIGTNSVGWAVITDEYKVPSKKFKVLGNTDRHSIKKNLIGALLFDSGETAEATRLKRTARRRYTRRKNRICYLQEIFSNEMAKVDDSFFHRLEESFLVEEDKKHERHPIFGNIVDEVAYHEKYPTIYHLRKKLVDSTDKADLRLIYLALAHMIKFRGHFLIEGDLNPDNSDVDKLFIQLVQTYNQLFEENPINASGVDAKAILSARLSKSRRLENLIAQLPGEKKNGLFGNLIALSLGLTPNFKSNFDLAEDAKLQLSKDTYDDDLDNLLAQIGDQYADLFLAAKNLSDAILLSDILRVNTEITKAPLSASMIKRYDEHHQDLTLLKALVRQQLPEKYKEIFFDQSKNGYAGYIDGGASQEEFYKFIKPILEKMDGTEELLVKLNREDLLRKQRTFDNGSIPHQIHLGELHAILRRQEDFYPFLKDNREKIEKILTFRIPYYVGPLARGNSRFAWMTRKSEETITPWNFEEVVDKGASAQSFIERMTNFDKNLPNEKVLPKHSLLYEYFTVYNELTKVKYVTEGMRKPAFLSGEQKKAIVDLLFKTNRKVTVKQLKEDYFKKIECFDSVEISGVEDRFNASLGTYHDLLKIIKDKDFLDNEENEDILEDIVLTLTLFEDREMIEERLKTYAHLFDDKVMKQLKRRRYTGWGRLSRKLINGIRDKQSGKTILDFLKSDGFANRNFMQLIHDDSLTFKEDIQKAQVSGQGDSLHEHIANLAGSPAIKKGILQTVKVVDELVKVMGRHKPENIVIEMARENQTTQKGQKNSRERMKRIEEGIKELGSQILKEHPVENTQLQNEKLYLYYLQNGRDMYVDQELDINRLSDYDVDHIVPQSFLKDDSIDNKVLTRSDKARGKSDNVPSEEVVKKMKNYWRQLLNAKLITQRKFDNLTKAERGGLSELDKAGFIKRQLVETRQITKHVAQILDSRMNTKYDENDKLIREVKVITLKSKLVSDFRKDFQFYKVREINNYHHAHDAYLNAVVGTALIKKYPKLESEFVYGDYKVYDVRKMIAKSEQEIGKATAKYFFYSNIMNFFKTEITLANGEIRKRPLIETNGETGEIVWDKGRDFATVRKVLSMPQVNIVKKTEVQTGGFSKESILPKRNSDKLIARKKDWDPKKYGGFDSPTVAYSVLVVAKVEKGKSKKLKSVKELLGITIMERSSFEKNPIDFLEAKGYKEVKKDLIIKLPKYSLFELENGRKRMLASAGELQKGNELALPSKYVNFLYLASHYEKLKGSPEDNEQKQLFVEQHKHYLDEIIEQISEFSKRVILADANLDKVLSAYNKHRDKPIREQAENIIHLFTLTNLGAPAAFKYFDTTIDRKRYTSTKEVLDATLIHQSITGLYETRIDLSQLGGDGGGGGPAPGGSGGLGIEDEYRLHETSTEPDVSLGSTWLSDFPQAWAETGGMGLAVRQAPLIIPLKATSTPVSIQQYPMSHEARLGIKPHIQRLLDQGILVPCQSPWNTPLLPVKKPGTNDYRPVQDLREVNKRVEDIHPTVPNPYNLLSGLPPSHQWYTVLDLKDAFFCLRLHPTSQPLFAFEWRDPGMGISGQLTWTRLPQGFKNSPTLFNEALHRDLADFRIQHPDLILLQYVDDILLAATSELDCQQGTRALLQTLGDLGYRASAKKAQICQKQVKYLGYLLREGQRWLTEARKETVMGQPVPKTPRQLREFLGKAGFCRLFIPGFAEMAAPLYPLTKPGTLFSWGPDQQKAYQEIKQALLTAPALGLPDLTKPFELFVDEKQGYAKGVLTQKLGPWRRPVAYLSKKLDPVAAGWPPCLRMVAAIAVLTKDAGKLTMGQPLVILAPHAVEALVKQPPDRWLSNARMTHYQAMLLDTDRVQFGPVVALNPATLLPLPEEGAPHDCLEILAETHGTRPDLTDQPIPDADHTWYTDGSSFLQEGQRKAGAAVTTETEVIWAGALPAGTSAQRAELIALTQALKMAEGKRLNVYTDSRYAFATAHIHGEIYRRRGWLTSEGREIKNKSEILALLKALFLPKRLSIIHCLGHQKGDSAEARGNRLADQAAREAAIKTPPDTSTLLIAGKRTADGSEFEKRTADGSEFESPKKKAKVE

SEQ ID NO: 2155-2157 - skipped (3 entries)

SEQ ID NO: 2158 - protein, 2091 aa, synthetic construct
MPAAKRVKLDGGDKKYSIGLDIGTNSVGWAVITDEYKVPSKKFKVLGNTDRHSIKKNLIGALLFDSGETAEATRLKRTARRRYTRRKNRICYLQEIFSNEMAKVDDSFFHRLEESFLVEEDKKHERHPIFGNIVDEVAYHEKYPTIYHLRKKLVDSTDKADLRLIYLALAHMIKFRGHFLIEGDLNPDNSDVDKLFIQLVQTYNQLFEENPINASGVDAKAILSARLSKSRRLENLIAQLPGEKKNGLFGNLIALSLGLTPNFKSNFDLAEDAKLQLSKDTYDDDLDNLLAQIGDQYADLFLAAKNLSDAILLSDILRVNTEITKAPLSASMIKRYDEHHQDLTLLKALVRQQLPEKYKEIFFDQSKNGYAGYIDGGASQEEFYKFIKPILEKMDGTEELLVKLNREDLLRKQRTFDNGSIPHQIHLGELHAILRRQEDFYPFLKDNREKIEKILTFRIPYYVGPLARGNSRFAWMTRKSEETITPWNFEEVVDKGASAQSFIERMTNFDKNLPNEKVLPKHSLLYEYFTVYNELTKVKYVTEGMRKPAFLSGEQKKAIVDLLFKTNRKVTVKQLKEDYFKKIECFDSVEISGVEDRFNASLGTYHDLLKIIKDKDFLDNEENEDILEDIVLTLTLFEDREMIEERLKTYAHLFDDKVMKQLKRRRYTGWGRLSRKLINGIRDKQSGKTILDFLKSDGFANRNFMQLIHDDSLTFKEDIQKAQVSGQGDSLHEHIANLAGSPAIKKGILQTVKVVDELVKVMGRHKPENIVIEMARENQTTQKGQKNSRERMKRIEEGIKELGSQILKEHPVENTQLQNEKLYLYYLQNGRDMYVDQELDINRLSDYDVDHIVPQSFLKDDSIDNKVLTRSDKARGKSDNVPSEEVVKKMKNYWRQLLNAKLITQRKFDNLTKAERGGLSELDKAGFIKRQLVETRQITKHVAQILDSRMNTKYDENDKLIREVKVITLKSKLVSDFRKDFQFYKVREINNYHHAHDAYLNAVVGTALIKKYPKLESEFVYGDYKVYDVRKMIAKSEQEIGKATAKYFFYSNIMNFFKTEITLANGEIRKRPLIETNGETGEIVWDKGRDFATVRKVLSMPQVNIVKKTEVQTGGFSKESILPKRNSDKLIARKKDWDPKKYGGFDSPTVAYSVLVVAKVEKGKSKKLKSVKELLGITIMERSSFEKNPIDFLEAKGYKEVKKDLIIKLPKYSLFELENGRKRMLASAGELQKGNELALPSKYVNFLYLASHYEKLKGSPEDNEQKQLFVEQHKHYLDEIIEQISEFSKRVILADANLDKVLSAYNKHRDKPIREQAENIIHLFTLTNLGAPAAFKYFDTTIDRKRYTSTKEVLDATLIHQSITGLYETRIDLSQLGGDGGGGSGSSGGLGIEDEYRLHETSTEPDVSLGSTWLSDFPQAWAETGGMGLAVRQAPLIIPLKATSTPVSIQQYPMSHEARLGIKPHIQRLLDQGILVPCQSPWNTPLLPVKKPGTNDYRPVQDLREVNKRVEDIHPTVPNPYNLLSGLPPSHQWYTVLDLKDAFFCLRLHPTSQPLFAFEWRDPGMGISGQLTWTRLPQGFKNSPTLFNEALHRDLADFRIQHPDLILLQYVDDILLAATSELDCQQGTRALLQTLGDLGYRASAKKAQICQKQVKYLGYLLREGQRWLTEARKETVMGQPVPKTPRQLREFLGKAGFCRLFIPGFAEMAAPLYPLTKPGTLFSWGPDQQKAYQEIKQALLTAPALGLPDLTKPFELFVDEKQGYAKGVLTQKLGPWRRPVAYLSKKLDPVAAGWPPCLRMVAAIAVLTKDAGKLTMGQPLVILAPHAVEALVKQPPDRWLSNARMTHYQAMLLDTDRVQFGPVVALNPATLLPLPEEGAPHDCLEILAETHGTRPDLTDQPIPDADHTWYTDGSSFLQEGQRKAGAAVTTETEVIWAGALPAGTSAQRAELIALTQALKMAEGKRLNVYTDSRYAFATAHIHGEIYRRRGWLTSEGREIKNKSEILALLKALFLPKRLSIIHCLGHQKGDSAEARGNRLADQAAREAAIKTPPDTSTLLIAGKRTADGSEFEKRTADGSEFESPKKKAKVE

SEQ ID NO: 2159 - protein, 2096 aa, synthetic construct; identical to SEQ ID NO: 2055

SEQ ID NO: 2160 - skipped

SEQ ID NO: 2161 - protein, 2096 aa, synthetic construct
MPAAKRVKLDGGDKKYSIGLDIGTNSVGWAVITDEYKVPSKKFKVLGNTDRHSIKKNLIGALLFDSGETAEATRLKRTARRRYTRRKNRICYLQEIFSNEMAKVDDSFFHRLEESFLVEEDKKHERHPIFGNIVDEVAYHEKYPTIYHLRKKLVDSTDKADLRLIYLALAHMIKFRGHFLIEGDLNPDNSDVDKLFIQLVQTYNQLFEENPINASGVDAKAILSARLSKSRRLENLIAQLPGEKKNGLFGNLIALSLGLTPNFKSNFDLAEDAKLQLSKDTYDDDLDNLLAQIGDQYADLFLAAKNLSDAILLSDILRVNTEITKAPLSASMIKRYDEHHQDLTLLKALVRQQLPEKYKEIFFDQSKNGYAGYIDGGASQEEFYKFIKPILEKMDGTEELLVKLNREDLLRKQRTFDNGSIPHQIHLGELHAILRRQEDFYPFLKDNREKIEKILTFRIPYYVGPLARGNSRFAWMTRKSEETITPWNFEEVVDKGASAQSFIERMTNFDKNLPNEKVLPKHSLLYEYFTVYNELTKVKYVTEGMRKPAFLSGEQKKAIVDLLFKTNRKVTVKQLKEDYFKKIECFDSVEISGVEDRFNASLGTYHDLLKIIKDKDFLDNEENEDILEDIVLTLTLFEDREMIEERLKTYAHLFDDKVMKQLKRRRYTGWGRLSRKLINGIRDKQSGKTILDFLKSDGFANRNFMQLIHDDSLTFKEDIQKAQVSGQGDSLHEHIANLAGSPAIKKGILQTVKVVDELVKVMGRHKPENIVIEMARENQTTQKGQKNSRERMKRIEEGIKELGSQILKEHPVENTQLQNEKLYLYYLQNGRDMYVDQELDINRLSDYDVDHIVPQSFLKDDSIDNKVLTRSDKARGKSDNVPSEEVVKKMKNYWRQLLNAKLITQRKFDNLTKAERGGLSELDKAGFIKRQLVETRQITKHVAQILDSRMNTKYDENDKLIREVKVITLKSKLVSDFRKDFQFYKVREINNYHHAHDAYLNAVVGTALIKKYPKLESEFVYGDYKVYDVRKMIAKSEQEIGKATAKYFFYSNIMNFFKTEITLANGEIRKRPLIETNGETGEIVWDKGRDFATVRKVLSMPQVNIVKKTEVQTGGFSKESILPKRNSDKLIARKKDWDPKKYGGFDSPTVAYSVLVVAKVEKGKSKKLKSVKELLGITIMERSSFEKNPIDFLEAKGYKEVKKDLIIKLPKYSLFELENGRKRMLASAGELQKGNELALPSKYVNFLYLASHYEKLKGSPEDNEQKQLFVEQHKHYLDEIIEQISEFSKRVILADANLDKVLSAYNKHRDKPIREQAENIIHLFTLTNLGAPAAFKYFDTTIDRKRYTSTKEVLDATLIHQSITGLYETRIDLSQLGGDGGEAAAKGGGGGSGGLGIEDEYRLHETSTEPDVSLGSTWLSDFPQAWAETGGMGLAVRQAPLIIPLKATSTPVSIQQYPMSHEARLGIKPHIQRLLDQGILVPCQSPWNTPLLPVKKPGTNDYRPVQDLREVNKRVEDIHPTVPNPYNLLSGLPPSHQWYTVLDLKDAFFCLRLHPTSQPLFAFEWRDPGMGISGQLTWTRLPQGFKNSPTLFNEALHRDLADFRIQHPDLILLQYVDDILLAATSELDCQQGTRALLQTLGDLGYRASAKKAQICQKQVKYLGYLLREGQRWLTEARKETVMGQPVPKTPRQLREFLGKAGFCRLFIPGFAEMAAPLYPLTKPGTLFSWGPDQQKAYQEIKQALLTAPALGLPDLTKPFELFVDEKQGYAKGVLTQKLGPWRRPVAYLSKKLDPVAAGWPPCLRMVAAIAVLTKDAGKLTMGQPLVILAPHAVEALVKQPPDRWLSNARMTHYQAMLLDTDRVQFGPVVALNPATLLPLPEEGAPHDCLEILAETHGTRPDLTDQPIPDADHTWYTDGSSFLQEGQRKAGAAVTTETEVIWAGALPAGTSAQRAELIALTQALKMAEGKRLNVYTDSRYAFATAHIHGEIYRRRGWLTSEGREIKNKSEILALLKALFLPKRLSIIHCLGHQKGDSAEARGNRLADQAAREAAIKTPPDTSTLLIAGKRTADGSEFEKRTADGSEFESPKKKAKVE

SEQ ID NO: 2162-2164 - skipped (3 entries)

SEQ ID NO: 2165 - protein, 2094 aa, synthetic construct
MPAAKRVKLDGGDKKYSIGLDIGTNSVGWAVITDEYKVPSKKFKVLGNTDRHSIKKNLIGALLFDSGETAEATRLKRTARRRYTRRKNRICYLQEIFSNEMAKVDDSFFHRLEESFLVEEDKKHERHPIFGNIVDEVAYHEKYPTIYHLRKKLVDSTDKADLRLIYLALAHMIKFRGHFLIEGDLNPDNSDVDKLFIQLVQTYNQLFEENPINASGVDAKAILSARLSKSRRLENLIAQLPGEKKNGLFGNLIALSLGLTPNFKSNFDLAEDAKLQLSKDTYDDDLDNLLAQIGDQYADLFLAAKNLSDAILLSDILRVNTEITKAPLSASMIKRYDEHHQDLTLLKALVRQQLPEKYKEIFFDQSKNGYAGYIDGGASQEEFYKFIKPILEKMDGTEELLVKLNREDLLRKQRTFDNGSIPHQIHLGELHAILRRQEDFYPFLKDNREKIEKILTFRIPYYVGPLARGNSRFAWMTRKSEETITPWNFEEVVDKGASAQSFIERMTNFDKNLPNEKVLPKHSLLYEYFTVYNELTKVKYVTEGMRKPAFLSGEQKKAIVDLLFKTNRKVTVKQLKEDYFKKIECFDSVEISGVEDRFNASLGTYHDLLKIIKDKDFLDNEENEDILEDIVLTLTLFEDREMIEERLKTYAHLFDDKVMKQLKRRRYTGWGRLSRKLINGIRDKQSGKTILDFLKSDGFANRNFMQLIHDDSLTFKEDIQKAQVSGQGDSLHEHIANLAGSPAIKKGILQTVKVVDELVKVMGRHKPENIVIEMARENQTTQKGQKNSRERMKRIEEGIKELGSQILKEHPVENTQLQNEKLYLYYLQNGRDMYVDQELDINRLSDYDVDHIVPQSFLKDDSIDNKVLTRSDKARGKSDNVPSEEVVKKMKNYWRQLLNAKLITQRKFDNLTKAERGGLSELDKAGFIKRQLVETRQITKHVAQILDSRMNTKYDENDKLIREVKVITLKSKLVSDFRKDFQFYKVREINNYHHAHDAYLNAVVGTALIKKYPKLESEFVYGDYKVYDVRKMIAKSEQEIGKATAKYFFYSNIMNFFKTEITLANGEIRKRPLIETNGETGEIVWDKGRDFATVRKVLSMPQVNIVKKTEVQTGGFSKESILPKRNSDKLIARKKDWDPKKYGGFDSPTVAYSVLVVAKVEKGKSKKLKSVKELLGITIMERSSFEKNPIDFLEAKGYKEVKKDLIIKLPKYSLFELENGRKRMLASAGELQKGNELALPSKYVNFLYLASHYEKLKGSPEDNEQKQLFVEQHKHYLDEIIEQISEFSKRVILADANLDKVLSAYNKHRDKPIREQAENIIHLFTLTNLGAPAAFKYFDTTIDRKRYTSTKEVLDATLIHQSITGLYETRIDLSQLGGDGGGSSGGSGGGGGLGIEDEYRLHETSTEPDVSLGSTWLSDFPQAWAETGGMGLAVRQAPLIIPLKATSTPVSIQQYPMSHEARLGIKPHIQRLLDQGILVPCQSPWNTPLLPVKKPGTNDYRPVQDLREVNKRVEDIHPTVPNPYNLLSGLPPSHQWYTVLDLKDAFFCLRLHPTSQPLFAFEWRDPGMGISGQLTWTRLPQGFKNSPTLFNEALHRDLADFRIQHPDLILLQYVDDILLAATSELDCQQGTRALLQTLGDLGYRASAKKAQICQKQVKYLGYLLREGQRWLTEARKETVMGQPVPKTPRQLREFLGKAGFCRLFIPGFAEMAAPLYPLTKPGTLFSWGPDQQKAYQEIKQALLTAPALGLPDLTKPFELFVDEKQGYAKGVLTQKLGPWRRPVAYLSKKLDPVAAGWPPCLRMVAAIAVLTKDAGKLTMGQPLVILAPHAVEALVKQPPDRWLSNARMTHYQAMLLDTDRVQFGPVVALNPATLLPLPEEGAPHDCLEILAETHGTRPDLTDQPIPDADHTWYTDGSSFLQEGQRKAGAAVTTETEVIWAGALPAGTSAQRAELIALTQALKMAEGKRLNVYTDSRYAFATAHIHGEIYRRRGWLTSEGREIKNKSEILALLKALFLPKRLSIIHCLGHQKGDSAEARGNRLADQAAREAAIKTPPDTSTLLIAGKRTADGSEFEKRTADGSEFESPKKKAKVE

SEQ ID NO: 2166-2171 - skipped (6 entries)

SEQ ID NO: 2172 - protein, 2094 aa, synthetic construct
MPAAKRVKLDGGDKKYSIGLDIGTNSVGWAVITDEYKVPSKKFKVLGNTDRHSIKKNLIGALLFDSGETAEATRLKRTARRRYTRRKNRICYLQEIFSNEMAKVDDSFFHRLEESFLVEEDKKHERHPIFGNIVDEVAYHEKYPTIYHLRKKLVDSTDKADLRLIYLALAHMIKFRGHFLIEGDLNPDNSDVDKLFIQLVQTYNQLFEENPINASGVDAKAILSARLSKSRRLENLIAQLPGEKKNGLFGNLIALSLGLTPNFKSNFDLAEDAKLQLSKDTYDDDLDNLLAQIGDQYADLFLAAKNLSDAILLSDILRVNTEITKAPLSASMIKRYDEHHQDLTLLKALVRQQLPEKYKEIFFDQSKNGYAGYIDGGASQEEFYKFIKPILEKMDGTEELLVKLNREDLLRKQRTFDNGSIPHQIHLGELHAILRRQEDFYPFLKDNREKIEKILTFRIPYYVGPLARGNSRFAWMTRKSEETITPWNFEEVVDKGASAQSFIERMTNFDKNLPNEKVLPKHSLLYEYFTVYNELTKVKYVTEGMRKPAFLSGEQKKAIVDLLFKTNRKVTVKQLKEDYFKKIECFDSVEISGVEDRFNASLGTYHDLLKIIKDKDFLDNEENEDILEDIVLTLTLFEDREMIEERLKTYAHLFDDKVMKQLKRRRYTGWGRLSRKLINGIRDKQSGKTILDFLKSDGFANRNFMQLIHDDSLTFKEDIQKAQVSGQGDSLHEHIANLAGSPAIKKGILQTVKVVDELVKVMGRHKPENIVIEMARENQTTQKGQKNSRERMKRIEEGIKELGSQILKEHPVENTQLQNEKLYLYYLQNGRDMYVDQELDINRLSDYDVDHIVPQSFLKDDSIDNKVLTRSDKARGKSDNVPSEEVVKKMKNYWRQLLNAKLITQRKFDNLTKAERGGLSELDKAGFIKRQLVETRQITKHVAQILDSRMNTKYDENDKLIREVKVITLKSKLVSDFRKDFQFYKVREINNYHHAHDAYLNAVVGTALIKKYPKLESEFVYGDYKVYDVRKMIAKSEQEIGKATAKYFFYSNIMNFFKTEITLANGEIRKRPLIETNGETGEIVWDKGRDFATVRKVLSMPQVNIVKKTEVQTGGFSKESILPKRNSDKLIARKKDWDPKKYGGFDSPTVAYSVLVVAKVEKGKSKKLKSVKELLGITIMERSSFEKNPIDFLEAKGYKEVKKDLIIKLPKYSLFELENGRKRMLASAGELQKGNELALPSKYVNFLYLASHYEKLKGSPEDNEQKQLFVEQHKHYLDEIIEQISEFSKRVILADANLDKVLSAYNKHRDKPIREQAENIIHLFTLTNLGAPAAFKYFDTTIDRKRYTSTKEVLDATLIHQSITGLYETRIDLSQLGGDGGGGSGGGGSSGGLGIEDEYRLHETSTEPDVSLGSTWLSDFPQAWAETGGMGLAVRQAPLIIPLKATSTPVSIQQYPMSHEARLGIKPHIQRLLDQGILVPCQSPWNTPLLPVKKPGTNDYRPVQDLREVNKRVEDIHPTVPNPYNLLSGLPPSHQWYTVLDLKDAFFCLRLHPTSQPLFAFEWRDPGMGISGQLTWTRLPQGFKNSPTLFNEALHRDLADFRIQHPDLILLQYVDDILLAATSELDCQQGTRALLQTLGDLGYRASAKKAQICQKQVKYLGYLLREGQRWLTEARKETVMGQPVPKTPRQLREFLGKAGFCRLFIPGFAEMAAPLYPLTKPGTLFSWGPDQQKAYQEIKQALLTAPALGLPDLTKPFELFVDEKQGYAKGVLTQKLGPWRRPVAYLSKKLDPVAAGWPPCLRMVAAIAVLTKDAGKLTMGQPLVILAPHAVEALVKQPPDRWLSNARMTHYQAMLLDTDRVQFGPVVALNPATLLPLPEEGAPHDCLEILAETHGTRPDLTDQPIPDADHTWYTDGSSFLQEGQRKAGAAVTTETEVIWAGALPAGTSAQRAELIALTQALKMAEGKRLNVYTDSRYAFATAHIHGEIYRRRGWLTSEGREIKNKSEILALLKALFLPKRLSIIHCLGHQKGDSAEARGNRLADQAAREAAIKTPPDTSTLLIAGKRTADGSEFEKRTADGSEFESPKKKAKVE

SEQ ID NO: 2173 - skipped

SEQ ID NO: 2174 - protein, 2096 aa, synthetic construct
MPAAKRVKLDGGDKKYSIGLDIGTNSVGWAVITDEYKVPSKKFKVLGNTDRHSIKKNLIGALLFDSGETAEATRLKRTARRRYTRRKNRICYLQEIFSNEMAKVDDSFFHRLEESFLVEEDKKHERHPIFGNIVDEVAYHEKYPTIYHLRKKLVDSTDKADLRLIYLALAHMIKFRGHFLIEGDLNPDNSDVDKLFIQLVQTYNQLFEENPINASGVDAKAILSARLSKSRRLENLIAQLPGEKKNGLFGNLIALSLGLTPNFKSNFDLAEDAKLQLSKDTYDDDLDNLLAQIGDQYADLFLAAKNLSDAILLSDILRVNTEITKAPLSASMIKRYDEHHQDLTLLKALVRQQLPEKYKEIFFDQSKNGYAGYIDGGASQEEFYKFIKPILEKMDGTEELLVKLNREDLLRKQRTFDNGSIPHQIHLGELHAILRRQEDFYPFLKDNREKIEKILTFRIPYYVGPLARGNSRFAWMTRKSEETITPWNFEEVVDKGASAQSFIERMTNFDKNLPNEKVLPKHSLLYEYFTVYNELTKVKYVTEGMRKPAFLSGEQKKAIVDLLFKTNRKVTVKQLKEDYFKKIECFDSVEISGVEDRFNASLGTYHDLLKIIKDKDFLDNEENEDILEDIVLTLTLFEDREMIEERLKTYAHLFDDKVMKQLKRRRYTGWGRLSRKLINGIRDKQSGKTILDFLKSDGFANRNFMQLIHDDSLTFKEDIQKAQVSGQGDSLHEHIANLAGSPAIKKGILQTVKVVDELVKVMGRHKPENIVIEMARENQTTQKGQKNSRERMKRIEEGIKELGSQILKEHPVENTQLQNEKLYLYYLQNGRDMYVDQELDINRLSDYDVDHIVPQSFLKDDSIDNKVLTRSDKARGKSDNVPSEEVVKKMKNYWRQLLNAKLITQRKFDNLTKAERGGLSELDKAGFIKRQLVETRQITKHVAQILDSRMNTKYDENDKLIREVKVITLKSKLVSDFRKDFQFYKVREINNYHHAHDAYLNAVVGTALIKKYPKLESEFVYGDYKVYDVRKMIAKSEQEIGKATAKYFFYSNIMNFFKTEITLANGEIRKRPLIETNGETGEIVWDKGRDFATVRKVLSMPQVNIVKKTEVQTGGFSKESILPKRNSDKLIARKKDWDPKKYGGFDSPTVAYSVLVVAKVEKGKSKKLKSVKELLGITIMERSSFEKNPIDFLEAKGYKEVKKDLIIKLPKYSLFELENGRKRMLASAGELQKGNELALPSKYVNFLYLASHYEKLKGSPEDNEQKQLFVEQHKHYLDEIIEQISEFSKRVILADANLDKVLSAYNKHRDKPIREQAENIIHLFTLTNLGAPAAFKYFDTTIDRKRYTSTKEVLDATLIHQSITGLYETRIDLSQLGGDGGGGGEAAAKGSSGGLGIEDEYRLHETSTEPDVSLGSTWLSDFPQAWAETGGMGLAVRQAPLIIPLKATSTPVSIQQYPMSHEARLGIKPHIQRLLDQGILVPCQSPWNTPLLPVKKPGTNDYRPVQDLREVNKRVEDIHPTVPNPYNLLSGLPPSHQWYTVLDLKDAFFCLRLHPTSQPLFAFEWRDPGMGISGQLTWTRLPQGFKNSPTLFNEALHRDLADFRIQHPDLILLQYVDDILLAATSELDCQQGTRALLQTLGDLGYRASAKKAQICQKQVKYLGYLLREGQRWLTEARKETVMGQPVPKTPRQLREFLGKAGFCRLFIPGFAEMAAPLYPLTKPGTLFSWGPDQQKAYQEIKQALLTAPALGLPDLTKPFELFVDEKQGYAKGVLTQKLGPWRRPVAYLSKKLDPVAAGWPPCLRMVAAIAVLTKDAGKLTMGQPLVILAPHAVEALVKQPPDRWLSNARMTHYQAMLLDTDRVQFGPVVALNPATLLPLPEEGAPHDCLEILAETHGTRPDLTDQPIPDADHTWYTDGSSFLQEGQRKAGAAVTTETEVIWAGALPAGTSAQRAELIALTQALKMAEGKRLNVYTDSRYAFATAHIHGEIYRRRGWLTSEGREIKNKSEILALLKALFLPKRLSIIHCLGHQKGDSAEARGNRLADQAAREAAIKTPPDTSTLLIAGKRTADGSEFEKRTADGSEFESPKKKAKVE

SEQ ID NO: 2175-2186 - skipped (12 entries)

SEQ ID NO: 2187 - protein, 2096 aa, synthetic construct
MPAAKRVKLDGGDKKYSIGLDIGTNSVGWAVITDEYKVPSKKFKVLGNTDRHSIKKNLIGALLFDSGETAEATRLKRTARRRYTRRKNRICYLQEIFSNEMAKVDDSFFHRLEESFLVEEDKKHERHPIFGNIVDEVAYHEKYPTIYHLRKKLVDSTDKADLRLIYLALAHMIKFRGHFLIEGDLNPDNSDVDKLFIQLVQTYNQLFEENPINASGVDAKAILSARLSKSRRLENLIAQLPGEKKNGLFGNLIALSLGLTPNFKSNFDLAEDAKLQLSKDTYDDDLDNLLAQIGDQYADLFLAAKNLSDAILLSDILRVNTEITKAPLSASMIKRYDEHHQDLTLLKALVRQQLPEKYKEIFFDQSKNGYAGYIDGGASQEEFYKFIKPILEKMDGTEELLVKLNREDLLRKQRTFDNGSIPHQIHLGELHAILRRQEDFYPFLKDNREKIEKILTFRIPYYVGPLARGNSRFAWMTRKSEETITPWNFEEVVDKGASAQSFIERMTNFDKNLPNEKVLPKHSLLYEYFTVYNELTKVKYVTEGMRKPAFLSGEQKKAIVDLLFKTNRKVTVKQLKEDYFKKIECFDSVEISGVEDRFNASLGTYHDLLKIIKDKDFLDNEENEDILEDIVLTLTLFEDREMIEERLKTYAHLFDDKVMKQLKRRRYTGWGRLSRKLINGIRDKQSGKTILDFLKSDGFANRNFMQLIHDDSLTFKEDIQKAQVSGQGDSLHEHIANLAGSPAIKKGILQTVKVVDELVKVMGRHKPENIVIEMARENQTTQKGQKNSRERMKRIEEGIKELGSQILKEHPVENTQLQNEKLYLYYLQNGRDMYVDQELDINRLSDYDVDHIVPQSFLKDDSIDNKVLTRSDKARGKSDNVPSEEVVKKMKNYWRQLLNAKLITQRKFDNLTKAERGGLSELDKAGFIKRQLVETRQITKHVAQILDSRMNTKYDENDKLIREVKVITLKSKLVSDFRKDFQFYKVREINNYHHAHDAYLNAVVGTALIKKYPKLESEFVYGDYKVYDVRKMIAKSEQEIGKATAKYFFYSNIMNFFKTEITLANGEIRKRPLIETNGETGEIVWDKGRDFATVRKVLSMPQVNIVKKTEVQTGGFSKESILPKRNSDKLIARKKDWDPKKYGGFDSPTVAYSVLVVAKVEKGKSKKLKSVKELLGITIMERSSFEKNPIDFLEAKGYKEVKKDLIIKLPKYSLFELENGRKRMLASAGELQKGNELALPSKYVNFLYLASHYEKLKGSPEDNEQKQLFVEQHKHYLDEIIEQISEFSKRVILADANLDKVLSAYNKHRDKPIREQAENIIHLFTLTNLGAPAAFKYFDTTIDRKRYTSTKEVLDATLIHQSITGLYETRIDLSQLGGDGGPAPAPAPAPAPGGTLGIEDEYRLHETSTEPDVSLGSTWLSDFPQAWAETGGMGLAVRQAPLIIPLKATSTPVSIQQYPMSHEARLGIKPHIQRLLDQGILVPCQSPWNTPLLPVKKPGTNDYRPVQDLREVNKRVEDIHPTVPNPYNLLSGLPPSHQWYTVLDLKDAFFCLRLHPTSQPLFAFEWRDPGMGISGQLTWTRLPQGFKNSPTLFNEALHRDLADFRIQHPDLILLQYVDDILLAATSELDCQQGTRALLQTLGDLGYRASAKKAQICQKQVKYLGYLLREGQRWLTEARKETVMGQPVPKTPRQLREFLGTAGFCRLWIPGFAEMAAPLYPLTKPGTLFSWGPDQQKAYQEIKQALLTAPALGLPDLTKPFELFVDEKQGYAKGVLTQKLGPWRRPVAYLSKKLDPVAAGWPPCLRMVAAIAVLTKDAGKLTMGQPLVILAPHAVEALVKQPPDRWLSNARMTHYQAMLLDTDRVQFGPVVALNPATLLPLPEEGAPHDCLEILAETHGTRPDLTDQPIPDADHTWYTDGSSFLQEGQRKAGAAVTTETEVIWAGALPAGTSAQRAELIALTQALKMAEGKRLNVYTDSRYAFATAHIHGEIYRRRGWLTSEGREIKNKSEILALLKALFLPKRLSIIHCLGHQKGDSAEARGNRLADQAAREAAIKTPPDTSTLLAGKRTADGSEFEKRTADGSEFESPKKKAKVE

SEQ ID NO: 2188 - protein, 2110 aa, synthetic construct
MPAAKRVKLDGGDKKYSIGLDIGTNSVGWAVITDEYKVPSKKFKVLGNTDRHSIKKNLIGALLFDSGETAEATRLKRTARRRYTRRKNRICYLQEIFSNEMAKVDDSFFHRLEESFLVEEDKKHERHPIFGNIVDEVAYHEKYPTIYHLRKKLVDSTDKADLRLIYLALAHMIKFRGHFLIEGDLNPDNSDVDKLFIQLVQTYNQLFEENPINASGVDAKAILSARLSKSRRLENLIAQLPGEKKNGLFGNLIALSLGLTPNFKSNFDLAEDAKLQLSKDTYDDDLDNLLAQIGDQYADLFLAAKNLSDAILLSDILRVNTEITKAPLSASMIKRYDEHHQDLTLLKALVRQQLPEKYKEIFFDQSKNGYAGYIDGGASQEEFYKFIKPILEKMDGTEELLVKLNREDLLRKQRTFDNGSIPHQIHLGELHAILRRQEDFYPFLKDNREKIEKILTFRIPYYVGPLARGNSRFAWMTRKSEETITPWNFEEVVDKGASAQSFIERMTNFDKNLPNEKVLPKHSLLYEYFTVYNELTKVKYVTEGMRKPAFLSGEQKKAIVDLLFKTNRKVTVKQLKEDYFKKIECFDSVEISGVEDRFNASLGTYHDLLKIIKDKDFLDNEENEDILEDIVLTLTLFEDREMIEERLKTYAHLFDDKVMKQLKRRRYTGWGRLSRKLINGIRDKQSGKTILDFLKSDGFANRNFMQLIHDDSLTFKEDIQKAQVSGQGDSLHEHIANLAGSPAIKKGILQTVKVVDELVKVMGRHKPENIVIEMARENQTTQKGQKNSRERMKRIEEGIKELGSQILKEHPVENTQLQNEKLYLYYLQNGRDMYVDQELDINRLSDYDVDHIVPQSFLKDDSIDNKVLTRSDKARGKSDNVPSEEVVKKMKNYWRQLLNAKLITQRKFDNLTKAERGGLSELDKAGFIKRQLVETRQITKHVAQILDSRMNTKYDENDKLIREVKVITLKSKLVSDFRKDFQFYKVREINNYHHAHDAYLNAVVGTALIKKYPKLESEFVYGDYKVYDVRKMIAKSEQEIGKATAKYFFYSNIMNFFKTEITLANGEIRKRPLIETNGETGEIVWDKGRDFATVRKVLSMPQVNIVKKTEVQTGGFSKESILPKRNSDKLIARKKDWDPKKYGGFDSPTVAYSVLVVAKVEKGKSKKLKSVKELLGITIMERSSFEKNPIDFLEAKGYKEVKKDLIIKLPKYSLFELENGRKRMLASAGELQKGNELALPSKYVNFLYLASHYEKLKGSPEDNEQKQLFVEQHKHYLDEIIEQISEFSKRVILADANLDKVLSAYNKHRDKPIREQAENIIHLFTLTNLGAPAAFKYFDTTIDRKRYTSTKEVLDATLIHQSITGLYETRIDLSQLGGDGGEAAAKEAAAKEAAAKEAAAKEAAAKGGTLGIEDEYRLHETSTEPDVSLGSTWLSDFPQAWAETGGMGLAVRQAPLIIPLKATSTPVSIQQYPMSHEARLGIKPHIQRLLDQGILVPCQSPWNTPLLPVKKPGTNDYRPVQDLREVNKRVEDIHPTVPNPYNLLSGLPPSHQWYTVLDLKDAFFCLRLHPTSQPLFAFEWRDPGMGISGQLTWTRLPQGFKNSPTLFNEALHRDLADFRIQHPDLILLQYVDDILLAATSELDCQQGTRALLQTLGDLGYRASAKKAQICQKQVKYLGYLLREGQRWLTEARKETVMGQPVPKTPRQLREFLGTAGFCRLWIPGFAEMAAPLYPLTKPGTLFSWGPDQQKAYQEIKQALLTAPALGLPDLTKPFELFVDEKQGYAKGVLTQKLGPWRRPVAYLSKKLDPVAAGWPPCLRMVAAIAVLTKDAGKLTMGQPLVILAPHAVEALVKQPPDRWLSNARMTHYQAMLLDTDRVQFGPVVALNPATLLPLPEEGAPHDCLEILAETHGTRPDLTDQPIPDADHTWYTDGSSFLQEGQRKAGAAVTTETEVIWAGALPAGTSAQRAELIALTQALKMAEGKRLNVYTDSRYAFATAHIHGEIYRRRGWLTSEGREIKNKSEILALLKALFLPKRLSIIHCLGHQKGDSAEARGNRLADQAAREAAIKTPPDTSTLLAGKRTADGSEFEKRTADGSEFESPKKKAKVE

SEQ ID NO: 2189 - skipped

SEQ ID NO: 2190 - protein, 2096 aa, synthetic construct
MPAAKRVKLDGGDKKYSIGLDIGTNSVGWAVITDEYKVPSKKFKVLGNTDRHSIKKNLIGALLFDSGETAEATRLKRTARRRYTRRKNRICYLQEIFSNEMAKVDDSFFHRLEESFLVEEDKKHERHPIFGNIVDEVAYHEKYPTIYHLRKKLVDSTDKADLRLIYLALAHMIKFRGHFLIEGDLNPDNSDVDKLFIQLVQTYNQLFEENPINASGVDAKAILSARLSKSRRLENLIAQLPGEKKNGLFGNLIALSLGLTPNFKSNFDLAEDAKLQLSKDTYDDDLDNLLAQIGDQYADLFLAAKNLSDAILLSDILRVNTEITKAPLSASMIKRYDEHHQDLTLLKALVRQQLPEKYKEIFFDQSKNGYAGYIDGGASQEEFYKFIKPILEKMDGTEELLVKLNREDLLRKQRTFDNGSIPHQIHLGELHAILRRQEDFYPFLKDNREKIEKILTFRIPYYVGPLARGNSRFAWMTRKSEETITPWNFEEVVDKGASAQSFIERMTNFDKNLPNEKVLPKHSLLYEYFTVYNELTKVKYVTEGMRKPAFLSGEQKKAIVDLLFKTNRKVTVKQLKEDYFKKIECFDSVEISGVEDRFNASLGTYHDLLKIIKDKDFLDNEENEDILEDIVLTLTLFEDREMIEERLKTYAHLFDDKVMKQLKRRRYTGWGRLSRKLINGIRDKQSGKTILDFLKSDGFANRNFMQLIHDDSLTFKEDIQKAQVSGQGDSLHEHIANLAGSPAIKKGILQTVKVVDELVKVMGRHKPENIVIEMARENQTTQKGQKNSRERMKRIEEGIKELGSQILKEHPVENTQLQNEKLYLYYLQNGRDMYVDQELDINRLSDYDVDHIVPQSFLKDDSIDNKVLTRSDKARGKSDNVPSEEVVKKMKNYWRQLLNAKLITQRKFDNLTKAERGGLSELDKAGFIKRQLVETRQITKHVAQILDSRMNTKYDENDKLIREVKVITLKSKLVSDFRKDFQFYKVREINNYHHAHDAYLNAVVGTALIKKYPKLESEFVYGDYKVYDVRKMIAKSEQEIGKATAKYFFYSNIMNFFKTEITLANGEIRKRPLIETNGETGEIVWDKGRDFATVRKVLSMPQVNIVKKTEVQTGGFSKESILPKRNSDKLIARKKDWDPKKYGGFDSPTVAYSVLVVAKVEKGKSKKLKSVKELLGITIMERSSFEKNPIDFLEAKGYKEVKKDLIIKLPKYSLFELENGRKRMLASAGELQKGNELALPSKYVNFLYLASHYEKLKGSPEDNEQKQLFVEQHKHYLDEIIEQISEFSKRVILADANLDKVLSAYNKHRDKPIREQAENIIHLFTLTNLGAPAAFKYFDTTIDRKRYTSTKEVLDATLIHQSITGLYETRIDLSQLGGDGGEAAAKGSSGGSGGTLGIEDEYRLHETSTEPDVSLGSTWLSDFPQAWAETGGMGLAVRQAPLIIPLKATSTPVSIQQYPMSHEARLGIKPHIQRLLDQGILVPCQSPWNTPLLPVKKPGTNDYRPVQDLREVNKRVEDIHPTVPNPYNLLSGLPPSHQWYTVLDLKDAFFCLRLHPTSQPLFAFEWRDPGMGISGQLTWTRLPQGFKNSPTLFNEALHRDLADFRIQHPDLILLQYVDDILLAATSELDCQQGTRALLQTLGDLGYRASAKKAQICQKQVKYLGYLLREGQRWLTEARKETVMGQPVPKTPRQLREFLGTAGFCRLWIPGFAEMAAPLYPLTKPGTLFSWGPDQQKAYQEIKQALLTAPALGLPDLTKPFELFVDEKQGYAKGVLTQKLGPWRRPVAYLSKKLDPVAAGWPPCLRMVAAIAVLTKDAGKLTMGQPLVILAPHAVEALVKQPPDRWLSNARMTHYQAMLLDTDRVQFGPVVALNPATLLPLPEEGAPHDCLEILAETHGTRPDLTDQPIPDADHTWYTDGSSFLQEGQRKAGAAVTTETEVIWAGALPAGTSAQRAELIALTQALKMAEGKRLNVYTDSRYAFATAHIHGEIYRRRGWLTSEGREIKNKSEILALLKALFLPKRLSIIHCLGHQKGDSAEARGNRLADQAAREAAIKTPPDTSTLLAGKRTADGSEFEKRTADGSEFESPKKKAKVE

SEQ ID NO: 2191 - skipped

SEQ ID NO: 2192 - protein, 2096 aa, synthetic construct
MPAAKRVKLDGGDKKYSIGLDIGTNSVGWAVITDEYKVPSKKFKVLGNTDRHSIKKNLIGALLFDSGETAEATRLKRTARRRYTRRKNRICYLQEIFSNEMAKVDDSFFHRLEESFLVEEDKKHERHPIFGNIVDEVAYHEKYPTIYHLRKKLVDSTDKADLRLIYLALAHMIKFRGHFLIEGDLNPDNSDVDKLFIQLVQTYNQLFEENPINASGVDAKAILSARLSKSRRLENLIAQLPGEKKNGLFGNLIALSLGLTPNFKSNFDLAEDAKLQLSKDTYDDDLDNLLAQIGDQYADLFLAAKNLSDAILLSDILRVNTEITKAPLSASMIKRYDEHHQDLTLLKALVRQQLPEKYKEIFFDQSKNGYAGYIDGGASQEEFYKFIKPILEKMDGTEELLVKLNREDLLRKQRTFDNGSIPHQIHLGELHAILRRQEDFYPFLKDNREKIEKILTFRIPYYVGPLARGNSRFAWMTRKSEETITPWNFEEVVDKGASAQSFIERMTNFDKNLPNEKVLPKHSLLYEYFTVYNELTKVKYVTEGMRKPAFLSGEQKKAIVDLLFKTNRKVTVKQLKEDYFKKIECFDSVEISGVEDRFNASLGTYHDLLKIIKDKDFLDNEENEDILEDIVLTLTLFEDREMIEERLKTYAHLFDDKVMKQLKRRRYTGWGRLSRKLINGIRDKQSGKTILDFLKSDGFANRNFMQLIHDDSLTFKEDIQKAQVSGQGDSLHEHIANLAGSPAIKKGILQTVKVVDELVKVMGRHKPENIVIEMARENQTTQKGQKNSRERMKRIEEGIKELGSQILKEHPVENTQLQNEKLYLYYLQNGRDMYVDQELDINRLSDYDVDHIVPQSFLKDDSIDNKVLTRSDKARGKSDNVPSEEVVKKMKNYWRQLLNAKLITQRKFDNLTKAERGGLSELDKAGFIKRQLVETRQITKHVAQILDSRMNTKYDENDKLIREVKVITLKSKLVSDFRKDFQFYKVREINNYHHAHDAYLNAVVGTALIKKYPKLESEFVYGDYKVYDVRKMIAKSEQEIGKATAKYFFYSNIMNFFKTEITLANGEIRKRPLIETNGETGEIVWDKGRDFATVRKVLSMPQVNIVKKTEVQTGGFSKESILPKRNSDKLIARKKDWDPKKYGGFDSPTVAYSVLVVAKVEKGKSKKLKSVKELLGITIMERSSFEKNPIDFLEAKGYKEVKKDLIIKLPKYSLFELENGRKRMLASAGELQKGNELALPSKYVNFLYLASHYEKLKGSPEDNEQKQLFVEQHKHYLDEIIEQISEFSKRVILADANLDKVLSAYNKHRDKPIREQAENIIHLFTLTNLGAPAAFKYFDTTIDRKRYTSTKEVLDATLIHQSITGLYETRIDLSQLGGDGGGGSPAPEAAAKGGTLGIEDEYRLHETSTEPDVSLGSTWLSDFPQAWAETGGMGLAVRQAPLIIPLKATSTPVSIQQYPMSHEARLGIKPHIQRLLDQGILVPCQSPWNTPLLPVKKPGTNDYRPVQDLREVNKRVEDIHPTVPNPYNLLSGLPPSHQWYTVLDLKDAFFCLRLHPTSQPLFAFEWRDPGMGISGQLTWTRLPQGFKNSPTLFNEALHRDLADFRIQHPDLILLQYVDDILLAATSELDCQQGTRALLQTLGDLGYRASAKKAQICQKQVKYLGYLLREGQRWLTEARKETVMGQPVPKTPRQLREFLGTAGFCRLWIPGFAEMAAPLYPLTKPGTLFSWGPDQQKAYQEIKQALLTAPALGLPDLTKPFELFVDEKQGYAKGVLTQKLGPWRRPVAYLSKKLDPVAAGWPPCLRMVAAIAVLTKDAGKLTMGQPLVILAPHAVEALVKQPPDRWLSNARMTHYQAMLLDTDRVQFGPVVALNPATLLPLPEEGAPHDCLEILAETHGTRPDLTDQPIPDADHTWYTDGSSFLQEGQRKAGAAVTTETEVIWAGALPAGTSAQRAELIALTQALKMAEGKRLNVYTDSRYAFATAHIHGEIYRRRGWLTSEGREIKNKSEILALLKALFLPKRLSIIHCLGHQKGDSAEARGNRLADQAAREAAIKTPPDTSTLLAGKRTADGSEFEKRTADGSEFESPKKKAKVE

SEQ ID NO: 2193-2195 - skipped (3 entries)

SEQ ID NO: 2196 - protein, 2096 aa, synthetic construct
MPAAKRVKLDGGDKKYSIGLDIGTNSVGWAVITDEYKVPSKKFKVLGNTDRHSIKKNLIGALLFDSGETAEATRLKRTARRRYTRRKNRICYLQEIFSNEMAKVDDSFFHRLEESFLVEEDKKHERHPIFGNIVDEVAYHEKYPTIYHLRKKLVDSTDKADLRLIYLALAHMIKFRGHFLIEGDLNPDNSDVDKLFIQLVQTYNQLFEENPINASGVDAKAILSARLSKSRRLENLIAQLPGEKKNGLFGNLIALSLGLTPNFKSNFDLAEDAKLQLSKDTYDDDLDNLLAQIGDQYADLFLAAKNLSDAILLSDILRVNTEITKAPLSASMIKRYDEHHQDLTLLKALVRQQLPEKYKEIFFDQSKNGYAGYIDGGASQEEFYKFIKPILEKMDGTEELLVKLNREDLLRKQRTFDNGSIPHQIHLGELHAILRRQEDFYPFLKDNREKIEKILTFRIPYYVGPLARGNSRFAWMTRKSEETITPWNFEEVVDKGASAQSFIERMTNFDKNLPNEKVLPKHSLLYEYFTVYNELTKVKYVTEGMRKPAFLSGEQKKAIVDLLFKTNRKVTVKQLKEDYFKKIECFDSVEISGVEDRFNASLGTYHDLLKIIKDKDFLDNEENEDILEDIVLTLTLFEDREMIEERLKTYAHLFDDKVMKQLKRRRYTGWGRLSRKLINGIRDKQSGKTILDFLKSDGFANRNFMQLIHDDSLTFKEDIQKAQVSGQGDSLHEHIANLAGSPAIKKGILQTVKVVDELVKVMGRHKPENIVIEMARENQTTQKGQKNSRERMKRIEEGIKELGSQILKEHPVENTQLQNEKLYLYYLQNGRDMYVDQELDINRLSDYDVDHIVPQSFLKDDSIDNKVLTRSDKARGKSDNVPSEEVVKKMKNYWRQLLNAKLITQRKFDNLTKAERGGLSELDKAGFIKRQLVETRQITKHVAQILDSRMNTKYDENDKLIREVKVITLKSKLVSDFRKDFQFYKVREINNYHHAHDAYLNAVVGTALIKKYPKLESEFVYGDYKVYDVRKMIAKSEQEIGKATAKYFFYSNIMNFFKTEITLANGEIRKRPLIETNGETGEIVWDKGRDFATVRKVLSMPQVNIVKKTEVQTGGFSKESILPKRNSDKLIARKKDWDPKKYGGFDSPTVAYSVLVVAKVEKGKSKKLKSVKELLGITIMERSSFEKNPIDFLEAKGYKEVKKDLIIKLPKYSLFELENGRKRMLASAGELQKGNELALPSKYVNFLYLASHYEKLKGSPEDNEQKQLFVEQHKHYLDEIIEQISEFSKRVILADANLDKVLSAYNKHRDKPIREQAENIIHLFTLTNLGAPAAFKYFDTTIDRKRYTSTKEVLDATLIHQSITGLYETRIDLSQLGGDGGGGGGSSEAAAKGGTLGIEDEYRLHETSTEPDVSLGSTWLSDFPQAWAETGGMGLAVRQAPLIIPLKATSTPVSIQQYPMSHEARLGIKPHIQRLLDQGILVPCQSPWNTPLLPVKKPGTNDYRPVQDLREVNKRVEDIHPTVPNPYNLLSGLPPSHQWYTVLDLKDAFFCLRLHPTSQPLFAFEWRDPGMGISGQLTWTRLPQGFKNSPTLFNEALHRDLADFRIQHPDLILLQYVDDILLAATSELDCQQGTRALLQTLGDLGYRASAKKAQICQKQVKYLGYLLREGQRWLTEARKETVMGQPVPKTPRQLREFLGTAGFCRLWIPGFAEMAAPLYPLTKPGTLFSWGPDQQKAYQEIKQALLTAPALGLPDLTKPFELFVDEKQGYAKGVLTQKLGPWRRPVAYLSKKLDPVAAGWPPCLRMVAAIAVLTKDAGKLTMGQPLVILAPHAVEALVKQPPDRWLSNARMTHYQAMLLDTDRVQFGPVVALNPATLLPLPEEGAPHDCLEILAETHGTRPDLTDQPIPDADHTWYTDGSSFLQEGQRKAGAAVTTETEVIWAGALPAGTSAQRAELIALTQALKMAEGKRLNVYTDSRYAFATAHIHGEIYRRRGWLTSEGREIKNKSEILALLKALFLPKRLSIIHCLGHQKGDSAEARGNRLADQAAREAAIKTPPDTSTLLAGKRTADGSEFEKRTADGSEFESPKKKAKVE

SEQ ID NO: 2197-2224 - skipped (28 entries)

SEQ ID NO: 2225 - protein, 2096 aa, synthetic construct
MPAAKRVKLDGGDKKYSIGLDIGTNSVGWAVITDEYKVPSKKFKVLGNTDRHSIKKNLIGALLFDSGETAEATRLKRTARRRYTRRKNRICYLQEIFSNEMAKVDDSFFHRLEESFLVEEDKKHERHPIFGNIVDEVAYHEKYPTIYHLRKKLVDSTDKADLRLIYLALAHMIKFRGHFLIEGDLNPDNSDVDKLFIQLVQTYNQLFEENPINASGVDAKAILSARLSKSRRLENLIAQLPGEKKNGLFGNLIALSLGLTPNFKSNFDLAEDAKLQLSKDTYDDDLDNLLAQIGDQYADLFLAAKNLSDAILLSDILRVNTEITKAPLSASMIKRYDEHHQDLTLLKALVRQQLPEKYKEIFFDQSKNGYAGYIDGGASQEEFYKFIKPILEKMDGTEELLVKLNREDLLRKQRTFDNGSIPHQIHLGELHAILRRQEDFYPFLKDNREKIEKILTFRIPYYVGPLARGNSRFAWMTRKSEETITPWNFEEVVDKGASAQSFIERMTNFDKNLPNEKVLPKHSLLYEYFTVYNELTKVKYVTEGMRKPAFLSGEQKKAIVDLLFKTNRKVTVKQLKEDYFKKIECFDSVEISGVEDRFNASLGTYHDLLKIIKDKDFLDNEENEDILEDIVLTLTLFEDREMIEERLKTYAHLFDDKVMKQLKRRRYTGWGRLSRKLINGIRDKQSGKTILDFLKSDGFANRNFMQLIHDDSLTFKEDIQKAQVSGQGDSLHEHIANLAGSPAIKKGILQTVKVVDELVKVMGRHKPENIVIEMARENQTTQKGQKNSRERMKRIEEGIKELGSQILKEHPVENTQLQNEKLYLYYLQNGRDMYVDQELDINRLSDYDVDHIVPQSFLKDDSIDNKVLTRSDKARGKSDNVPSEEVVKKMKNYWRQLLNAKLITQRKFDNLTKAERGGLSELDKAGFIKRQLVETRQITKHVAQILDSRMNTKYDENDKLIREVKVITLKSKLVSDFRKDFQFYKVREINNYHHAHDAYLNAVVGTALIKKYPKLESEFVYGDYKVYDVRKMIAKSEQEIGKATAKYFFYSNIMNFFKTEITLANGEIRKRPLIETNGETGEIVWDKGRDFATVRKVLSMPQVNIVKKTEVQTGGFSKESILPKRNSDKLIARKKDWDPKKYGGFDSPTVAYSVLVVAKVEKGKSKKLKSVKELLGITIMERSSFEKNPIDFLEAKGYKEVKKDLIIKLPKYSLFELENGRKRMLASAGELQKGNELALPSKYVNFLYLASHYEKLKGSPEDNEQKQLFVEQHKHYLDEIIEQISEFSKRVILADANLDKVLSAYNKHRDKPIREQAENIIHLFTLTNLGAPAAFKYFDTTIDRKRYTSTKEVLDATLIHQSITGLYETRIDLSQLGGDGGPAPGSSEAAAKGGTLNIEDEYRLHETSKEPDVSLGSTWLSDFPQAWAETGGMGLAVRQAPLIIPLKATSTPVSIKQYPMSQEARLGIKPHIQRLLDQGILVPCQSPWNTPLLPVKKPGTNDYRPVQDLREVNKRVEDIHPTVPNPYNLLSGLPPSHQWYTVLDLKDAFFCLRLHPTSQPLFAFEWRDPEMGISGQLTWTRLPQGFKNSPTLFNEALHRDLAGFRIQHPDLILLQYVDDLLLAATSELDCQQGTRALLQTLGDLGYRASAKKAQICQKQVKYLGYLLKEGQRWLTEARKETVMGQPIPKTPRQLREFLGTAGFCRLWIPGFAEMAAPLYPLTKPGTLFNWGPDQQKAFQEIKQALLTAPALGLPDLTKPFELFVDEKQGYAKGVLTQKLGPWRRPVAYLSKKLDPVAAGWPPCLRMVAAIAVLTKDAGKLTMGQPLVILAPHAVEALVKQPPDRWLSNARMTHYQALLLDTDRVQFGPVVALNPATLLPLPEEGLQHDCLDILAEAHGTRSDLMDQPLPDADHTWYTDGSSFLQEGQRKAGAAVTTETEVIWARALPAGTSAQRAELIALTQALKMAEGKKLNVYTDSRYAFATAHIHGEIYRRRGWLTSEGKEIKNKDEILALLKALFLPKRLSIIHCPGHQKGNSAEARGNRMADQAAREVATRETPETSTLLAGKRTADGSEFEKRTADGSEFESPKKKAKVE

SEQ ID NO: 2226 - protein, 2100 aa, synthetic construct
MPAAKRVKLDGGDKKYSIGLDIGTNSVGWAVITDEYKVPSKKFKVLGNTDRHSIKKNLIGALLFDSGETAEATRLKRTARRRYTRRKNRICYLQEIFSNEMAKVDDSFFHRLEESFLVEEDKKHERHPIFGNIVDEVAYHEKYPTIYHLRKKLVDSTDKADLRLIYLALAHMIKFRGHFLIEGDLNPDNSDVDKLFIQLVQTYNQLFEENPINASGVDAKAILSARLSKSRRLENLIAQLPGEKKNGLFGNLIALSLGLTPNFKSNFDLAEDAKLQLSKDTYDDDLDNLLAQIGDQYADLFLAAKNLSDAILLSDILRVNTEITKAPLSASMIKRYDEHHQDLTLLKALVRQQLPEKYKEIFFDQSKNGYAGYIDGGASQEEFYKFIKPILEKMDGTEELLVKLNREDLLRKQRTFDNGSIPHQIHLGELHAILRRQEDFYPFLKDNREKIEKILTFRIPYYVGPLARGNSRFAWMTRKSEETITPWNFEEVVDKGASAQSFIERMTNFDKNLPNEKVLPKHSLLYEYFTVYNELTKVKYVTEGMRKPAFLSGEQKKAIVDLLFKTNRKVTVKQLKEDYFKKIECFDSVEISGVEDRFNASLGTYHDLLKIIKDKDFLDNEENEDILEDIVLTLTLFEDREMIEERLKTYAHLFDDKVMKQLKRRRYTGWGRLSRKLINGIRDKQSGKTILDFLKSDGFANRNFMQLIHDDSLTFKEDIQKAQVSGQGDSLHEHIANLAGSPAIKKGILQTVKVVDELVKVMGRHKPENIVIEMARENQTTQKGQKNSRERMKRIEEGIKELGSQILKEHPVENTQLQNEKLYLYYLQNGRDMYVDQELDINRLSDYDVDHIVPQSFLKDDSIDNKVLTRSDKARGKSDNVPSEEVVKKMKNYWRQLLNAKLITQRKFDNLTKAERGGLSELDKAGFIKRQLVETRQITKHVAQILDSRMNTKYDENDKLIREVKVITLKSKLVSDFRKDFQFYKVREINNYHHAHDAYLNAVVGTALIKKYPKLESEFVYGDYKVYDVRKMIAKSEQEIGKATAKYFFYSNIMNFFKTEITLANGEIRKRPLIETNGETGEIVWDKGRDFATVRKVLSMPQVNIVKKTEVQTGGFSKESILPKRNSDKLIARKKDWDPKKYGGFDSPTVAYSVLVVAKVEKGKSKKLKSVKELLGITIMERSSFEKNPIDFLEAKGYKEVKKDLIIKLPKYSLFELENGRKRMLASAGELQKGNELALPSKYVNFLYLASHYEKLKGSPEDNEQKQLFVEQHKHYLDEIIEQISEFSKRVILADANLDKVLSAYNKHRDKPIREQAENIIHLFTLTNLGAPAAFKYFDTTIDRKRYTSTKEVLDATLIHQSITGLYETRIDLSQLGGDGGEAAAKGGGGSEAAAKGGTLNIEDEYRLHETSKEPDVSLGSTWLSDFPQAWAETGGMGLAVRQAPLIIPLKATSTPVSIKQYPMSQEARLGIKPHIQRLLDQGILVPCQSPWNTPLLPVKKPGTNDYRPVQDLREVNKRVEDIHPTVPNPYNLLSGLPPSHQWYTVLDLKDAFFCLRLHPTSQPLFAFEWRDPEMGISGQLTWTRLPQGFKNSPTLFNEALHRDLAGFRIQHPDLILLQYVDDLLLAATSELDCQQGTRALLQTLGDLGYRASAKKAQICQKQVKYLGYLLKEGQRWLTEARKETVMGQPIPKTPRQLREFLGTAGFCRLWIPGFAEMAAPLYPLTKPGTLFNWGPDQQKAFQEIKQALLTAPALGLPDLTKPFELFVDEKQGYAKGVLTQKLGPWRRPVAYLSKKLDPVAAGWPPCLRMVAAIAVLTKDAGKLTMGQPLVILAPHAVEALVKQPPDRWLSNARMTHYQALLLDTDRVQFGPVVALNPATLLPLPEEGLQHDCLDILAEAHGTRSDLMDQPLPDADHTWYTDGSSFLQEGQRKAGAAVTTETEVIWARALPAGTSAQRAELIALTQALKMAEGKKLNVYTDSRYAFATAHIHGEIYRRRGWLTSEGKEIKNKDEILALLKALFLPKRLSIIHCPGHQKGNSAEARGNRMADQAAREVATRETPETSTLLAGKRTADGSEFEKRTADGSEFESPKKKAKVE

SEQ ID NO: 2227 - protein, 2091 aa, synthetic construct
MPAAKRVKLDGGDKKYSIGLDIGTNSVGWAVITDEYKVPSKKFKVLGNTDRHSIKKNLIGALLFDSGETAEATRLKRTARRRYTRRKNRICYLQEIFSNEMAKVDDSFFHRLEESFLVEEDKKHERHPIFGNIVDEVAYHEKYPTIYHLRKKLVDSTDKADLRLIYLALAHMIKFRGHFLIEGDLNPDNSDVDKLFIQLVQTYNQLFEENPINASGVDAKAILSARLSKSRRLENLIAQLPGEKKNGLFGNLIALSLGLTPNFKSNFDLAEDAKLQLSKDTYDDDLDNLLAQIGDQYADLFLAAKNLSDAILLSDILRVNTEITKAPLSASMIKRYDEHHQDLTLLKALVRQQLPEKYKEIFFDQSKNGYAGYIDGGASQEEFYKFIKPILEKMDGTEELLVKLNREDLLRKQRTFDNGSIPHQIHLGELHAILRRQEDFYPFLKDNREKIEKILTFRIPYYVGPLARGNSRFAWMTRKSEETITPWNFEEVVDKGASAQSFIERMTNFDKNLPNEKVLPKHSLLYEYFTVYNELTKVKYVTEGMRKPAFLSGEQKKAIVDLLFKTNRKVTVKQLKEDYFKKIECFDSVEISGVEDRFNASLGTYHDLLKIIKDKDFLDNEENEDILEDIVLTLTLFEDREMIEERLKTYAHLFDDKVMKQLKRRRYTGWGRLSRKLINGIRDKQSGKTILDFLKSDGFANRNFMQLIHDDSLTFKEDIQKAQVSGQGDSLHEHIANLAGSPAIKKGILQTVKVVDELVKVMGRHKPENIVIEMARENQTTQKGQKNSRERMKRIEEGIKELGSQILKEHPVENTQLQNEKLYLYYLQNGRDMYVDQELDINRLSDYDVDHIVPQSFLKDDSIDNKVLTRSDKARGKSDNVPSEEVVKKMKNYWRQLLNAKLITQRKFDNLTKAERGGLSELDKAGFIKRQLVETRQITKHVAQILDSRMNTKYDENDKLIREVKVITLKSKLVSDFRKDFQFYKVREINNYHHAHDAYLNAVVGTALIKKYPKLESEFVYGDYKVYDVRKMIAKSEQEIGKATAKYFFYSNIMNFFKTEITLANGEIRKRPLIETNGETGEIVWDKGRDFATVRKVLSMPQVNIVKKTEVQTGGFSKESILPKRNSDKLIARKKDWDPKKYGGFDSPTVAYSVLVVAKVEKGKSKKLKSVKELLGITIMERSSFEKNPIDFLEAKGYKEVKKDLIIKLPKYSLFELENGRKRMLASAGELQKGNELALPSKYVNFLYLASHYEKLKGSPEDNEQKQLFVEQHKHYLDEIIEQISEFSKRVILADANLDKVLSAYNKHRDKPIREQAENIIHLFTLTNLGAPAAFKYFDTTIDRKRYTSTKEVLDATLIHQSITGLYETRIDLSQLGGDGGGSSGSSGGTLNIEDEYRLHETSKEPDVSLGSTWLSDFPQAWAETGGMGLAVRQAPLIIPLKATSTPVSIKQYPMSQEARLGIKPHIQRLLDQGILVPCQSPWNTPLLPVKKPGTNDYRPVQDLREVNKRVEDIHPTVPNPYNLLSGLPPSHQWYTVLDLKDAFFCLRLHPTSQPLFAFEWRDPEMGISGQLTWTRLPQGFKNSPTLFNEALHRDLAGFRIQHPDLILLQYVDDLLLAATSELDCQQGTRALLQTLGDLGYRASAKKAQICQKQVKYLGYLLKEGQRWLTEARKETVMGQPIPKTPRQLREFLGTAGFCRLWIPGFAEMAAPLYPLTKPGTLFNWGPDQQKAFQEIKQALLTAPALGLPDLTKPFELFVDEKQGYAKGVLTQKLGPWRRPVAYLSKKLDPVAAGWPPCLRMVAAIAVLTKDAGKLTMGQPLVILAPHAVEALVKQPPDRWLSNARMTHYQALLLDTDRVQFGPVVALNPATLLPLPEEGLQHDCLDILAEAHGTRSDLMDQPLPDADHTWYTDGSSFLQEGQRKAGAAVTTETEVIWARALPAGTSAQRAELIALTQALKMAEGKKLNVYTDSRYAFATAHIHGEIYRRRGWLTSEGKEIKNKDEILALLKALFLPKRLSIIHCPGHQKGNSAEARGNRMADQAAREVATRETPETSTLLAGKRTADGSEFEKRTADGSEFESPKKKAKVE

SEQ ID NO: 2228-2230 - skipped (3 entries)

SEQ ID NO: 2231 - protein, 2094 aa, synthetic construct
MPAAKRVKLDGGDKKYSIGLDIGTNSVGWAVITDEYKVPSKKFKVLGNTDRHSIKKNLIGALLFDSGETAEATRLKRTARRRYTRRKNRICYLQEIFSNEMAKVDDSFFHRLEESFLVEEDKKHERHPIFGNIVDEVAYHEKYPTIYHLRKKLVDSTDKADLRLIYLALAHMIKFRGHFLIEGDLNPDNSDVDKLFIQLVQTYNQLFEENPINASGVDAKAILSARLSKSRRLENLIAQLPGEKKNGLFGNLIALSLGLTPNFKSNFDLAEDAKLQLSKDTYDDDLDNLLAQIGDQYADLFLAAKNLSDAILLSDILRVNTEITKAPLSASMIKRYDEHHQDLTLLKALVRQQLPEKYKEIFFDQSKNGYAGYIDGGASQEEFYKFIKPILEKMDGTEELLVKLNREDLLRKQRTFDNGSIPHQIHLGELHAILRRQEDFYPFLKDNREKIEKILTFRIPYYVGPLARGNSRFAWMTRKSEETITPWNFEEVVDKGASAQSFIERMTNFDKNLPNEKVLPKHSLLYEYFTVYNELTKVKYVTEGMRKPAFLSGEQKKAIVDLLFKTNRKVTVKQLKEDYFKKIECFDSVEISGVEDRFNASLGTYHDLLKIIKDKDFLDNEENEDILEDIVLTLTLFEDREMIEERLKTYAHLFDDKVMKQLKRRRYTGWGRLSRKLINGIRDKQSGKTILDFLKSDGFANRNFMQLIHDDSLTFKEDIQKAQVSGQGDSLHEHIANLAGSPAIKKGILQTVKVVDELVKVMGRHKPENIVIEMARENQTTQKGQKNSRERMKRIEEGIKELGSQILKEHPVENTQLQNEKLYLYYLQNGRDMYVDQELDINRLSDYDVDHIVPQSFLKDDSIDNKVLTRSDKARGKSDNVPSEEVVKKMKNYWRQLLNAKLITQRKFDNLTKAERGGLSELDKAGFIKRQLVETRQITKHVAQILDSRMNTKYDENDKLIREVKVITLKSKLVSDFRKDFQFYKVREINNYHHAHDAYLNAVVGTALIKKYPKLESEFVYGDYKVYDVRKMIAKSEQEIGKATAKYFFYSNIMNFFKTEITLANGEIRKRPLIETNGETGEIVWDKGRDFATVRKVLSMPQVNIVKKTEVQTGGFSKESILPKRNSDKLIARKKDWDPKKYGGFDSPTVAYSVLVVAKVEKGKSKKLKSVKELLGITIMERSSFEKNPIDFLEAKGYKEVKKDLIIKLPKYSLFELENGRKRMLASAGELQKGNELALPSKYVNFLYLASHYEKLKGSPEDNEQKQLFVEQHKHYLDEIIEQISEFSKRVILADANLDKVLSAYNKHRDKPIREQAENIIHLFTLTNLGAPAAFKYFDTTIDRKRYTSTKEVLDATLIHQSITGLYETRIDLSQLGGDGGGGGGGSGSSGGTLNIEDEYRLHETSKEPDVSLGSTWLSDFPQAWAETGGMGLAVRQAPLIIPLKATSTPVSIKQYPMSQEARLGIKPHIQRLLDQGILVPCQSPWNTPLLPVKKPGTNDYRPVQDLREVNKRVEDIHPTVPNPYNLLSGLPPSHQWYTVLDLKDAFFCLRLHPTSQPLFAFEWRDPEMGISGQLTWTRLPQGFKNSPTLFNEALHRDLAGFRIQHPDLILLQYVDDLLLAATSELDCQQGTRALLQTLGDLGYRASAKKAQICQKQVKYLGYLLKEGQRWLTEARKETVMGQPIPKTPRQLREFLGTAGFCRLWIPGFAEMAAPLYPLTKPGTLFNWGPDQQKAFQEIKQALLTAPALGLPDLTKPFELFVDEKQGYAKGVLTQKLGPWRRPVAYLSKKLDPVAAGWPPCLRMVAAIAVLTKDAGKLTMGQPLVILAPHAVEALVKQPPDRWLSNARMTHYQALLLDTDRVQFGPVVALNPATLLPLPEEGLQHDCLDILAEAHGTRSDLMDQPLPDADHTWYTDGSSFLQEGQRKAGAAVTTETEVIWARALPAGTSAQRAELIALTQALKMAEGKKLNVYTDSRYAFATAHIHGEIYRRRGWLTSEGKEIKNKDEILALLKALFLPKRLSIIHCPGHQKGNSAEARGNRMADQAAREVATRETPETSTLLAGKRTADGSEFEKRTADGSEFESPKKKAKVE

SEQ ID NO: 2232-2234 - skipped (3 entries)

SEQ ID NO: 2235 - protein, 2096 aa, synthetic construct
MPAAKRVKLDGGDKKYSIGLDIGTNSVGWAVITDEYKVPSKKFKVLGNTDRHSIKKNLIGALLFDSGETAEATRLKRTARRRYTRRKNRICYLQEIFSNEMAKVDDSFFHRLEESFLVEEDKKHERHPIFGNIVDEVAYHEKYPTIYHLRKKLVDSTDKADLRLIYLALAHMIKFRGHFLIEGDLNPDNSDVDKLFIQLVQTYNQLFEENPINASGVDAKAILSARLSKSRRLENLIAQLPGEKKNGLFGNLIALSLGLTPNFKSNFDLAEDAKLQLSKDTYDDDLDNLLAQIGDQYADLFLAAKNLSDAILLSDILRVNTEITKAPLSASMIKRYDEHHQDLTLLKALVRQQLPEKYKEIFFDQSKNGYAGYIDGGASQEEFYKFIKPILEKMDGTEELLVKLNREDLLRKQRTFDNGSIPHQIHLGELHAILRRQEDFYPFLKDNREKIEKILTFRIPYYVGPLARGNSRFAWMTRKSEETITPWNFEEVVDKGASAQSFIERMTNFDKNLPNEKVLPKHSLLYEYFTVYNELTKVKYVTEGMRKPAFLSGEQKKAIVDLLFKTNRKVTVKQLKEDYFKKIECFDSVEISGVEDRFNASLGTYHDLLKIIKDKDFLDNEENEDILEDIVLTLTLFEDREMIEERLKTYAHLFDDKVMKQLKRRRYTGWGRLSRKLINGIRDKQSGKTILDFLKSDGFANRNFMQLIHDDSLTFKEDIQKAQVSGQGDSLHEHIANLAGSPAIKKGILQTVKVVDELVKVMGRHKPENIVIEMARENQTTQKGQKNSRERMKRIEEGIKELGSQILKEHPVENTQLQNEKLYLYYLQNGRDMYVDQELDINRLSDYDVDHIVPQSFLKDDSIDNKVLTRSDKARGKSDNVPSEEVVKKMKNYWRQLLNAKLITQRKFDNLTKAERGGLSELDKAGFIKRQLVETRQITKHVAQILDSRMNTKYDENDKLIREVKVITLKSKLVSDFRKDFQFYKVREINNYHHAHDAYLNAVVGTALIKKYPKLESEFVYGDYKVYDVRKMIAKSEQEIGKATAKYFFYSNIMNFFKTEITLANGEIRKRPLIETNGETGEIVWDKGRDFATVRKVLSMPQVNIVKKTEVQTGGFSKESILPKRNSDKLIARKKDWDPKKYGGFDSPTVAYSVLVVAKVEKGKSKKLKSVKELLGITIMERSSFEKNPIDFLEAKGYKEVKKDLIIKLPKYSLFELENGRKRMLASAGELQKGNELALPSKYVNFLYLASHYEKLKGSPEDNEQKQLFVEQHKHYLDEIIEQISEFSKRVILADANLDKVLSAYNKHRDKPIREQAENIIHLFTLTNLGAPAAFKYFDTTIDRKRYTSTKEVLDATLIHQSITGLYETRIDLSQLGGDGGEAAAKGSSPAPGGTLNIEDEYRLHETSKEPDVSLGSTWLSDFPQAWAETGGMGLAVRQAPLIIPLKATSTPVSIKQYPMSQEARLGIKPHIQRLLDQGILVPCQSPWNTPLLPVKKPGTNDYRPVQDLREVNKRVEDIHPTVPNPYNLLSGLPPSHQWYTVLDLKDAFFCLRLHPTSQPLFAFEWRDPEMGISGQLTWTRLPQGFKNSPTLFNEALHRDLAGFRIQHPDLILLQYVDDLLLAATSELDCQQGTRALLQTLGDLGYRASAKKAQICQKQVKYLGYLLKEGQRWLTEARKETVMGQPIPKTPRQLREFLGTAGFCRLWIPGFAEMAAPLYPLTKPGTLFNWGPDQQKAFQEIKQALLTAPALGLPDLTKPFELFVDEKQGYAKGVLTQKLGPWRRPVAYLSKKLDPVAAGWPPCLRMVAAIAVLTKDAGKLTMGQPLVILAPHAVEALVKQPPDRWLSNARMTHYQALLLDTDRVQFGPVVALNPATLLPLPEEGLQHDCLDILAEAHGTRSDLMDQPLPDADHTWYTDGSSFLQEGQRKAGAAVTTETEVIWARALPAGTSAQRAELIALTQALKMAEGKKLNVYTDSRYAFATAHIHGEIYRRRGWLTSEGKEIKNKDEILALLKALFLPKRLSIIHCPGHQKGNSAEARGNRMADQAAREVATRETPETSTLLAGKRTADGSEFEKRTADGSEFESPKKKAKVE

SEQ ID NO: 2236 - protein, 2095 aa, synthetic construct
MPAAKRVKLDGGDKKYSIGLDIGTNSVGWAVITDEYKVPSKKFKVLGNTDRHSIKKNLIGALLFDSGETAEATRLKRTARRRYTRRKNRICYLQEIFSNEMAKVDDSFFHRLEESFLVEEDKKHERHPIFGNIVDEVAYHEKYPTIYHLRKKLVDSTDKADLRLIYLALAHMIKFRGHFLIEGDLNPDNSDVDKLFIQLVQTYNQLFEENPINASGVDAKAILSARLSKSRRLENLIAQLPGEKKNGLFGNLIALSLGLTPNFKSNFDLAEDAKLQLSKDTYDDDLDNLLAQIGDQYADLFLAAKNLSDAILLSDILRVNTEITKAPLSASMIKRYDEHHQDLTLLKALVRQQLPEKYKEIFFDQSKNGYAGYIDGGASQEEFYKFIKPILEKMDGTEELLVKLNREDLLRKQRTFDNGSIPHQIHLGELHAILRRQEDFYPFLKDNREKIEKILTFRIPYYVGPLARGNSRFAWMTRKSEETITPWNFEEVVDKGASAQSFIERMTNFDKNLPNEKVLPKHSLLYEYFTVYNELTKVKYVTEGMRKPAFLSGEQKKAIVDLLFKTNRKVTVKQLKEDYFKKIECFDSVEISGVEDRFNASLGTYHDLLKIIKDKDFLDNEENEDILEDIVLTLTLFEDREMIEERLKTYAHLFDDKVMKQLKRRRYTGWGRLSRKLINGIRDKQSGKTILDFLKSDGFANRNFMQLIHDDSLTFKEDIQKAQVSGQGDSLHEHIANLAGSPAIKKGILQTVKVVDELVKVMGRHKPENIVIEMARENQTTQKGQKNSRERMKRIEEGIKELGSQILKEHPVENTQLQNEKLYLYYLQNGRDMYVDQELDINRLSDYDVDHIVPQSFLKDDSIDNKVLTRSDKARGKSDNVPSEEVVKKMKNYWRQLLNAKLITQRKFDNLTKAERGGLSELDKAGFIKRQLVETRQITKHVAQILDSRMNTKYDENDKLIREVKVITLKSKLVSDFRKDFQFYKVREINNYHHAHDAYLNAVVGTALIKKYPKLESEFVYGDYKVYDVRKMIAKSEQEIGKATAKYFFYSNIMNFFKTEITLANGEIRKRPLIETNGETGEIVWDKGRDFATVRKVLSMPQVNIVKKTEVQTGGFSKESILPKRNSDKLIARKKDWDPKKYGGFDSPTVAYSVLVVAKVEKGKSKKLKSVKELLGITIMERSSFEKNPIDFLEAKGYKEVKKDLIIKLPKYSLFELENGRKRMLASAGELQKGNELALPSKYVNFLYLASHYEKLKGSPEDNEQKQLFVEQHKHYLDEIIEQISEFSKRVILADANLDKVLSAYNKHRDKPIREQAENIIHLFTLTNLGAPAAFKYFDTTIDRKRYTSTKEVLDATLIHQSITGLYETRIDLSQLGGDGGEAAAKEAAAKGGTLNIEDEYRLHETSKEPDVSLGSTWLSDFPQAWAETGGMGLAVRQAPLIIPLKATSTPVSIKQYPMSQEARLGIKPHIQRLLDQGILVPCQSPWNTPLLPVKKPGTNDYRPVQDLREVNKRVEDIHPTVPNPYNLLSGLPPSHQWYTVLDLKDAFFCLRLHPTSQPLFAFEWRDPEMGISGQLTWTRLPQGFKNSPTLFNEALHRDLAGFRIQHPDLILLQYVDDLLLAATSELDCQQGTRALLQTLGDLGYRASAKKAQICQKQVKYLGYLLKEGQRWLTEARKETVMGQPIPKTPRQLREFLGTAGFCRLWIPGFAEMAAPLYPLTKPGTLFNWGPDQQKAFQEIKQALLTAPALGLPDLTKPFELFVDEKQGYAKGVLTQKLGPWRRPVAYLSKKLDPVAAGWPPCLRMVAAIAVLTKDAGKLTMGQPLVILAPHAVEALVKQPPDRWLSNARMTHYQALLLDTDRVQFGPVVALNPATLLPLPEEGLQHDCLDILAEAHGTRSDLMDQPLPDADHTWYTDGSSFLQEGQRKAGAAVTTETEVIWARALPAGTSAQRAELIALTQALKMAEGKKLNVYTDSRYAFATAHIHGEIYRRRGWLTSEGKEIKNKDEILALLKALFLPKRLSIIHCPGHQKGNSAEARGNRMADQAAREVATRETPETSTLLAGKRTADGSEFEKRTADGSEFESPKKKAKVE

SEQ ID NO: 2237-2248 - skipped (12 entries)

SEQ ID NO: 2249 - protein, 2115 aa, synthetic construct
MPAAKRVKLDGGDKKYSIGLDIGTNSVGWAVITDEYKVPSKKFKVLGNTDRHSIKKNLIGALLFDSGETAEATRLKRTARRRYTRRKNRICYLQEIFSNEMAKVDDSFFHRLEESFLVEEDKKHERHPIFGNIVDEVAYHEKYPTIYHLRKKLVDSTDKADLRLIYLALAHMIKFRGHFLIEGDLNPDNSDVDKLFIQLVQTYNQLFEENPINASGVDAKAILSARLSKSRRLENLIAQLPGEKKNGLFGNLIALSLGLTPNFKSNFDLAEDAKLQLSKDTYDDDLDNLLAQIGDQYADLFLAAKNLSDAILLSDILRVNTEITKAPLSASMIKRYDEHHQDLTLLKALVRQQLPEKYKEIFFDQSKNGYAGYIDGGASQEEFYKFIKPILEKMDGTEELLVKLNREDLLRKQRTFDNGSIPHQIHLGELHAILRRQEDFYPFLKDNREKIEKILTFRIPYYVGPLARGNSRFAWMTRKSEETITPWNFEEVVDKGASAQSFIERMTNFDKNLPNEKVLPKHSLLYEYFTVYNELTKVKYVTEGMRKPAFLSGEQKKAIVDLLFKTNRKVTVKQLKEDYFKKIECFDSVEISGVEDRFNASLGTYHDLLKIIKDKDFLDNEENEDILEDIVLTLTLFEDREMIEERLKTYAHLFDDKVMKQLKRRRYTGWGRLSRKLINGIRDKQSGKTILDFLKSDGFANRNFMQLIHDDSLTFKEDIQKAQVSGQGDSLHEHIANLAGSPAIKKGILQTVKVVDELVKVMGRHKPENIVIEMARENQTTQKGQKNSRERMKRIEEGIKELGSQILKEHPVENTQLQNEKLYLYYLQNGRDMYVDQELDINRLSDYDVDHIVPQSFLKDDSIDNKVLTRSDKARGKSDNVPSEEVVKKMKNYWRQLLNAKLITQRKFDNLTKAERGGLSELDKAGFIKRQLVETRQITKHVAQILDSRMNTKYDENDKLIREVKVITLKSKLVSDFRKDFQFYKVREINNYHHAHDAYLNAVVGTALIKKYPKLESEFVYGDYKVYDVRKMIAKSEQEIGKATAKYFFYSNIMNFFKTEITLANGEIRKRPLIETNGETGEIVWDKGRDFATVRKVLSMPQVNIVKKTEVQTGGFSKESILPKRNSDKLIARKKDWDPKKYGGFDSPTVAYSVLVVAKVEKGKSKKLKSVKELLGITIMERSSFEKNPIDFLEAKGYKEVKKDLIIKLPKYSLFELENGRKRMLASAGELQKGNELALPSKYVNFLYLASHYEKLKGSPEDNEQKQLFVEQHKHYLDEIIEQISEFSKRVILADANLDKVLSAYNKHRDKPIREQAENIIHLFTLTNLGAPAAFKYFDTTIDRKRYTSTKEVLDATLIHQSITGLYETRIDLSQLGGDGGEAAAKEAAAKEAAAKEAAAKEAAAKEAAAKGGTLNIEDEYRLHETSKEPDVSLGSTWLSDFPQAWAETGGMGLAVRQAPLIIPLKATSTPVSIKQYPMSQEARLGIKPHIQRLLDQGILVPCQSPWNTPLLPVKKPGTNDYRPVQDLREVNKRVEDIHPTVPNPYNLLSGLPPSHQWYTVLDLKDAFFCLRLHPTSQPLFAFEWRDPEMGISGQLTWTRLPQGFKNSPTLFNEALHRDLAGFRIQHPDLILLQYVDDLLLAATSELDCQQGTRALLQTLGDLGYRASAKKAQICQKQVKYLGYLLKEGQRWLTEARKETVMGQPIPKTPRQLREFLGTAGFCRLWIPGFAEMAAPLYPLTKPGTLFNWGPDQQKAFQEIKQALLTAPALGLPDLTKPFELFVDEKQGYAKGVLTQKLGPWRRPVAYLSKKLDPVAAGWPPCLRMVAAIAVLTKDAGKLTMGQPLVILAPHAVEALVKQPPDRWLSNARMTHYQALLLDTDRVQFGPVVALNPATLLPLPEEGLQHDCLDILAEAHGTRSDLMDQPLPDADHTWYTDGSSFLQEGQRKAGAAVTTETEVIWARALPAGTSAQRAELIALTQALKMAEGKKLNVYTDSRYAFATAHIHGEIYRRRGWLTSEGKEIKNKDEILALLKALFLPKRLSIIHCPGHQKGNSAEARGNRMADQAAREVATRETPETSTLLAGKRTADGSEFEKRTADGSEFESPKKKAKVE

SEQ ID NO: 2250-2279 - skipped (30 entries)

SEQ ID NO: 2280 - protein, 2100 aa, synthetic construct
MPAAKRVKLDGGDKKYSIGLDIGTNSVGWAVITDEYKVPSKKFKVLGNTDRHSIKKNLIGALLFDSGETAEATRLKRTARRRYTRRKNRICYLQEIFSNEMAKVDDSFFHRLEESFLVEEDKKHERHPIFGNIVDEVAYHEKYPTIYHLRKKLVDSTDKADLRLIYLALAHMIKFRGHFLIEGDLNPDNSDVDKLFIQLVQTYNQLFEENPINASGVDAKAILSARLSKSRRLENLIAQLPGEKKNGLFGNLIALSLGLTPNFKSNFDLAEDAKLQLSKDTYDDDLDNLLAQIGDQYADLFLAAKNLSDAILLSDILRVNTEITKAPLSASMIKRYDEHHQDLTLLKALVRQQLPEKYKEIFFDQSKNGYAGYIDGGASQEEFYKFIKPILEKMDGTEELLVKLNREDLLRKQRTFDNGSIPHQIHLGELHAILRRQEDFYPFLKDNREKIEKILTFRIPYYVGPLARGNSRFAWMTRKSEETITPWNFEEVVDKGASAQSFIERMTNFDKNLPNEKVLPKHSLLYEYFTVYNELTKVKYVTEGMRKPAFLSGEQKKAIVDLLFKTNRKVTVKQLKEDYFKKIECFDSVEISGVEDRFNASLGTYHDLLKIIKDKDFLDNEENEDILEDIVLTLTLFEDREMIEERLKTYAHLFDDKVMKQLKRRRYTGWGRLSRKLINGIRDKQSGKTILDFLKSDGFANRNFMQLIHDDSLTFKEDIQKAQVSGQGDSLHEHIANLAGSPAIKKGILQTVKVVDELVKVMGRHKPENIVIEMARENQTTQKGQKNSRERMKRIEEGIKELGSQILKEHPVENTQLQNEKLYLYYLQNGRDMYVDQELDINRLSDYDVDHIVPQSFLKDDSIDNKVLTRSDKARGKSDNVPSEEVVKKMKNYWRQLLNAKLITQRKFDNLTKAERGGLSELDKAGFIKRQLVETRQITKHVAQILDSRMNTKYDENDKLIREVKVITLKSKLVSDFRKDFQFYKVREINNYHHAHDAYLNAVVGTALIKKYPKLESEFVYGDYKVYDVRKMIAKSEQEIGKATAKYFFYSNIMNFFKTEITLANGEIRKRPLIETNGETGEIVWDKGRDFATVRKVLSMPQVNIVKKTEVQTGGFSKESILPKRNSDKLIARKKDWDPKKYGGFDSPTVAYSVLVVAKVEKGKSKKLKSVKELLGITIMERSSFEKNPIDFLEAKGYKEVKKDLIIKLPKYSLFELENGRKRMLASAGELQKGNELALPSKYVNFLYLASHYEKLKGSPEDNEQKQLFVEQHKHYLDEIIEQISEFSKRVILADANLDKVLSAYNKHRDKPIREQAENIIHLFTLTNLGAPAAFKYFDTTIDRKRYTSTKEVLDATLIHQSITGLYETRIDLSQLGGDGGGSSGSSGSSGSSGSSGGTLNIEDEYRLHETSKEPDVSLGSTWLSDFPQAWAETGGMGLAVRQAPLIIPLKATSTPVSIKQYPMSQEARLGIKPHIQRLLDQGILVPCQSPWNTPLLPVKKPGTNDYRPVQDLREVNKRVEDIHPTVPNPYNLLSGLPPSHQWYTVLDLKDAFFCLRLHPTSQPLFAFEWRDPEMGISGQLTWTRLPQGFKNSPTLFNEALHRDLAGFRIQHPDLILLQYVDDLLLAATSELDCQQGTRALLQTLGDLGYRASAKKAQICQKQVKYLGYLLKEGQRWLTEARKETVMGQPIPKTPRQLREFLGTAGFCRLWIPGFAEMAAPLYPLTKPGTLFNWGPDQQKAFQEIKQALLTAPALGLPDLTKPFELFVDEKQGYAKGVLTQKLGPWRRPVAYLSKKLDPVAAGWPPCLRMVAAIAVLTKDAGKLTMGQPLVILAPHAVEALVKQPPDRWLSNARMTHYQALLLDTDRVQFGPVVALNPATLLPLPEEGLQHDCLDILAEAHGTRSDLMDQPLPDADHTWYTDGSSFLQEGQRKAGAAVTTETEVIWARALPAGTSAQRAELIALTQALKMAEGKKLNVYTDSRYAFATAHIHGEIYRRRGWLTSEGKEIKNKDEILALLKALFLPKRLSIIHCPGHQKGNSAEARGNRMADQAAREVATRETPETSTLLAGKRTADGSEFEKRTADGSEFESPKKKAKVE

SEQ ID NO: 2281-2298 - skipped (18 entries)

SEQ ID NO: 2299 - protein, 2088 aa, synthetic construct
MPAAKRVKLDGGDKKYSIGLDIGTNSVGWAVITDEYKVPSKKFKVLGNTDRHSIKKNLIGALLFDSGETAEATRLKRTARRRYTRRKNRICYLQEIFSNEMAKVDDSFFHRLEESFLVEEDKKHERHPIFGNIVDEVAYHEKYPTIYHLRKKLVDSTDKADLRLIYLALAHMIKFRGHFLIEGDLNPDNSDVDKLFIQLVQTYNQLFEENPINASGVDAKAILSARLSKSRRLENLIAQLPGEKKNGLFGNLIALSLGLTPNFKSNFDLAEDAKLQLSKDTYDDDLDNLLAQIGDQYADLFLAAKNLSDAILLSDILRVNTEITKAPLSASMIKRYDEHHQDLTLLKALVRQQLPEKYKEIFFDQSKNGYAGYIDGGASQEEFYKFIKPILEKMDGTEELLVKLNREDLLRKQRTFDNGSIPHQIHLGELHAILRRQEDFYPFLKDNREKIEKILTFRIPYYVGPLARGNSRFAWMTRKSEETITPWNFEEVVDKGASAQSFIERMTNFDKNLPNEKVLPKHSLLYEYFTVYNELTKVKYVTEGMRKPAFLSGEQKKAIVDLLFKTNRKVTVKQLKEDYFKKIECFDSVEISGVEDRFNASLGTYHDLLKIIKDKDFLDNEENEDILEDIVLTLTLFEDREMIEERLKTYAHLFDDKVMKQLKRRRYTGWGRLSRKLINGIRDKQSGKTILDFLKSDGFANRNFMQLIHDDSLTFKEDIQKAQVSGQGDSLHEHIANLAGSPAIKKGILQTVKVVDELVKVMGRHKPENIVIEMARENQTTQKGQKNSRERMKRIEEGIKELGSQILKEHPVENTQLQNEKLYLYYLQNGRDMYVDQELDINRLSDYDVDHIVPQSFLKDDSIDNKVLTRSDKARGKSDNVPSEEVVKKMKNYWRQLLNAKLITQRKFDNLTKAERGGLSELDKAGFIKRQLVETRQITKHVAQILDSRMNTKYDENDKLIREVKVITLKSKLVSDFRKDFQFYKVREINNYHHAHDAYLNAVVGTALIKKYPKLESEFVYGDYKVYDVRKMIAKSEQEIGKATAKYFFYSNIMNFFKTEITLANGEIRKRPLIETNGETGEIVWDKGRDFATVRKVLSMPQVNIVKKTEVQTGGFSKESILPKRNSDKLIARKKDWDPKKYGGFDSPTVAYSVLVVAKVEKGKSKKLKSVKELLGITIMERSSFEKNPIDFLEAKGYKEVKKDLIIKLPKYSLFELENGRKRMLASAGELQKGNELALPSKYVNFLYLASHYEKLKGSPEDNEQKQLFVEQHKHYLDEIIEQISEFSKRVILADANLDKVLSAYNKHRDKPIREQAENIIHLFTLTNLGAPAAFKYFDTTIDRKRYTSTKEVLDATLIHQSITGLYETRIDLSQLGGDGGPAPGGTLNIEDEYRLHETSKEPDVSLGSTWLSDFPQAWAETGGMGLAVRQAPLIIPLKATSTPVSIKQYPMSQEARLGIKPHIQRLLDQGILVPCQSPWNTPLLPVKKPGTNDYRPVQDLREVNKRVEDIHPTVPNPYNLLSGLPPSHQWYTVLDLKDAFFCLRLHPTSQPLFAFEWRDPEMGISGQLTWTRLPQGFKNSPTLFNEALHRDLAGFRIQHPDLILLQYVDDLLLAATSELDCQQGTRALLQTLGDLGYRASAKKAQICQKQVKYLGYLLKEGQRWLTEARKETVMGQPIPKTPRQLREFLGKAGFCRLFIPGFAEMAAPLYPLTKPGTLFNWGPDQQKAFQEIKQALLTAPALGLPDLTKPFELFVDEKQGYAKGVLTQKLGPWRRPVAYLSKKLDPVAAGWPPCLRMVAAIAVLTKDAGKLTMGQPLVILAPHAVEALVKQPPDRWLSNARMTHYQALLLDTDRVQFGPVVALNPATLLPLPEEGLQHDCLDILAEAHGTRSDLMDQPLPDADHTWYTDGSSFLQEGQRKAGAAVTTETEVIWARALPAGTSAQRAELIALTQALKMAEGKKLNVYTDSRYAFATAHIHGEIYRRRGWLTSEGKEIKNKDEILALLKALFLPKRLSIIHCPGHQKGNSAEARGNRMADQAAREVATRETPETSTLLAGKRTADGSEFEKRTADGSEFESPKKKAKVE

SEQ ID NO: 2300 - protein, 2103 aa, synthetic construct
MPAAKRVKLDGGDKKYSIGLDIGTNSVGWAVITDEYKVPSKKFKVLGNTDRHSIKKNLIGALLFDSGETAEATRLKRTARRRYTRRKNRICYLQEIFSNEMAKVDDSFFHRLEESFLVEEDKKHERHPIFGNIVDEVAYHEKYPTIYHLRKKLVDSTDKADLRLIYLALAHMIKFRGHFLIEGDLNPDNSDVDKLFIQLVQTYNQLFEENPINASGVDAKAILSARLSKSRRLENLIAQLPGEKKNGLFGNLIALSLGLTPNFKSNFDLAEDAKLQLSKDTYDDDLDNLLAQIGDQYADLFLAAKNLSDAILLSDILRVNTEITKAPLSASMIKRYDEHHQDLTLLKALVRQQLPEKYKEIFFDQSKNGYAGYIDGGASQEEFYKFIKPILEKMDGTEELLVKLNREDLLRKQRTFDNGSIPHQIHLGELHAILRRQEDFYPFLKDNREKIEKILTFRIPYYVGPLARGNSRFAWMTRKSEETITPWNFEEVVDKGASAQSFIERMTNFDKNLPNEKVLPKHSLLYEYFTVYNELTKVKYVTEGMRKPAFLSGEQKKAIVDLLFKTNRKVTVKQLKEDYFKKIECFDSVEISGVEDRFNASLGTYHDLLKIIKDKDFLDNEENEDILEDIVLTLTLFEDREMIEERLKTYAHLFDDKVMKQLKRRRYTGWGRLSRKLINGIRDKQSGKTILDFLKSDGFANRNFMQLIHDDSLTFKEDIQKAQVSGQGDSLHEHIANLAGSPAIKKGILQTVKVVDELVKVMGRHKPENIVIEMARENQTTQKGQKNSRERMKRIEEGIKELGSQILKEHPVENTQLQNEKLYLYYLQNGRDMYVDQELDINRLSDYDVDHIVPQSFLKDDSIDNKVLTRSDKARGKSDNVPSEEVVKKMKNYWRQLLNAKLITQRKFDNLTKAERGGLSELDKAGFIKRQLVETRQITKHVAQILDSRMNTKYDENDKLIREVKVITLKSKLVSDFRKDFQFYKVREINNYHHAHDAYLNAVVGTALIKKYPKLESEFVYGDYKVYDVRKMIAKSEQEIGKATAKYFFYSNIMNFFKTEITLANGEIRKRPLIETNGETGEIVWDKGRDFATVRKVLSMPQVNIVKKTEVQTGGFSKESILPKRNSDKLIARKKDWDPKKYGGFDSPTVAYSVLVVAKVEKGKSKKLKSVKELLGITIMERSSFEKNPIDFLEAKGYKEVKKDLIIKLPKYSLFELENGRKRMLASAGELQKGNELALPSKYVNFLYLASHYEKLKGSPEDNEQKQLFVEQHKHYLDEIIEQISEFSKRVILADANLDKVLSAYNKHRDKPIREQAENIIHLFTLTNLGAPAAFKYFDTTIDRKRYTSTKEVLDATLIHQSITGLYETRIDLSQLGGDGGGGSGGSGGSGGSGGSGGSGGTLNIEDEYRLHETSKEPDVSLGSTWLSDFPQAWAETGGMGLAVRQAPLIIPLKATSTPVSIKQYPMSQEARLGIKPHIQRLLDQGILVPCQSPWNTPLLPVKKPGTNDYRPVQDLREVNKRVEDIHPTVPNPYNLLSGLPPSHQWYTVLDLKDAFFCLRLHPTSQPLFAFEWRDPEMGISGQLTWTRLPQGFKNSPTLFNEALHRDLAGFRIQHPDLILLQYVDDLLLAATSELDCQQGTRALLQTLGDLGYRASAKKAQICQKQVKYLGYLLKEGQRWLTEARKETVMGQPIPKTPRQLREFLGKAGFCRLFIPGFAEMAAPLYPLTKPGTLFNWGPDQQKAFQEIKQALLTAPALGLPDLTKPFELFVDEKQGYAKGVLTQKLGPWRRPVAYLSKKLDPVAAGWPPCLRMVAAIAVLTKDAGKLTMGQPLVILAPHAVEALVKQPPDRWLSNARMTHYQALLLDTDRVQFGPVVALNPATLLPLPEEGLQHDCLDILAEAHGTRSDLMDQPLPDADHTWYTDGSSFLQEGQRKAGAAVTTETEVIWARALPAGTSAQRAELIALTQALKMAEGKKLNVYTDSRYAFATAHIHGEIYRRRGWLTSEGKEIKNKDEILALLKALFLPKRLSIIHCPGHQKGNSAEARGNRMADQAAREVATRETPETSTLLAGKRTADGSEFEKRTADGSEFESPKKKAKVE

SEQ ID NO: 2301 - protein, 2096 aa, synthetic construct
MPAAKRVKLDGGDKKYSIGLDIGTNSVGWAVITDEYKVPSKKFKVLGNTDRHSIKKNLIGALLFDSGETAEATRLKRTARRRYTRRKNRICYLQEIFSNEMAKVDDSFFHRLEESFLVEEDKKHERHPIFGNIVDEVAYHEKYPTIYHLRKKLVDSTDKADLRLIYLALAHMIKFRGHFLIEGDLNPDNSDVDKLFIQLVQTYNQLFEENPINASGVDAKAILSARLSKSRRLENLIAQLPGEKKNGLFGNLIALSLGLTPNFKSNFDLAEDAKLQLSKDTYDDDLDNLLAQIGDQYADLFLAAKNLSDAILLSDILRVNTEITKAPLSASMIKRYDEHHQDLTLLKALVRQQLPEKYKEIFFDQSKNGYAGYIDGGASQEEFYKFIKPILEKMDGTEELLVKLNREDLLRKQRTFDNGSIPHQIHLGELHAILRRQEDFYPFLKDNREKIEKILTFRIPYYVGPLARGNSRFAWMTRKSEETITPWNFEEVVDKGASAQSFIERMTNFDKNLPNEKVLPKHSLLYEYFTVYNELTKVKYVTEGMRKPAFLSGEQKKAIVDLLFKTNRKVTVKQLKEDYFKKIECFDSVEISGVEDRFNASLGTYHDLLKIIKDKDFLDNEENEDILEDIVLTLTLFEDREMIEERLKTYAHLFDDKVMKQLKRRRYTGWGRLSRKLINGIRDKQSGKTILDFLKSDGFANRNFMQLIHDDSLTFKEDIQKAQVSGQGDSLHEHIANLAGSPAIKKGILQTVKVVDELVKVMGRHKPENIVIEMARENQTTQKGQKNSRERMKRIEEGIKELGSQILKEHPVENTQLQNEKLYLYYLQNGRDMYVDQELDINRLSDYDVDHIVPQSFLKDDSIDNKVLTRSDKARGKSDNVPSEEVVKKMKNYWRQLLNAKLITQRKFDNLTKAERGGLSELDKAGFIKRQLVETRQITKHVAQILDSRMNTKYDENDKLIREVKVITLKSKLVSDFRKDFQFYKVREINNYHHAHDAYLNAVVGTALIKKYPKLESEFVYGDYKVYDVRKMIAKSEQEIGKATAKYFFYSNIMNFFKTEITLANGEIRKRPLIETNGETGEIVWDKGRDFATVRKVLSMPQVNIVKKTEVQTGGFSKESILPKRNSDKLIARKKDWDPKKYGGFDSPTVAYSVLVVAKVEKGKSKKLKSVKELLGITIMERSSFEKNPIDFLEAKGYKEVKKDLIIKLPKYSLFELENGRKRMLASAGELQKGNELALPSKYVNFLYLASHYEKLKGSPEDNEQKQLFVEQHKHYLDEIIEQISEFSKRVILADANLDKVLSAYNKHRDKPIREQAENIIHLFTLTNLGAPAAFKYFDTTIDRKRYTSTKEVLDATLIHQSITGLYETRIDLSQLGGDGGPAPAPAPAPAPGGTLNIEDEYRLHETSKEPDVSLGSTWLSDFPQAWAETGGMGLAVRQAPLIIPLKATSTPVSIKQYPMSQEARLGIKPHIQRLLDQGILVPCQSPWNTPLLPVKKPGTNDYRPVQDLREVNKRVEDIHPTVPNPYNLLSGLPPSHQWYTVLDLKDAFFCLRLHPTSQPLFAFEWRDPEMGISGQLTWTRLPQGFKNSPTLFNEALHRDLAGFRIQHPDLILLQYVDDLLLAATSELDCQQGTRALLQTLGDLGYRASAKKAQICQKQVKYLGYLLKEGQRWLTEARKETVMGQPIPKTPRQLREFLGKAGFCRLFIPGFAEMAAPLYPLTKPGTLFNWGPDQQKAFQEIKQALLTAPALGLPDLTKPFELFVDEKQGYAKGVLTQKLGPWRRPVAYLSKKLDPVAAGWPPCLRMVAAIAVLTKDAGKLTMGQPLVILAPHAVEALVKQPPDRWLSNARMTHYQALLLDTDRVQFGPVVALNPATLLPLPEEGLQHDCLDILAEAHGTRSDLMDQPLPDADHTWYTDGSSFLQEGQRKAGAAVTTETEVIWARALPAGTSAQRAELIALTQALKMAEGKKLNVYTDSRYAFATAHIHGEIYRRRGWLTSEGKEIKNKDEILALLKALFLPKRLSIIHCPGHQKGNSAEARGNRMADQAAREVATRETPETSTLLAGKRTADGSEFEKRTADGSEFESPKKKAKVE

SEQ ID NO: 2302 - protein, 2091 aa, synthetic construct
MPAAKRVKLDGGDKKYSIGLDIGTNSVGWAVITDEYKVPSKKFKVLGNTDRHSIKKNLIGALLFDSGETAEATRLKRTARRRYTRRKNRICYLQEIFSNEMAKVDDSFFHRLEESFLVEEDKKHERHPIFGNIVDEVAYHEKYPTIYHLRKKLVDSTDKADLRLIYLALAHMIKFRGHFLIEGDLNPDNSDVDKLFIQLVQTYNQLFEENPINASGVDAKAILSARLSKSRRLENLIAQLPGEKKNGLFGNLIALSLGLTPNFKSNFDLAEDAKLQLSKDTYDDDLDNLLAQIGDQYADLFLAAKNLSDAILLSDILRVNTEITKAPLSASMIKRYDEHHQDLTLLKALVRQQLPEKYKEIFFDQSKNGYAGYIDGGASQEEFYKFIKPILEKMDGTEELLVKLNREDLLRKQRTFDNGSIPHQIHLGELHAILRRQEDFYPFLKDNREKIEKILTFRIPYYVGPLARGNSRFAWMTRKSEETITPWNFEEVVDKGASAQSFIERMTNFDKNLPNEKVLPKHSLLYEYFTVYNELTKVKYVTEGMRKPAFLSGEQKKAIVDLLFKTNRKVTVKQLKEDYFKKIECFDSVEISGVEDRFNASLGTYHDLLKIIKDKDFLDNEENEDILEDIVLTLTLFEDREMIEERLKTYAHLFDDKVMKQLKRRRYTGWGRLSRKLINGIRDKQSGKTILDFLKSDGFANRNFMQLIHDDSLTFKEDIQKAQVSGQGDSLHEHIANLAGSPAIKKGILQTVKVVDELVKVMGRHKPENIVIEMARENQTTQKGQKNSRERMKRIEEGIKELGSQILKEHPVENTQLQNEKLYLYYLQNGRDMYVDQELDINRLSDYDVDHIVPQSFLKDDSIDNKVLTRSDKARGKSDNVPSEEVVKKMKNYWRQLLNAKLITQRKFDNLTKAERGGLSELDKAGFIKRQLVETRQITKHVAQILDSRMNTKYDENDKLIREVKVITLKSKLVSDFRKDFQFYKVREINNYHHAHDAYLNAVVGTALIKKYPKLESEFVYGDYKVYDVRKMIAKSEQEIGKATAKYFFYSNIMNFFKTEITLANGEIRKRPLIETNGETGEIVWDKGRDFATVRKVLSMPQVNIVKKTEVQTGGFSKESILPKRNSDKLIARKKDWDPKKYGGFDSPTVAYSVLVVAKVEKGKSKKLKSVKELLGITIMERSSFEKNPIDFLEAKGYKEVKKDLIIKLPKYSLFELENGRKRMLASAGELQKGNELALPSKYVNFLYLASHYEKLKGSPEDNEQKQLFVEQHKHYLDEIIEQISEFSKRVILADANLDKVLSAYNKHRDKPIREQAENIIHLFTLTNLGAPAAFKYFDTTIDRKRYTSTKEVLDATLIHQSITGLYETRIDLSQLGGDGGGGGPAPGGTLNIEDEYRLHETSKEPDVSLGSTWLSDFPQAWAETGGMGLAVRQAPLIIPLKATSTPVSIKQYPMSQEARLGIKPHIQRLLDQGILVPCQSPWNTPLLPVKKPGTNDYRPVQDLREVNKRVEDIHPTVPNPYNLLSGLPPSHQWYTVLDLKDAFFCLRLHPTSQPLFAFEWRDPEMGISGQLTWTRLPQGFKNSPTLFNEALHRDLAGFRIQHPDLILLQYVDDLLLAATSELDCQQGTRALLQTLGDLGYRASAKKAQICQKQVKYLGYLLKEGQRWLTEARKETVMGQPIPKTPRQLREFLGKAGFCRLFIPGFAEMAAPLYPLTKPGTLFNWGPDQQKAFQEIKQALLTAPALGLPDLTKPFELFVDEKQGYAKGVLTQKLGPWRRPVAYLSKKLDPVAAGWPPCLRMVAAIAVLTKDAGKLTMGQPLVILAPHAVEALVKQPPDRWLSNARMTHYQALLLDTDRVQFGPVVALNPATLLPLPEEGLQHDCLDILAEAHGTRSDLMDQPLPDADHTWYTDGSSFLQEGQRKAGAAVTTETEVIWARALPAGTSAQRAELIALTQALKMAEGKKLNVYTDSRYAFATAHIHGEIYRRRGWLTSEGKEIKNKDEILALLKALFLPKRLSIIHCPGHQKGNSAEARGNRMADQAAREVATRETPETSTLLAGKRTADGSEFEKRTADGSEFESPKKKAKVE

SEQ ID NO: 2303 - protein, 2115 aa, synthetic construct
MPAAKRVKLDGGDKKYSIGLDIGTNSVGWAVITDEYKVPSKKFKVLGNTDRHSIKKNLIGALLFDSGETAEATRLKRTARRRYTRRKNRICYLQEIFSNEMAKVDDSFFHRLEESFLVEEDKKHERHPIFGNIVDEVAYHEKYPTIYHLRKKLVDSTDKADLRLIYLALAHMIKFRGHFLIEGDLNPDNSDVDKLFIQLVQTYNQLFEENPINASGVDAKAILSARLSKSRRLENLIAQLPGEKKNGLFGNLIALSLGLTPNFKSNFDLAEDAKLQLSKDTYDDDLDNLLAQIGDQYADLFLAAKNLSDAILLSDILRVNTEITKAPLSASMIKRYDEHHQDLTLLKALVRQQLPEKYKEIFFDQSKNGYAGYIDGGASQEEFYKFIKPILEKMDGTEELLVKLNREDLLRKQRTFDNGSIPHQIHLGELHAILRRQEDFYPFLKDNREKIEKILTFRIPYYVGPLARGNSRFAWMTRKSEETITPWNFEEVVDKGASAQSFIERMTNFDKNLPNEKVLPKHSLLYEYFTVYNELTKVKYVTEGMRKPAFLSGEQKKAIVDLLFKTNRKVTVKQLKEDYFKKIECFDSVEISGVEDRFNASLGTYHDLLKIIKDKDFLDNEENEDILEDIVLTLTLFEDREMIEERLKTYAHLFDDKVMKQLKRRRYTGWGRLSRKLINGIRDKQSGKTILDFLKSDGFANRNFMQLIHDDSLTFKEDIQKAQVSGQGDSLHEHIANLAGSPAIKKGILQTVKVVDELVKVMGRHKPENIVIEMARENQTTQKGQKNSRERMKRIEEGIKELGSQILKEHPVENTQLQNEKLYLYYLQNGRDMYVDQELDINRLSDYDVDHIVPQSFLKDDSIDNKVLTRSDKARGKSDNVPSEEVVKKMKNYWRQLLNAKLITQRKFDNLTKAERGGLSELDKAGFIKRQLVETRQITKHVAQILDSRMNTKYDENDKLIREVKVITLKSKLVSDFRKDFQFYKVREINNYHHAHDAYLNAVVGTALIKKYPKLESEFVYGDYKVYDVRKMIAKSEQEIGKATAKYFFYSNIMNFFKTEITLANGEIRKRPLIETNGETGEIVWDKGRDFATVRKVLSMPQVNIVKKTEVQTGGFSKESILPKRNSDKLIARKKDWDPKKYGGFDSPTVAYSVLVVAKVEKGKSKKLKSVKELLGITIMERSSFEKNPIDFLEAKGYKEVKKDLIIKLPKYSLFELENGRKRMLASAGELQKGNELALPSKYVNFLYLASHYEKLKGSPEDNEQKQLFVEQHKHYLDEIIEQISEFSKRVILADANLDKVLSAYNKHRDKPIREQAENIIHLFTLTNLGAPAAFKYFDTTIDRKRYTSTKEVLDATLIHQSITGLYETRIDLSQLGGDGGGGGGSGGGGSGGGGSGGGGSGGGGSGGGGSGGTLNIEDEYRLHETSKEPDVSLGSTWLSDFPQAWAETGGMGLAVRQAPLIIPLKATSTPVSIKQYPMSQEARLGIKPHIQRLLDQGILVPCQSPWNTPLLPVKKPGTNDYRPVQDLREVNKRVEDIHPTVPNPYNLLSGLPPSHQWYTVLDLKDAFFCLRLHPTSQPLFAFEWRDPEMGISGQLTWTRLPQGFKNSPTLFNEALHRDLAGFRIQHPDLILLQYVDDLLLAATSELDCQQGTRALLQTLGDLGYRASAKKAQICQKQVKYLGYLLKEGQRWLTEARKETVMGQPIPKTPRQLREFLGKAGFCRLFIPGFAEMAAPLYPLTKPGTLFNWGPDQQKAFQEIKQALLTAPALGLPDLTKPFELFVDEKQGYAKGVLTQKLGPWRRPVAYLSKKLDPVAAGWPPCLRMVAAIAVLTKDAGKLTMGQPLVILAPHAVEALVKQPPDRWLSNARMTHYQALLLDTDRVQFGPVVALNPATLLPLPEEGLQHDCLDILAEAHGTRSDLMDQPLPDADHTWYTDGSSFLQEGQRKAGAAVTTETEVIWARALPAGTSAQRAELIALTQALKMAEGKKLNVYTDSRYAFATAHIHGEIYRRRGWLTSEGKEIKNKDEILALLKALFLPKRLSIIHCPGHQKGNSAEARGNRMADQAAREVATRETPETSTLLAGKRTADGSEFEKRTADGSEFESPKKKAKVE

SEQ ID NO: 2304 - protein, 2103 aa, synthetic construct
MPAAKRVKLDGGDKKYSIGLDIGTNSVGWAVITDEYKVPSKKFKVLGNTDRHSIKKNLIGALLFDSGETAEATRLKRTARRRYTRRKNRICYLQEIFSNEMAKVDDSFFHRLEESFLVEEDKKHERHPIFGNIVDEVAYHEKYPTIYHLRKKLVDSTDKADLRLIYLALAHMIKFRGHFLIEGDLNPDNSDVDKLFIQLVQTYNQLFEENPINASGVDAKAILSARLSKSRRLENLIAQLPGEKKNGLFGNLIALSLGLTPNFKSNFDLAEDAKLQLSKDTYDDDLDNLLAQIGDQYADLFLAAKNLSDAILLSDILRVNTEITKAPLSASMIKRYDEHHQDLTLLKALVRQQLPEKYKEIFFDQSKNGYAGYIDGGASQEEFYKFIKPILEKMDGTEELLVKLNREDLLRKQRTFDNGSIPHQIHLGELHAILRRQEDFYPFLKDNREKIEKILTFRIPYYVGPLARGNSRFAWMTRKSEETITPWNFEEVVDKGASAQSFIERMTNFDKNLPNEKVLPKHSLLYEYFTVYNELTKVKYVTEGMRKPAFLSGEQKKAIVDLLFKTNRKVTVKQLKEDYFKKIECFDSVEISGVEDRFNASLGTYHDLLKIIKDKDFLDNEENEDILEDIVLTLTLFEDREMIEERLKTYAHLFDDKVMKQLKRRRYTGWGRLSRKLINGIRDKQSGKTILDFLKSDGFANRNFMQLIHDDSLTFKEDIQKAQVSGQGDSLHEHIANLAGSPAIKKGILQTVKVVDELVKVMGRHKPENIVIEMARENQTTQKGQKNSRERMKRIEEGIKELGSQILKEHPVENTQLQNEKLYLYYLQNGRDMYVDQELDINRLSDYDVDHIVPQSFLKDDSIDNKVLTRSDKARGKSDNVPSEEVVKKMKNYWRQLLNAKLITQRKFDNLTKAERGGLSELDKAGFIKRQLVETRQITKHVAQILDSRMNTKYDENDKLIREVKVITLKSKLVSDFRKDFQFYKVREINNYHHAHDAYLNAVVGTALIKKYPKLESEFVYGDYKVYDVRKMIAKSEQEIGKATAKYFFYSNIMNFFKTEITLANGEIRKRPLIETNGETGEIVWDKGRDFATVRKVLSMPQVNIVKKTEVQTGGFSKESILPKRNSDKLIARKKDWDPKKYGGFDSPTVAYSVLVVAKVEKGKSKKLKSVKELLGITIMERSSFEKNPIDFLEAKGYKEVKKDLIIKLPKYSLFELENGRKRMLASAGELQKGNELALPSKYVNFLYLASHYEKLKGSPEDNEQKQLFVEQHKHYLDEIIEQISEFSKRVILADANLDKVLSAYNKHRDKPIREQAENIIHLFTLTNLGAPAAFKYFDTTIDRKRYTSTKEVLDATLIHQSITGLYETRIDLSQLGGDGGGSSGSSGSSGSSGSSGSSGGTLNIEDEYRLHETSKEPDVSLGSTWLSDFPQAWAETGGMGLAVRQAPLIIPLKATSTPVSIKQYPMSQEARLGIKPHIQRLLDQGILVPCQSPWNTPLLPVKKPGTNDYRPVQDLREVNKRVEDIHPTVPNPYNLLSGLPPSHQWYTVLDLKDAFFCLRLHPTSQPLFAFEWRDPEMGISGQLTWTRLPQGFKNSPTLFNEALHRDLAGFRIQHPDLILLQYVDDLLLAATSELDCQQGTRALLQTLGDLGYRASAKKAQICQKQVKYLGYLLKEGQRWLTEARKETVMGQPIPKTPRQLREFLGKAGFCRLFIPGFAEMAAPLYPLTKPGTLFNWGPDQQKAFQEIKQALLTAPALGLPDLTKPFELFVDEKQGYAKGVLTQKLGPWRRPVAYLSKKLDPVAAGWPPCLRMVAAIAVLTKDAGKLTMGQPLVILAPHAVEALVKQPPDRWLSNARMTHYQALLLDTDRVQFGPVVALNPATLLPLPEEGLQHDCLDILAEAHGTRSDLMDQPLPDADHTWYTDGSSFLQEGQRKAGAAVTTETEVIWARALPAGTSAQRAELIALTQALKMAEGKKLNVYTDSRYAFATAHIHGEIYRRRGWLTSEGKEIKNKDEILALLKALFLPKRLSIIHCPGHQKGNSAEARGNRMADQAAREVATRETPETSTLLAGKRTADGSEFEKRTADGSEFESPKKKAKVE

SEQ ID NO: 2305 - protein, 2100 aa, synthetic construct
MPAAKRVKLDGGDKKYSIGLDIGTNSVGWAVITDEYKVPSKKFKVLGNTDRHSIKKNLIGALLFDSGETAEATRLKRTARRRYTRRKNRICYLQEIFSNEMAKVDDSFFHRLEESFLVEEDKKHERHPIFGNIVDEVAYHEKYPTIYHLRKKLVDSTDKADLRLIYLALAHMIKFRGHFLIEGDLNPDNSDVDKLFIQLVQTYNQLFEENPINASGVDAKAILSARLSKSRRLENLIAQLPGEKKNGLFGNLIALSLGLTPNFKSNFDLAEDAKLQLSKDTYDDDLDNLLAQIGDQYADLFLAAKNLSDAILLSDILRVNTEITKAPLSASMIKRYDEHHQDLTLLKALVRQQLPEKYKEIFFDQSKNGYAGYIDGGASQEEFYKFIKPILEKMDGTEELLVKLNREDLLRKQRTFDNGSIPHQIHLGELHAILRRQEDFYPFLKDNREKIEKILTFRIPYYVGPLARGNSRFAWMTRKSEETITPWNFEEVVDKGASAQSFIERMTNFDKNLPNEKVLPKHSLLYEYFTVYNELTKVKYVTEGMRKPAFLSGEQKKAIVDLLFKTNRKVTVKQLKEDYFKKIECFDSVEISGVEDRFNASLGTYHDLLKIIKDKDFLDNEENEDILEDIVLTLTLFEDREMIEERLKTYAHLFDDKVMKQLKRRRYTGWGRLSRKLINGIRDKQSGKTILDFLKSDGFANRNFMQLIHDDSLTFKEDIQKAQVSGQGDSLHEHIANLAGSPAIKKGILQTVKVVDELVKVMGRHKPENIVIEMARENQTTQKGQKNSRERMKRIEEGIKELGSQILKEHPVENTQLQNEKLYLYYLQNGRDMYVDQELDINRLSDYDVDHIVPQSFLKDDSIDNKVLTRSDKARGKSDNVPSEEVVKKMKNYWRQLLNAKLITQRKFDNLTKAERGGLSELDKAGFIKRQLVETRQITKHVAQILDSRMNTKYDENDKLIREVKVITLKSKLVSDFRKDFQFYKVREINNYHHAHDAYLNAVVGTALIKKYPKLESEFVYGDYKVYDVRKMIAKSEQEIGKATAKYFFYSNIMNFFKTEITLANGEIRKRPLIETNGETGEIVWDKGRDFATVRKVLSMPQVNIVKKTEVQTGGFSKESILPKRNSDKLIARKKDWDPKKYGGFDSPTVAYSVLVVAKVEKGKSKKLKSVKELLGITIMERSSFEKNPIDFLEAKGYKEVKKDLIIKLPKYSLFELENGRKRMLASAGELQKGNELALPSKYVNFLYLASHYEKLKGSPEDNEQKQLFVEQHKHYLDEIIEQISEFSKRVILADANLDKVLSAYNKHRDKPIREQAENIIHLFTLTNLGAPAAFKYFDTTIDRKRYTSTKEVLDATLIHQSITGLYETRIDLSQLGGDGGEAAAKGGGGSEAAAKGGTLNIEDEYRLHETSKEPDVSLGSTWLSDFPQAWAETGGMGLAVRQAPLIIPLKATSTPVSIKQYPMSQEARLGIKPHIQRLLDQGILVPCQSPWNTPLLPVKKPGTNDYRPVQDLREVNKRVEDIHPTVPNPYNLLSGLPPSHQWYTVLDLKDAFFCLRLHPTSQPLFAFEWRDPEMGISGQLTWTRLPQGFKNSPTLFNEALHRDLAGFRIQHPDLILLQYVDDLLLAATSELDCQQGTRALLQTLGDLGYRASAKKAQICQKQVKYLGYLLKEGQRWLTEARKETVMGQPIPKTPRQLREFLGKAGFCRLFIPGFAEMAAPLYPLTKPGTLFNWGPDQQKAFQEIKQALLTAPALGLPDLTKPFELFVDEKQGYAKGVLTQKLGPWRRPVAYLSKKLDPVAAGWPPCLRMVAAIAVLTKDAGKLTMGQPLVILAPHAVEALVKQPPDRWLSNARMTHYQALLLDTDRVQFGPVVALNPATLLPLPEEGLQHDCLDILAEAHGTRSDLMDQPLPDADHTWYTDGSSFLQEGQRKAGAAVTTETEVIWARALPAGTSAQRAELIALTQALKMAEGKKLNVYTDSRYAFATAHIHGEIYRRRGWLTSEGKEIKNKDEILALLKALFLPKRLSIIHCPGHQKGNSAEARGNRMADQAAREVATRETPETSTLLAGKRTADGSEFEKRTADGSEFESPKKKAKVE

SEQ ID NO: 2306-2307 - skipped (2 entries)

SEQ ID NO: 2308 - protein, 2094 aa, synthetic construct
MPAAKRVKLDGGDKKYSIGLDIGTNSVGWAVITDEYKVPSKKFKVLGNTDRHSIKKNLIGALLFDSGETAEATRLKRTARRRYTRRKNRICYLQEIFSNEMAKVDDSFFHRLEESFLVEEDKKHERHPIFGNIVDEVAYHEKYPTIYHLRKKLVDSTDKADLRLIYLALAHMIKFRGHFLIEGDLNPDNSDVDKLFIQLVQTYNQLFEENPINASGVDAKAILSARLSKSRRLENLIAQLPGEKKNGLFGNLIALSLGLTPNFKSNFDLAEDAKLQLSKDTYDDDLDNLLAQIGDQYADLFLAAKNLSDAILLSDILRVNTEITKAPLSASMIKRYDEHHQDLTLLKALVRQQLPEKYKEIFFDQSKNGYAGYIDGGASQEEFYKFIKPILEKMDGTEELLVKLNREDLLRKQRTFDNGSIPHQIHLGELHAILRRQEDFYPFLKDNREKIEKILTFRIPYYVGPLARGNSRFAWMTRKSEETITPWNFEEVVDKGASAQSFIERMTNFDKNLPNEKVLPKHSLLYEYFTVYNELTKVKYVTEGMRKPAFLSGEQKKAIVDLLFKTNRKVTVKQLKEDYFKKIECFDSVEISGVEDRFNASLGTYHDLLKIIKDKDFLDNEENEDILEDIVLTLTLFEDREMIEERLKTYAHLFDDKVMKQLKRRRYTGWGRLSRKLINGIRDKQSGKTILDFLKSDGFANRNFMQLIHDDSLTFKEDIQKAQVSGQGDSLHEHIANLAGSPAIKKGILQTVKVVDELVKVMGRHKPENIVIEMARENQTTQKGQKNSRERMKRIEEGIKELGSQILKEHPVENTQLQNEKLYLYYLQNGRDMYVDQELDINRLSDYDVDHIVPQSFLKDDSIDNKVLTRSDKARGKSDNVPSEEVVKKMKNYWRQLLNAKLITQRKFDNLTKAERGGLSELDKAGFIKRQLVETRQITKHVAQILDSRMNTKYDENDKLIREVKVITLKSKLVSDFRKDFQFYKVREINNYHHAHDAYLNAVVGTALIKKYPKLESEFVYGDYKVYDVRKMIAKSEQEIGKATAKYFFYSNIMNFFKTEITLANGEIRKRPLIETNGETGEIVWDKGRDFATVRKVLSMPQVNIVKKTEVQTGGFSKESILPKRNSDKLIARKKDWDPKKYGGFDSPTVAYSVLVVAKVEKGKSKKLKSVKELLGITIMERSSFEKNPIDFLEAKGYKEVKKDLIIKLPKYSLFELENGRKRMLASAGELQKGNELALPSKYVNFLYLASHYEKLKGSPEDNEQKQLFVEQHKHYLDEIIEQISEFSKRVILADANLDKVLSAYNKHRDKPIREQAENIIHLFTLTNLGAPAAFKYFDTTIDRKRYTSTKEVLDATLIHQSITGLYETRIDLSQLGGDGGPAPGGGGSSGGTLNIEDEYRLHETSKEPDVSLGSTWLSDFPQAWAETGGMGLAVRQAPLIIPLKATSTPVSIKQYPMSQEARLGIKPHIQRLLDQGILVPCQSPWNTPLLPVKKPGTNDYRPVQDLREVNKRVEDIHPTVPNPYNLLSGLPPSHQWYTVLDLKDAFFCLRLHPTSQPLFAFEWRDPEMGISGQLTWTRLPQGFKNSPTLFNEALHRDLAGFRIQHPDLILLQYVDDLLLAATSELDCQQGTRALLQTLGDLGYRASAKKAQICQKQVKYLGYLLKEGQRWLTEARKETVMGQPIPKTPRQLREFLGKAGFCRLFIPGFAEMAAPLYPLTKPGTLFNWGPDQQKAFQEIKQALLTAPALGLPDLTKPFELFVDEKQGYAKGVLTQKLGPWRRPVAYLSKKLDPVAAGWPPCLRMVAAIAVLTKDAGKLTMGQPLVILAPHAVEALVKQPPDRWLSNARMTHYQALLLDTDRVQFGPVVALNPATLLPLPEEGLQHDCLDILAEAHGTRSDLMDQPLPDADHTWYTDGSSFLQEGQRKAGAAVTTETEVIWARALPAGTSAQRAELIALTQALKMAEGKKLNVYTDSRYAFATAHIHGEIYRRRGWLTSEGKEIKNKDEILALLKALFLPKRLSIIHCPGHQKGNSAEARGNRMADQAAREVATRETPETSTLLAGKRTADGSEFEKRTADGSEFESPKKKAKVE

SEQ ID NO: 2309 - protein, 2098 aa, synthetic construct
MPAAKRVKLDGGDKKYSIGLDIGTNSVGWAVITDEYKVPSKKFKVLGNTDRHSIKKNLIGALLFDSGETAEATRLKRTARRRYTRRKNRICYLQEIFSNEMAKVDDSFFHRLEESFLVEEDKKHERHPIFGNIVDEVAYHEKYPTIYHLRKKLVDSTDKADLRLIYLALAHMIKFRGHFLIEGDLNPDNSDVDKLFIQLVQTYNQLFEENPINASGVDAKAILSARLSKSRRLENLIAQLPGEKKNGLFGNLIALSLGLTPNFKSNFDLAEDAKLQLSKDTYDDDLDNLLAQIGDQYADLFLAAKNLSDAILLSDILRVNTEITKAPLSASMIKRYDEHHQDLTLLKALVRQQLPEKYKEIFFDQSKNGYAGYIDGGASQEEFYKFIKPILEKMDGTEELLVKLNREDLLRKQRTFDNGSIPHQIHLGELHAILRRQEDFYPFLKDNREKIEKILTFRIPYYVGPLARGNSRFAWMTRKSEETITPWNFEEVVDKGASAQSFIERMTNFDKNLPNEKVLPKHSLLYEYFTVYNELTKVKYVTEGMRKPAFLSGEQKKAIVDLLFKTNRKVTVKQLKEDYFKKIECFDSVEISGVEDRFNASLGTYHDLLKIIKDKDFLDNEENEDILEDIVLTLTLFEDREMIEERLKTYAHLFDDKVMKQLKRRRYTGWGRLSRKLINGIRDKQSGKTILDFLKSDGFANRNFMQLIHDDSLTFKEDIQKAQVSGQGDSLHEHIANLAGSPAIKKGILQTVKVVDELVKVMGRHKPENIVIEMARENQTTQKGQKNSRERMKRIEEGIKELGSQILKEHPVENTQLQNEKLYLYYLQNGRDMYVDQELDINRLSDYDVDHIVPQSFLKDDSIDNKVLTRSDKARGKSDNVPSEEVVKKMKNYWRQLLNAKLITQRKFDNLTKAERGGLSELDKAGFIKRQLVETRQITKHVAQILDSRMNTKYDENDKLIREVKVITLKSKLVSDFRKDFQFYKVREINNYHHAHDAYLNAVVGTALIKKYPKLESEFVYGDYKVYDVRKMIAKSEQEIGKATAKYFFYSNIMNFFKTEITLANGEIRKRPLIETNGETGEIVWDKGRDFATVRKVLSMPQVNIVKKTEVQTGGFSKESILPKRNSDKLIARKKDWDPKKYGGFDSPTVAYSVLVVAKVEKGKSKKLKSVKELLGITIMERSSFEKNPIDFLEAKGYKEVKKDLIIKLPKYSLFELENGRKRMLASAGELQKGNELALPSKYVNFLYLASHYEKLKGSPEDNEQKQLFVEQHKHYLDEIIEQISEFSKRVILADANLDKVLSAYNKHRDKPIREQAENIIHLFTLTNLGAPAAFKYFDTTIDRKRYTSTKEVLDATLIHQSITGLYETRIDLSQLGGDGGPAPAPAPAPAPAPGGTLNIEDEYRLHETSKEPDVSLGSTWLSDFPQAWAETGGMGLAVRQAPLIIPLKATSTPVSIKQYPMSQEARLGIKPHIQRLLDQGILVPCQSPWNTPLLPVKKPGTNDYRPVQDLREVNKRVEDIHPTVPNPYNLLSGLPPSHQWYTVLDLKDAFFCLRLHPTSQPLFAFEWRDPEMGISGQLTWTRLPQGFKNSPTLFNEALHRDLAGFRIQHPDLILLQYVDDLLLAATSELDCQQGTRALLQTLGDLGYRASAKKAQICQKQVKYLGYLLKEGQRWLTEARKETVMGQPIPKTPRQLREFLGKAGFCRLFIPGFAEMAAPLYPLTKPGTLFNWGPDQQKAFQEIKQALLTAPALGLPDLTKPFELFVDEKQGYAKGVLTQKLGPWRRPVAYLSKKLDPVAAGWPPCLRMVAAIAVLTKDAGKLTMGQPLVILAPHAVEALVKQPPDRWLSNARMTHYQALLLDTDRVQFGPVVALNPATLLPLPEEGLQHDCLDILAEAHGTRSDLMDQPLPDADHTWYTDGSSFLQEGQRKAGAAVTTETEVIWARALPAGTSAQRAELIALTQALKMAEGKKLNVYTDSRYAFATAHIHGEIYRRRGWLTSEGKEIKNKDEILALLKALFLPKRLSIIHCPGHQKGNSAEARGNRMADQAAREVATRETPETSTLLAGKRTADGSEFEKRTADGSEFESPKKKAKVE

SEQ ID NO: 2310 - skipped

SEQ ID NO: 2311 - protein, 2105 aa, synthetic construct
MPAAKRVKLDGGDKKYSIGLDIGTNSVGWAVITDEYKVPSKKFKVLGNTDRHSIKKNLIGALLFDSGETAEATRLKRTARRRYTRRKNRICYLQEIFSNEMAKVDDSFFHRLEESFLVEEDKKHERHPIFGNIVDEVAYHEKYPTIYHLRKKLVDSTDKADLRLIYLALAHMIKFRGHFLIEGDLNPDNSDVDKLFIQLVQTYNQLFEENPINASGVDAKAILSARLSKSRRLENLIAQLPGEKKNGLFGNLIALSLGLTPNFKSNFDLAEDAKLQLSKDTYDDDLDNLLAQIGDQYADLFLAAKNLSDAILLSDILRVNTEITKAPLSASMIKRYDEHHQDLTLLKALVRQQLPEKYKEIFFDQSKNGYAGYIDGGASQEEFYKFIKPILEKMDGTEELLVKLNREDLLRKQRTFDNGSIPHQIHLGELHAILRRQEDFYPFLKDNREKIEKILTFRIPYYVGPLARGNSRFAWMTRKSEETITPWNFEEVVDKGASAQSFIERMTNFDKNLPNEKVLPKHSLLYEYFTVYNELTKVKYVTEGMRKPAFLSGEQKKAIVDLLFKTNRKVTVKQLKEDYFKKIECFDSVEISGVEDRFNASLGTYHDLLKIIKDKDFLDNEENEDILEDIVLTLTLFEDREMIEERLKTYAHLFDDKVMKQLKRRRYTGWGRLSRKLINGIRDKQSGKTILDFLKSDGFANRNFMQLIHDDSLTFKEDIQKAQVSGQGDSLHEHIANLAGSPAIKKGILQTVKVVDELVKVMGRHKPENIVIEMARENQTTQKGQKNSRERMKRIEEGIKELGSQILKEHPVENTQLQNEKLYLYYLQNGRDMYVDQELDINRLSDYDVDHIVPQSFLKDDSIDNKVLTRSDKARGKSDNVPSEEVVKKMKNYWRQLLNAKLITQRKFDNLTKAERGGLSELDKAGFIKRQLVETRQITKHVAQILDSRMNTKYDENDKLIREVKVITLKSKLVSDFRKDFQFYKVREINNYHHAHDAYLNAVVGTALIKKYPKLESEFVYGDYKVYDVRKMIAKSEQEIGKATAKYFFYSNIMNFFKTEITLANGEIRKRPLIETNGETGEIVWDKGRDFATVRKVLSMPQVNIVKKTEVQTGGFSKESILPKRNSDKLIARKKDWDPKKYGGFDSPTVAYSVLVVAKVEKGKSKKLKSVKELLGITIMERSSFEKNPIDFLEAKGYKEVKKDLIIKLPKYSLFELENGRKRMLASAGELQKGNELALPSKYVNFLYLASHYEKLKGSPEDNEQKQLFVEQHKHYLDEIIEQISEFSKRVILADANLDKVLSAYNKHRDKPIREQAENIIHLFTLTNLGAPAAFKYFDTTIDRKRYTSTKEVLDATLIHQSITGLYETRIDLSQLGGDGGGGGGSGGGGSGGGGSGGGGSGGTLNIEDEYRLHETSKEPDVSLGSTWLSDFPQAWAETGGMGLAVRQAPLIIPLKATSTPVSIKQYPMSQEARLGIKPHIQRLLDQGILVPCQSPWNTPLLPVKKPGTNDYRPVQDLREVNKRVEDIHPTVPNPYNLLSGLPPSHQWYTVLDLKDAFFCLRLHPTSQPLFAFEWRDPEMGISGQLTWTRLPQGFKNSPTLFNEALHRDLAGFRIQHPDLILLQYVDDLLLAATSELDCQQGTRALLQTLGDLGYRASAKKAQICQKQVKYLGYLLKEGQRWLTEARKETVMGQPIPKTPRQLREFLGKAGFCRLFIPGFAEMAAPLYPLTKPGTLFNWGPDQQKAFQEIKQALLTAPALGLPDLTKPFELFVDEKQGYAKGVLTQKLGPWRRPVAYLSKKLDPVAAGWPPCLRMVAAIAVLTKDAGKLTMGQPLVILAPHAVEALVKQPPDRWLSNARMTHYQALLLDTDRVQFGPVVALNPATLLPLPEEGLQHDCLDILAEAHGTRSDLMDQPLPDADHTWYTDGSSFLQEGQRKAGAAVTTETEVIWARALPAGTSAQRAELIALTQALKMAEGKKLNVYTDSRYAFATAHIHGEIYRRRGWLTSEGKEIKNKDEILALLKALFLPKRLSIIHCPGHQKGNSAEARGNRMADQAAREVATRETPETSTLLAGKRTADGSEFEKRTADGSEFESPKKKAKVE

SEQ ID NO: 2312 - protein, 2094 aa, synthetic construct
MPAAKRVKLDGGDKKYSIGLDIGTNSVGWAVITDEYKVPSKKFKVLGNTDRHSIKKNLIGALLFDSGETAEATRLKRTARRRYTRRKNRICYLQEIFSNEMAKVDDSFFHRLEESFLVEEDKKHERHPIFGNIVDEVAYHEKYPTIYHLRKKLVDSTDKADLRLIYLALAHMIKFRGHFLIEGDLNPDNSDVDKLFIQLVQTYNQLFEENPINASGVDAKAILSARLSKSRRLENLIAQLPGEKKNGLFGNLIALSLGLTPNFKSNFDLAEDAKLQLSKDTYDDDLDNLLAQIGDQYADLFLAAKNLSDAILLSDILRVNTEITKAPLSASMIKRYDEHHQDLTLLKALVRQQLPEKYKEIFFDQSKNGYAGYIDGGASQEEFYKFIKPILEKMDGTEELLVKLNREDLLRKQRTFDNGSIPHQIHLGELHAILRRQEDFYPFLKDNREKIEKILTFRIPYYVGPLARGNSRFAWMTRKSEETITPWNFEEVVDKGASAQSFIERMTNFDKNLPNEKVLPKHSLLYEYFTVYNELTKVKYVTEGMRKPAFLSGEQKKAIVDLLFKTNRKVTVKQLKEDYFKKIECFDSVEISGVEDRFNASLGTYHDLLKIIKDKDFLDNEENEDILEDIVLTLTLFEDREMIEERLKTYAHLFDDKVMKQLKRRRYTGWGRLSRKLINGIRDKQSGKTILDFLKSDGFANRNFMQLIHDDSLTFKEDIQKAQVSGQGDSLHEHIANLAGSPAIKKGILQTVKVVDELVKVMGRHKPENIVIEMARENQTTQKGQKNSRERMKRIEEGIKELGSQILKEHPVENTQLQNEKLYLYYLQNGRDMYVDQELDINRLSDYDVDHIVPQSFLKDDSIDNKVLTRSDKARGKSDNVPSEEVVKKMKNYWRQLLNAKLITQRKFDNLTKAERGGLSELDKAGFIKRQLVETRQITKHVAQILDSRMNTKYDENDKLIREVKVITLKSKLVSDFRKDFQFYKVREINNYHHAHDAYLNAVVGTALIKKYPKLESEFVYGDYKVYDVRKMIAKSEQEIGKATAKYFFYSNIMNFFKTEITLANGEIRKRPLIETNGETGEIVWDKGRDFATVRKVLSMPQVNIVKKTEVQTGGFSKESILPKRNSDKLIARKKDWDPKKYGGFDSPTVAYSVLVVAKVEKGKSKKLKSVKELLGITIMERSSFEKNPIDFLEAKGYKEVKKDLIIKLPKYSLFELENGRKRMLASAGELQKGNELALPSKYVNFLYLASHYEKLKGSPEDNEQKQLFVEQHKHYLDEIIEQISEFSKRVILADANLDKVLSAYNKHRDKPIREQAENIIHLFTLTNLGAPAAFKYFDTTIDRKRYTSTKEVLDATLIHQSITGLYETRIDLSQLGGDGGGGGGGSGSSGGTLNIEDEYRLHETSKEPDVSLGSTWLSDFPQAWAETGGMGLAVRQAPLIIPLKATSTPVSIKQYPMSQEARLGIKPHIQRLLDQGILVPCQSPWNTPLLPVKKPGTNDYRPVQDLREVNKRVEDIHPTVPNPYNLLSGLPPSHQWYTVLDLKDAFFCLRLHPTSQPLFAFEWRDPEMGISGQLTWTRLPQGFKNSPTLFNEALHRDLAGFRIQHPDLILLQYVDDLLLAATSELDCQQGTRALLQTLGDLGYRASAKKAQICQKQVKYLGYLLKEGQRWLTEARKETVMGQPIPKTPRQLREFLGKAGFCRLFIPGFAEMAAPLYPLTKPGTLFNWGPDQQKAFQEIKQALLTAPALGLPDLTKPFELFVDEKQGYAKGVLTQKLGPWRRPVAYLSKKLDPVAAGWPPCLRMVAAIAVLTKDAGKLTMGQPLVILAPHAVEALVKQPPDRWLSNARMTHYQALLLDTDRVQFGPVVALNPATLLPLPEEGLQHDCLDILAEAHGTRSDLMDQPLPDADHTWYTDGSSFLQEGQRKAGAAVTTETEVIWARALPAGTSAQRAELIALTQALKMAEGKKLNVYTDSRYAFATAHIHGEIYRRRGWLTSEGKEIKNKDEILALLKALFLPKRLSIIHCPGHQKGNSAEARGNRMADQAAREVATRETPETSTLLAGKRTADGSEFEKRTADGSEFESPKKKAKVE

SEQ ID NO: 2313 - protein, 2097 aa, synthetic construct
MPAAKRVKLDGGDKKYSIGLDIGTNSVGWAVITDEYKVPSKKFKVLGNTDRHSIKKNLIGALLFDSGETAEATRLKRTARRRYTRRKNRICYLQEIFSNEMAKVDDSFFHRLEESFLVEEDKKHERHPIFGNIVDEVAYHEKYPTIYHLRKKLVDSTDKADLRLIYLALAHMIKFRGHFLIEGDLNPDNSDVDKLFIQLVQTYNQLFEENPINASGVDAKAILSARLSKSRRLENLIAQLPGEKKNGLFGNLIALSLGLTPNFKSNFDLAEDAKLQLSKDTYDDDLDNLLAQIGDQYADLFLAAKNLSDAILLSDILRVNTEITKAPLSASMIKRYDEHHQDLTLLKALVRQQLPEKYKEIFFDQSKNGYAGYIDGGASQEEFYKFIKPILEKMDGTEELLVKLNREDLLRKQRTFDNGSIPHQIHLGELHAILRRQEDFYPFLKDNREKIEKILTFRIPYYVGPLARGNSRFAWMTRKSEETITPWNFEEVVDKGASAQSFIERMTNFDKNLPNEKVLPKHSLLYEYFTVYNELTKVKYVTEGMRKPAFLSGEQKKAIVDLLFKTNRKVTVKQLKEDYFKKIECFDSVEISGVEDRFNASLGTYHDLLKIIKDKDFLDNEENEDILEDIVLTLTLFEDREMIEERLKTYAHLFDDKVMKQLKRRRYTGWGRLSRKLINGIRDKQSGKTILDFLKSDGFANRNFMQLIHDDSLTFKEDIQKAQVSGQGDSLHEHIANLAGSPAIKKGILQTVKVVDELVKVMGRHKPENIVIEMARENQTTQKGQKNSRERMKRIEEGIKELGSQILKEHPVENTQLQNEKLYLYYLQNGRDMYVDQELDINRLSDYDVDHIVPQSFLKDDSIDNKVLTRSDKARGKSDNVPSEEVVKKMKNYWRQLLNAKLITQRKFDNLTKAERGGLSELDKAGFIKRQLVETRQITKHVAQILDSRMNTKYDENDKLIREVKVITLKSKLVSDFRKDFQFYKVREINNYHHAHDAYLNAVVGTALIKKYPKLESEFVYGDYKVYDVRKMIAKSEQEIGKATAKYFFYSNIMNFFKTEITLANGEIRKRPLIETNGETGEIVWDKGRDFATVRKVLSMPQVNIVKKTEVQTGGFSKESILPKRNSDKLIARKKDWDPKKYGGFDSPTVAYSVLVVAKVEKGKSKKLKSVKELLGITIMERSSFEKNPIDFLEAKGYKEVKKDLIIKLPKYSLFELENGRKRMLASAGELQKGNELALPSKYVNFLYLASHYEKLKGSPEDNEQKQLFVEQHKHYLDEIIEQISEFSKRVILADANLDKVLSAYNKHRDKPIREQAENIIHLFTLTNLGAPAAFKYFDTTIDRKRYTSTKEVLDATLIHQSITGLYETRIDLSQLGGDGGGSAGSAAGSGEFGGTLNIEDEYRLHETSKEPDVSLGSTWLSDFPQAWAETGGMGLAVRQAPLIIPLKATSTPVSIKQYPMSQEARLGIKPHIQRLLDQGILVPCQSPWNTPLLPVKKPGTNDYRPVQDLREVNKRVEDIHPTVPNPYNLLSGLPPSHQWYTVLDLKDAFFCLRLHPTSQPLFAFEWRDPEMGISGQLTWTRLPQGFKNSPTLFNEALHRDLAGFRIQHPDLILLQYVDDLLLAATSELDCQQGTRALLQTLGDLGYRASAKKAQICQKQVKYLGYLLKEGQRWLTEARKETVMGQPIPKTPRQLREFLGKAGFCRLFIPGFAEMAAPLYPLTKPGTLFNWGPDQQKAFQEIKQALLTAPALGLPDLTKPFELFVDEKQGYAKGVLTQKLGPWRRPVAYLSKKLDPVAAGWPPCLRMVAAIAVLTKDAGKLTMGQPLVILAPHAVEALVKQPPDRWLSNARMTHYQALLLDTDRVQFGPVVALNPATLLPLPEEGLQHDCLDILAEAHGTRSDLMDQPLPDADHTWYTDGSSFLQEGQRKAGAAVTTETEVIWARALPAGTSAQRAELIALTQALKMAEGKKLNVYTDSRYAFATAHIHGEIYRRRGWLTSEGKEIKNKDEILALLKALFLPKRLSIIHCPGHQKGNSAEARGNRMADQAAREVATRETPETSTLLAGKRTADGSEFEKRTADGSEFESPKKKAKVE

SEQ ID NO: 2314 - protein, 2096 aa, synthetic construct
MPAAKRVKLDGGDKKYSIGLDIGTNSVGWAVITDEYKVPSKKFKVLGNTDRHSIKKNLIGALLFDSGETAEATRLKRTARRRYTRRKNRICYLQEIFSNEMAKVDDSFFHRLEESFLVEEDKKHERHPIFGNIVDEVAYHEKYPTIYHLRKKLVDSTDKADLRLIYLALAHMIKFRGHFLIEGDLNPDNSDVDKLFIQLVQTYNQLFEENPINASGVDAKAILSARLSKSRRLENLIAQLPGEKKNGLFGNLIALSLGLTPNFKSNFDLAEDAKLQLSKDTYDDDLDNLLAQIGDQYADLFLAAKNLSDAILLSDILRVNTEITKAPLSASMIKRYDEHHQDLTLLKALVRQQLPEKYKEIFFDQSKNGYAGYIDGGASQEEFYKFIKPILEKMDGTEELLVKLNREDLLRKQRTFDNGSIPHQIHLGELHAILRRQEDFYPFLKDNREKIEKILTFRIPYYVGPLARGNSRFAWMTRKSEETITPWNFEEVVDKGASAQSFIERMTNFDKNLPNEKVLPKHSLLYEYFTVYNELTKVKYVTEGMRKPAFLSGEQKKAIVDLLFKTNRKVTVKQLKEDYFKKIECFDSVEISGVEDRFNASLGTYHDLLKIIKDKDFLDNEENEDILEDIVLTLTLFEDREMIEERLKTYAHLFDDKVMKQLKRRRYTGWGRLSRKLINGIRDKQSGKTILDFLKSDGFANRNFMQLIHDDSLTFKEDIQKAQVSGQGDSLHEHIANLAGSPAIKKGILQTVKVVDELVKVMGRHKPENIVIEMARENQTTQKGQKNSRERMKRIEEGIKELGSQILKEHPVENTQLQNEKLYLYYLQNGRDMYVDQELDINRLSDYDVDHIVPQSFLKDDSIDNKVLTRSDKARGKSDNVPSEEVVKKMKNYWRQLLNAKLITQRKFDNLTKAERGGLSELDKAGFIKRQLVETRQITKHVAQILDSRMNTKYDENDKLIREVKVITLKSKLVSDFRKDFQFYKVREINNYHHAHDAYLNAVVGTALIKKYPKLESEFVYGDYKVYDVRKMIAKSEQEIGKATAKYFFYSNIMNFFKTEITLANGEIRKRPLIETNGETGEIVWDKGRDFATVRKVLSMPQVNIVKKTEVQTGGFSKESILPKRNSDKLIARKKDWDPKKYGGFDSPTVAYSVLVVAKVEKGKSKKLKSVKELLGITIMERSSFEKNPIDFLEAKGYKEVKKDLIIKLPKYSLFELENGRKRMLASAGELQKGNELALPSKYVNFLYLASHYEKLKGSPEDNEQKQLFVEQHKHYLDEIIEQISEFSKRVILADANLDKVLSAYNKHRDKPIREQAENIIHLFTLTNLGAPAAFKYFDTTIDRKRYTSTKEVLDATLIHQSITGLYETRIDLSQLGGDGGPAPEAAAKGGSGGTLNIEDEYRLHETSKEPDVSLGSTWLSDFPQAWAETGGMGLAVRQAPLIIPLKATSTPVSIKQYPMSQEARLGIKPHIQRLLDQGILVPCQSPWNTPLLPVKKPGTNDYRPVQDLREVNKRVEDIHPTVPNPYNLLSGLPPSHQWYTVLDLKDAFFCLRLHPTSQPLFAFEWRDPEMGISGQLTWTRLPQGFKNSPTLFNEALHRDLAGFRIQHPDLILLQYVDDLLLAATSELDCQQGTRALLQTLGDLGYRASAKKAQICQKQVKYLGYLLKEGQRWLTEARKETVMGQPIPKTPRQLREFLGKAGFCRLFIPGFAEMAAPLYPLTKPGTLFNWGPDQQKAFQEIKQALLTAPALGLPDLTKPFELFVDEKQGYAKGVLTQKLGPWRRPVAYLSKKLDPVAAGWPPCLRMVAAIAVLTKDAGKLTMGQPLVILAPHAVEALVKQPPDRWLSNARMTHYQALLLDTDRVQFGPVVALNPATLLPLPEEGLQHDCLDILAEAHGTRSDLMDQPLPDADHTWYTDGSSFLQEGQRKAGAAVTTETEVIWARALPAGTSAQRAELIALTQALKMAEGKKLNVYTDSRYAFATAHIHGEIYRRRGWLTSEGKEIKNKDEILALLKALFLPKRLSIIHCPGHQKGNSAEARGNRMADQAAREVATRETPETSTLLAGKRTADGSEFEKRTADGSEFESPKKKAKVE

SEQ ID NO: 2315 - protein, 2096 aa, synthetic construct
MPAAKRVKLDGGDKKYSIGLDIGTNSVGWAVITDEYKVPSKKFKVLGNTDRHSIKKNLIGALLFDSGETAEATRLKRTARRRYTRRKNRICYLQEIFSNEMAKVDDSFFHRLEESFLVEEDKKHERHPIFGNIVDEVAYHEKYPTIYHLRKKLVDSTDKADLRLIYLALAHMIKFRGHFLIEGDLNPDNSDVDKLFIQLVQTYNQLFEENPINASGVDAKAILSARLSKSRRLENLIAQLPGEKKNGLFGNLIALSLGLTPNFKSNFDLAEDAKLQLSKDTYDDDLDNLLAQIGDQYADLFLAAKNLSDAILLSDILRVNTEITKAPLSASMIKRYDEHHQDLTLLKALVRQQLPEKYKEIFFDQSKNGYAGYIDGGASQEEFYKFIKPILEKMDGTEELLVKLNREDLLRKQRTFDNGSIPHQIHLGELHAILRRQEDFYPFLKDNREKIEKILTFRIPYYVGPLARGNSRFAWMTRKSEETITPWNFEEVVDKGASAQSFIERMTNFDKNLPNEKVLPKHSLLYEYFTVYNELTKVKYVTEGMRKPAFLSGEQKKAIVDLLFKTNRKVTVKQLKEDYFKKIECFDSVEISGVEDRFNASLGTYHDLLKIIKDKDFLDNEENEDILEDIVLTLTLFEDREMIEERLKTYAHLFDDKVMKQLKRRRYTGWGRLSRKLINGIRDKQSGKTILDFLKSDGFANRNFMQLIHDDSLTFKEDIQKAQVSGQGDSLHEHIANLAGSPAIKKGILQTVKVVDELVKVMGRHKPENIVIEMARENQTTQKGQKNSRERMKRIEEGIKELGSQILKEHPVENTQLQNEKLYLYYLQNGRDMYVDQELDINRLSDYDVDHIVPQSFLKDDSIDNKVLTRSDKARGKSDNVPSEEVVKKMKNYWRQLLNAKLITQRKFDNLTKAERGGLSELDKAGFIKRQLVETRQITKHVAQILDSRMNTKYDENDKLIREVKVITLKSKLVSDFRKDFQFYKVREINNYHHAHDAYLNAVVGTALIKKYPKLESEFVYGDYKVYDVRKMIAKSEQEIGKATAKYFFYSNIMNFFKTEITLANGEIRKRPLIETNGETGEIVWDKGRDFATVRKVLSMPQVNIVKKTEVQTGGFSKESILPKRNSDKLIARKKDWDPKKYGGFDSPTVAYSVLVVAKVEKGKSKKLKSVKELLGITIMERSSFEKNPIDFLEAKGYKEVKKDLIIKLPKYSLFELENGRKRMLASAGELQKGNELALPSKYVNFLYLASHYEKLKGSPEDNEQKQLFVEQHKHYLDEIIEQISEFSKRVILADANLDKVLSAYNKHRDKPIREQAENIIHLFTLTNLGAPAAFKYFDTTIDRKRYTSTKEVLDATLIHQSITGLYETRIDLSQLGGDGGEAAAKPAPGGSGGTLNIEDEYRLHETSKEPDVSLGSTWLSDFPQAWAETGGMGLAVRQAPLIIPLKATSTPVSIKQYPMSQEARLGIKPHIQRLLDQGILVPCQSPWNTPLLPVKKPGTNDYRPVQDLREVNKRVEDIHPTVPNPYNLLSGLPPSHQWYTVLDLKDAFFCLRLHPTSQPLFAFEWRDPEMGISGQLTWTRLPQGFKNSPTLFNEALHRDLAGFRIQHPDLILLQYVDDLLLAATSELDCQQGTRALLQTLGDLGYRASAKKAQICQKQVKYLGYLLKEGQRWLTEARKETVMGQPIPKTPRQLREFLGKAGFCRLFIPGFAEMAAPLYPLTKPGTLFNWGPDQQKAFQEIKQALLTAPALGLPDLTKPFELFVDEKQGYAKGVLTQKLGPWRRPVAYLSKKLDPVAAGWPPCLRMVAAIAVLTKDAGKLTMGQPLVILAPHAVEALVKQPPDRWLSNARMTHYQALLLDTDRVQFGPVVALNPATLLPLPEEGLQHDCLDILAEAHGTRSDLMDQPLPDADHTWYTDGSSFLQEGQRKAGAAVTTETEVIWARALPAGTSAQRAELIALTQALKMAEGKKLNVYTDSRYAFATAHIHGEIYRRRGWLTSEGKEIKNKDEILALLKALFLPKRLSIIHCPGHQKGNSAEARGNRMADQAAREVATRETPETSTLLAGKRTADGSEFEKRTADGSEFESPKKKAKVE

SEQ ID NO: 2316 - protein, 2096 aa, synthetic construct
MPAAKRVKLDGGDKKYSIGLDIGTNSVGWAVITDEYKVPSKKFKVLGNTDRHSIKKNLIGALLFDSGETAEATRLKRTARRRYTRRKNRICYLQEIFSNEMAKVDDSFFHRLEESFLVEEDKKHERHPIFGNIVDEVAYHEKYPTIYHLRKKLVDSTDKADLRLIYLALAHMIKFRGHFLIEGDLNPDNSDVDKLFIQLVQTYNQLFEENPINASGVDAKAILSARLSKSRRLENLIAQLPGEKKNGLFGNLIALSLGLTPNFKSNFDLAEDAKLQLSKDTYDDDLDNLLAQIGDQYADLFLAAKNLSDAILLSDILRVNTEITKAPLSASMIKRYDEHHQDLTLLKALVRQQLPEKYKEIFFDQSKNGYAGYIDGGASQEEFYKFIKPILEKMDGTEELLVKLNREDLLRKQRTFDNGSIPHQIHLGELHAILRRQEDFYPFLKDNREKIEKILTFRIPYYVGPLARGNSRFAWMTRKSEETITPWNFEEVVDKGASAQSFIERMTNFDKNLPNEKVLPKHSLLYEYFTVYNELTKVKYVTEGMRKPAFLSGEQKKAIVDLLFKTNRKVTVKQLKEDYFKKIECFDSVEISGVEDRFNASLGTYHDLLKIIKDKDFLDNEENEDILEDIVLTLTLFEDREMIEERLKTYAHLFDDKVMKQLKRRRYTGWGRLSRKLINGIRDKQSGKTILDFLKSDGFANRNFMQLIHDDSLTFKEDIQKAQVSGQGDSLHEHIANLAGSPAIKKGILQTVKVVDELVKVMGRHKPENIVIEMARENQTTQKGQKNSRERMKRIEEGIKELGSQILKEHPVENTQLQNEKLYLYYLQNGRDMYVDQELDINRLSDYDVDHIVPQSFLKDDSIDNKVLTRSDKARGKSDNVPSEEVVKKMKNYWRQLLNAKLITQRKFDNLTKAERGGLSELDKAGFIKRQLVETRQITKHVAQILDSRMNTKYDENDKLIREVKVITLKSKLVSDFRKDFQFYKVREINNYHHAHDAYLNAVVGTALIKKYPKLESEFVYGDYKVYDVRKMIAKSEQEIGKATAKYFFYSNIMNFFKTEITLANGEIRKRPLIETNGETGEIVWDKGRDFATVRKVLSMPQVNIVKKTEVQTGGFSKESILPKRNSDKLIARKKDWDPKKYGGFDSPTVAYSVLVVAKVEKGKSKKLKSVKELLGITIMERSSFEKNPIDFLEAKGYKEVKKDLIIKLPKYSLFELENGRKRMLASAGELQKGNELALPSKYVNFLYLASHYEKLKGSPEDNEQKQLFVEQHKHYLDEIIEQISEFSKRVILADANLDKVLSAYNKHRDKPIREQAENIIHLFTLTNLGAPAAFKYFDTTIDRKRYTSTKEVLDATLIHQSITGLYETRIDLSQLGGDGGGGGEAAAKGSSGGTLNIEDEYRLHETSKEPDVSLGSTWLSDFPQAWAETGGMGLAVRQAPLIIPLKATSTPVSIKQYPMSQEARLGIKPHIQRLLDQGILVPCQSPWNTPLLPVKKPGTNDYRPVQDLREVNKRVEDIHPTVPNPYNLLSGLPPSHQWYTVLDLKDAFFCLRLHPTSQPLFAFEWRDPEMGISGQLTWTRLPQGFKNSPTLFNEALHRDLAGFRIQHPDLILLQYVDDLLLAATSELDCQQGTRALLQTLGDLGYRASAKKAQICQKQVKYLGYLLKEGQRWLTEARKETVMGQPIPKTPRQLREFLGKAGFCRLFIPGFAEMAAPLYPLTKPGTLFNWGPDQQKAFQEIKQALLTAPALGLPDLTKPFELFVDEKQGYAKGVLTQKLGPWRRPVAYLSKKLDPVAAGWPPCLRMVAAIAVLTKDAGKLTMGQPLVILAPHAVEALVKQPPDRWLSNARMTHYQALLLDTDRVQFGPVVALNPATLLPLPEEGLQHDCLDILAEAHGTRSDLMDQPLPDADHTWYTDGSSFLQEGQRKAGAAVTTETEVIWARALPAGTSAQRAELIALTQALKMAEGKKLNVYTDSRYAFATAHIHGEIYRRRGWLTSEGKEIKNKDEILALLKALFLPKRLSIIHCPGHQKGNSAEARGNRMADQAAREVATRETPETSTLLAGKRTADGSEFEKRTADGSEFESPKKKAKVE

SEQ ID NO: 2317 - protein, 2094 aa, synthetic construct
MPAAKRVKLDGGDKKYSIGLDIGTNSVGWAVITDEYKVPSKKFKVLGNTDRHSIKKNLIGALLFDSGETAEATRLKRTARRRYTRRKNRICYLQEIFSNEMAKVDDSFFHRLEESFLVEEDKKHERHPIFGNIVDEVAYHEKYPTIYHLRKKLVDSTDKADLRLIYLALAHMIKFRGHFLIEGDLNPDNSDVDKLFIQLVQTYNQLFEENPINASGVDAKAILSARLSKSRRLENLIAQLPGEKKNGLFGNLIALSLGLTPNFKSNFDLAEDAKLQLSKDTYDDDLDNLLAQIGDQYADLFLAAKNLSDAILLSDILRVNTEITKAPLSASMIKRYDEHHQDLTLLKALVRQQLPEKYKEIFFDQSKNGYAGYIDGGASQEEFYKFIKPILEKMDGTEELLVKLNREDLLRKQRTFDNGSIPHQIHLGELHAILRRQEDFYPFLKDNREKIEKILTFRIPYYVGPLARGNSRFAWMTRKSEETITPWNFEEVVDKGASAQSFIERMTNFDKNLPNEKVLPKHSLLYEYFTVYNELTKVKYVTEGMRKPAFLSGEQKKAIVDLLFKTNRKVTVKQLKEDYFKKIECFDSVEISGVEDRFNASLGTYHDLLKIIKDKDFLDNEENEDILEDIVLTLTLFEDREMIEERLKTYAHLFDDKVMKQLKRRRYTGWGRLSRKLINGIRDKQSGKTILDFLKSDGFANRNFMQLIHDDSLTFKEDIQKAQVSGQGDSLHEHIANLAGSPAIKKGILQTVKVVDELVKVMGRHKPENIVIEMARENQTTQKGQKNSRERMKRIEEGIKELGSQILKEHPVENTQLQNEKLYLYYLQNGRDMYVDQELDINRLSDYDVDHIVPQSFLKDDSIDNKVLTRSDKARGKSDNVPSEEVVKKMKNYWRQLLNAKLITQRKFDNLTKAERGGLSELDKAGFIKRQLVETRQITKHVAQILDSRMNTKYDENDKLIREVKVITLKSKLVSDFRKDFQFYKVREINNYHHAHDAYLNAVVGTALIKKYPKLESEFVYGDYKVYDVRKMIAKSEQEIGKATAKYFFYSNIMNFFKTEITLANGEIRKRPLIETNGETGEIVWDKGRDFATVRKVLSMPQVNIVKKTEVQTGGFSKESILPKRNSDKLIARKKDWDPKKYGGFDSPTVAYSVLVVAKVEKGKSKKLKSVKELLGITIMERSSFEKNPIDFLEAKGYKEVKKDLIIKLPKYSLFELENGRKRMLASAGELQKGNELALPSKYVNFLYLASHYEKLKGSPEDNEQKQLFVEQHKHYLDEIIEQISEFSKRVILADANLDKVLSAYNKHRDKPIREQAENIIHLFTLTNLGAPAAFKYFDTTIDRKRYTSTKEVLDATLIHQSITGLYETRIDLSQLGGDGGGGSGGGPAPGGTLNIEDEYRLHETSKEPDVSLGSTWLSDFPQAWAETGGMGLAVRQAPLIIPLKATSTPVSIKQYPMSQEARLGIKPHIQRLLDQGILVPCQSPWNTPLLPVKKPGTNDYRPVQDLREVNKRVEDIHPTVPNPYNLLSGLPPSHQWYTVLDLKDAFFCLRLHPTSQPLFAFEWRDPEMGISGQLTWTRLPQGFKNSPTLFNEALHRDLAGFRIQHPDLILLQYVDDLLLAATSELDCQQGTRALLQTLGDLGYRASAKKAQICQKQVKYLGYLLKEGQRWLTEARKETVMGQPIPKTPRQLREFLGKAGFCRLFIPGFAEMAAPLYPLTKPGTLFNWGPDQQKAFQEIKQALLTAPALGLPDLTKPFELFVDEKQGYAKGVLTQKLGPWRRPVAYLSKKLDPVAAGWPPCLRMVAAIAVLTKDAGKLTMGQPLVILAPHAVEALVKQPPDRWLSNARMTHYQALLLDTDRVQFGPVVALNPATLLPLPEEGLQHDCLDILAEAHGTRSDLMDQPLPDADHTWYTDGSSFLQEGQRKAGAAVTTETEVIWARALPAGTSAQRAELIALTQALKMAEGKKLNVYTDSRYAFATAHIHGEIYRRRGWLTSEGKEIKNKDEILALLKALFLPKRLSIIHCPGHQKGNSAEARGNRMADQAAREVATRETPETSTLLAGKRTADGSEFEKRTADGSEFESPKKKAKVE

SEQ ID NO: 2318 - skipped

SEQ ID NO: 2319 - protein, 2097 aa, synthetic construct
MPAAKRVKLDGGDKKYSIGLDIGTNSVGWAVITDEYKVPSKKFKVLGNTDRHSIKKNLIGALLFDSGETAEATRLKRTARRRYTRRKNRICYLQEIFSNEMAKVDDSFFHRLEESFLVEEDKKHERHPIFGNIVDEVAYHEKYPTIYHLRKKLVDSTDKADLRLIYLALAHMIKFRGHFLIEGDLNPDNSDVDKLFIQLVQTYNQLFEENPINASGVDAKAILSARLSKSRRLENLIAQLPGEKKNGLFGNLIALSLGLTPNFKSNFDLAEDAKLQLSKDTYDDDLDNLLAQIGDQYADLFLAAKNLSDAILLSDILRVNTEITKAPLSASMIKRYDEHHQDLTLLKALVRQQLPEKYKEIFFDQSKNGYAGYIDGGASQEEFYKFIKPILEKMDGTEELLVKLNREDLLRKQRTFDNGSIPHQIHLGELHAILRRQEDFYPFLKDNREKIEKILTFRIPYYVGPLARGNSRFAWMTRKSEETITPWNFEEVVDKGASAQSFIERMTNFDKNLPNEKVLPKHSLLYEYFTVYNELTKVKYVTEGMRKPAFLSGEQKKAIVDLLFKTNRKVTVKQLKEDYFKKIECFDSVEISGVEDRFNASLGTYHDLLKIIKDKDFLDNEENEDILEDIVLTLTLFEDREMIEERLKTYAHLFDDKVMKQLKRRRYTGWGRLSRKLINGIRDKQSGKTILDFLKSDGFANRNFMQLIHDDSLTFKEDIQKAQVSGQGDSLHEHIANLAGSPAIKKGILQTVKVVDELVKVMGRHKPENIVIEMARENQTTQKGQKNSRERMKRIEEGIKELGSQILKEHPVENTQLQNEKLYLYYLQNGRDMYVDQELDINRLSDYDVDHIVPQSFLKDDSIDNKVLTRSDKARGKSDNVPSEEVVKKMKNYWRQLLNAKLITQRKFDNLTKAERGGLSELDKAGFIKRQLVETRQITKHVAQILDSRMNTKYDENDKLIREVKVITLKSKLVSDFRKDFQFYKVREINNYHHAHDAYLNAVVGTALIKKYPKLESEFVYGDYKVYDVRKMIAKSEQEIGKATAKYFFYSNIMNFFKTEITLANGEIRKRPLIETNGETGEIVWDKGRDFATVRKVLSMPQVNIVKKTEVQTGGFSKESILPKRNSDKLIARKKDWDPKKYGGFDSPTVAYSVLVVAKVEKGKSKKLKSVKELLGITIMERSSFEKNPIDFLEAKGYKEVKKDLIIKLPKYSLFELENGRKRMLASAGELQKGNELALPSKYVNFLYLASHYEKLKGSPEDNEQKQLFVEQHKHYLDEIIEQISEFSKRVILADANLDKVLSAYNKHRDKPIREQAENIIHLFTLTNLGAPAAFKYFDTTIDRKRYTSTKEVLDATLIHQSITGLYETRIDLSQLGGDGGGGSGGSGGSGGSGGTLNIEDEYRLHETSKEPDVSLGSTWLSDFPQAWAETGGMGLAVRQAPLIIPLKATSTPVSIKQYPMSQEARLGIKPHIQRLLDQGILVPCQSPWNTPLLPVKKPGTNDYRPVQDLREVNKRVEDIHPTVPNPYNLLSGLPPSHQWYTVLDLKDAFFCLRLHPTSQPLFAFEWRDPEMGISGQLTWTRLPQGFKNSPTLFNEALHRDLAGFRIQHPDLILLQYVDDLLLAATSELDCQQGTRALLQTLGDLGYRASAKKAQICQKQVKYLGYLLKEGQRWLTEARKETVMGQPIPKTPRQLREFLGKAGFCRLFIPGFAEMAAPLYPLTKPGTLFNWGPDQQKAFQEIKQALLTAPALGLPDLTKPFELFVDEKQGYAKGVLTQKLGPWRRPVAYLSKKLDPVAAGWPPCLRMVAAIAVLTKDAGKLTMGQPLVILAPHAVEALVKQPPDRWLSNARMTHYQALLLDTDRVQFGPVVALNPATLLPLPEEGLQHDCLDILAEAHGTRSDLMDQPLPDADHTWYTDGSSFLQEGQRKAGAAVTTETEVIWARALPAGTSAQRAELIALTQALKMAEGKKLNVYTDSRYAFATAHIHGEIYRRRGWLTSEGKEIKNKDEILALLKALFLPKRLSIIHCPGHQKGNSAEARGNRMADQAAREVATRETPETSTLLAGKRTADGSEFEKRTADGSEFESPKKKAKVE

SEQ ID NO: 2320 - protein, 2094 aa, synthetic construct
MPAAKRVKLDGGDKKYSIGLDIGTNSVGWAVITDEYKVPSKKFKVLGNTDRHSIKKNLIGALLFDSGETAEATRLKRTARRRYTRRKNRICYLQEIFSNEMAKVDDSFFHRLEESFLVEEDKKHERHPIFGNIVDEVAYHEKYPTIYHLRKKLVDSTDKADLRLIYLALAHMIKFRGHFLIEGDLNPDNSDVDKLFIQLVQTYNQLFEENPINASGVDAKAILSARLSKSRRLENLIAQLPGEKKNGLFGNLIALSLGLTPNFKSNFDLAEDAKLQLSKDTYDDDLDNLLAQIGDQYADLFLAAKNLSDAILLSDILRVNTEITKAPLSASMIKRYDEHHQDLTLLKALVRQQLPEKYKEIFFDQSKNGYAGYIDGGASQEEFYKFIKPILEKMDGTEELLVKLNREDLLRKQRTFDNGSIPHQIHLGELHAILRRQEDFYPFLKDNREKIEKILTFRIPYYVGPLARGNSRFAWMTRKSEETITPWNFEEVVDKGASAQSFIERMTNFDKNLPNEKVLPKHSLLYEYFTVYNELTKVKYVTEGMRKPAFLSGEQKKAIVDLLFKTNRKVTVKQLKEDYFKKIECFDSVEISGVEDRFNASLGTYHDLLKIIKDKDFLDNEENEDILEDIVLTLTLFEDREMIEERLKTYAHLFDDKVMKQLKRRRYTGWGRLSRKLINGIRDKQSGKTILDFLKSDGFANRNFMQLIHDDSLTFKEDIQKAQVSGQGDSLHEHIANLAGSPAIKKGILQTVKVVDELVKVMGRHKPENIVIEMARENQTTQKGQKNSRERMKRIEEGIKELGSQILKEHPVENTQLQNEKLYLYYLQNGRDMYVDQELDINRLSDYDVDHIVPQSFLKDDSIDNKVLTRSDKARGKSDNVPSEEVVKKMKNYWRQLLNAKLITQRKFDNLTKAERGGLSELDKAGFIKRQLVETRQITKHVAQILDSRMNTKYDENDKLIREVKVITLKSKLVSDFRKDFQFYKVREINNYHHAHDAYLNAVVGTALIKKYPKLESEFVYGDYKVYDVRKMIAKSEQEIGKATAKYFFYSNIMNFFKTEITLANGEIRKRPLIETNGETGEIVWDKGRDFATVRKVLSMPQVNIVKKTEVQTGGFSKESILPKRNSDKLIARKKDWDPKKYGGFDSPTVAYSVLVVAKVEKGKSKKLKSVKELLGITIMERSSFEKNPIDFLEAKGYKEVKKDLIIKLPKYSLFELENGRKRMLASAGELQKGNELALPSKYVNFLYLASHYEKLKGSPEDNEQKQLFVEQHKHYLDEIIEQISEFSKRVILADANLDKVLSAYNKHRDKPIREQAENIIHLFTLTNLGAPAAFKYFDTTIDRKRYTSTKEVLDATLIHQSITGLYETRIDLSQLGGDGGGGGPAPGGSGGTLNIEDEYRLHETSKEPDVSLGSTWLSDFPQAWAETGGMGLAVRQAPLIIPLKATSTPVSIKQYPMSQEARLGIKPHIQRLLDQGILVPCQSPWNTPLLPVKKPGTNDYRPVQDLREVNKRVEDIHPTVPNPYNLLSGLPPSHQWYTVLDLKDAFFCLRLHPTSQPLFAFEWRDPEMGISGQLTWTRLPQGFKNSPTLFNEALHRDLAGFRIQHPDLILLQYVDDLLLAATSELDCQQGTRALLQTLGDLGYRASAKKAQICQKQVKYLGYLLKEGQRWLTEARKETVMGQPIPKTPRQLREFLGKAGFCRLFIPGFAEMAAPLYPLTKPGTLFNWGPDQQKAFQEIKQALLTAPALGLPDLTKPFELFVDEKQGYAKGVLTQKLGPWRRPVAYLSKKLDPVAAGWPPCLRMVAAIAVLTKDAGKLTMGQPLVILAPHAVEALVKQPPDRWLSNARMTHYQALLLDTDRVQFGPVVALNPATLLPLPEEGLQHDCLDILAEAHGTRSDLMDQPLPDADHTWYTDGSSFLQEGQRKAGAAVTTETEVIWARALPAGTSAQRAELIALTQALKMAEGKKLNVYTDSRYAFATAHIHGEIYRRRGWLTSEGKEIKNKDEILALLKALFLPKRLSIIHCPGHQKGNSAEARGNRMADQAAREVATRETPETSTLLAGKRTADGSEFEKRTADGSEFESPKKKAKVE

SEQ ID NO: 2321 - skipped

SEQ ID NO: 2322 - protein, 2115 aa, synthetic construct
MPAAKRVKLDGGDKKYSIGLDIGTNSVGWAVITDEYKVPSKKFKVLGNTDRHSIKKNLIGALLFDSGETAEATRLKRTARRRYTRRKNRICYLQEIFSNEMAKVDDSFFHRLEESFLVEEDKKHERHPIFGNIVDEVAYHEKYPTIYHLRKKLVDSTDKADLRLIYLALAHMIKFRGHFLIEGDLNPDNSDVDKLFIQLVQTYNQLFEENPINASGVDAKAILSARLSKSRRLENLIAQLPGEKKNGLFGNLIALSLGLTPNFKSNFDLAEDAKLQLSKDTYDDDLDNLLAQIGDQYADLFLAAKNLSDAILLSDILRVNTEITKAPLSASMIKRYDEHHQDLTLLKALVRQQLPEKYKEIFFDQSKNGYAGYIDGGASQEEFYKFIKPILEKMDGTEELLVKLNREDLLRKQRTFDNGSIPHQIHLGELHAILRRQEDFYPFLKDNREKIEKILTFRIPYYVGPLARGNSRFAWMTRKSEETITPWNFEEVVDKGASAQSFIERMTNFDKNLPNEKVLPKHSLLYEYFTVYNELTKVKYVTEGMRKPAFLSGEQKKAIVDLLFKTNRKVTVKQLKEDYFKKIECFDSVEISGVEDRFNASLGTYHDLLKIIKDKDFLDNEENEDILEDIVLTLTLFEDREMIEERLKTYAHLFDDKVMKQLKRRRYTGWGRLSRKLINGIRDKQSGKTILDFLKSDGFANRNFMQLIHDDSLTFKEDIQKAQVSGQGDSLHEHIANLAGSPAIKKGILQTVKVVDELVKVMGRHKPENIVIEMARENQTTQKGQKNSRERMKRIEEGIKELGSQILKEHPVENTQLQNEKLYLYYLQNGRDMYVDQELDINRLSDYDVDHIVPQSFLKDDSIDNKVLTRSDKARGKSDNVPSEEVVKKMKNYWRQLLNAKLITQRKFDNLTKAERGGLSELDKAGFIKRQLVETRQITKHVAQILDSRMNTKYDENDKLIREVKVITLKSKLVSDFRKDFQFYKVREINNYHHAHDAYLNAVVGTALIKKYPKLESEFVYGDYKVYDVRKMIAKSEQEIGKATAKYFFYSNIMNFFKTEITLANGEIRKRPLIETNGETGEIVWDKGRDFATVRKVLSMPQVNIVKKTEVQTGGFSKESILPKRNSDKLIARKKDWDPKKYGGFDSPTVAYSVLVVAKVEKGKSKKLKSVKELLGITIMERSSFEKNPIDFLEAKGYKEVKKDLIIKLPKYSLFELENGRKRMLASAGELQKGNELALPSKYVNFLYLASHYEKLKGSPEDNEQKQLFVEQHKHYLDEIIEQISEFSKRVILADANLDKVLSAYNKHRDKPIREQAENIIHLFTLTNLGAPAAFKYFDTTIDRKRYTSTKEVLDATLIHQSITGLYETRIDLSQLGGDGGEAAAKEAAAKEAAAKEAAAKEAAAKEAAAKGGTLNIEDEYRLHETSKEPDVSLGSTWLSDFPQAWAETGGMGLAVRQAPLIIPLKATSTPVSIKQYPMSQEARLGIKPHIQRLLDQGILVPCQSPWNTPLLPVKKPGTNDYRPVQDLREVNKRVEDIHPTVPNPYNLLSGLPPSHQWYTVLDLKDAFFCLRLHPTSQPLFAFEWRDPEMGISGQLTWTRLPQGFKNSPTLFNEALHRDLAGFRIQHPDLILLQYVDDLLLAATSELDCQQGTRALLQTLGDLGYRASAKKAQICQKQVKYLGYLLKEGQRWLTEARKETVMGQPIPKTPRQLREFLGKAGFCRLFIPGFAEMAAPLYPLTKPGTLFNWGPDQQKAFQEIKQALLTAPALGLPDLTKPFELFVDEKQGYAKGVLTQKLGPWRRPVAYLSKKLDPVAAGWPPCLRMVAAIAVLTKDAGKLTMGQPLVILAPHAVEALVKQPPDRWLSNARMTHYQALLLDTDRVQFGPVVALNPATLLPLPEEGLQHDCLDILAEAHGTRSDLMDQPLPDADHTWYTDGSSFLQEGQRKAGAAVTTETEVIWARALPAGTSAQRAELIALTQALKMAEGKKLNVYTDSRYAFATAHIHGEIYRRRGWLTSEGKEIKNKDEILALLKALFLPKRLSIIHCPGHQKGNSAEARGNRMADQAAREVATRETPETSTLLAGKRTADGSEFEKRTADGSEFESPKKKAKVE

SEQ ID NO: 2323 - protein, 2088 aa, synthetic construct
MPAAKRVKLDGGDKKYSIGLDIGTNSVGWAVITDEYKVPSKKFKVLGNTDRHSIKKNLIGALLFDSGETAEATRLKRTARRRYTRRKNRICYLQEIFSNEMAKVDDSFFHRLEESFLVEEDKKHERHPIFGNIVDEVAYHEKYPTIYHLRKKLVDSTDKADLRLIYLALAHMIKFRGHFLIEGDLNPDNSDVDKLFIQLVQTYNQLFEENPINASGVDAKAILSARLSKSRRLENLIAQLPGEKKNGLFGNLIALSLGLTPNFKSNFDLAEDAKLQLSKDTYDDDLDNLLAQIGDQYADLFLAAKNLSDAILLSDILRVNTEITKAPLSASMIKRYDEHHQDLTLLKALVRQQLPEKYKEIFFDQSKNGYAGYIDGGASQEEFYKFIKPILEKMDGTEELLVKLNREDLLRKQRTFDNGSIPHQIHLGELHAILRRQEDFYPFLKDNREKIEKILTFRIPYYVGPLARGNSRFAWMTRKSEETITPWNFEEVVDKGASAQSFIERMTNFDKNLPNEKVLPKHSLLYEYFTVYNELTKVKYVTEGMRKPAFLSGEQKKAIVDLLFKTNRKVTVKQLKEDYFKKIECFDSVEISGVEDRFNASLGTYHDLLKIIKDKDFLDNEENEDILEDIVLTLTLFEDREMIEERLKTYAHLFDDKVMKQLKRRRYTGWGRLSRKLINGIRDKQSGKTILDFLKSDGFANRNFMQLIHDDSLTFKEDIQKAQVSGQGDSLHEHIANLAGSPAIKKGILQTVKVVDELVKVMGRHKPENIVIEMARENQTTQKGQKNSRERMKRIEEGIKELGSQILKEHPVENTQLQNEKLYLYYLQNGRDMYVDQELDINRLSDYDVDHIVPQSFLKDDSIDNKVLTRSDKARGKSDNVPSEEVVKKMKNYWRQLLNAKLITQRKFDNLTKAERGGLSELDKAGFIKRQLVETRQITKHVAQILDSRMNTKYDENDKLIREVKVITLKSKLVSDFRKDFQFYKVREINNYHHAHDAYLNAVVGTALIKKYPKLESEFVYGDYKVYDVRKMIAKSEQEIGKATAKYFFYSNIMNFFKTEITLANGEIRKRPLIETNGETGEIVWDKGRDFATVRKVLSMPQVNIVKKTEVQTGGFSKESILPKRNSDKLIARKKDWDPKKYGGFDSPTVAYSVLVVAKVEKGKSKKLKSVKELLGITIMERSSFEKNPIDFLEAKGYKEVKKDLIIKLPKYSLFELENGRKRMLASAGELQKGNELALPSKYVNFLYLASHYEKLKGSPEDNEQKQLFVEQHKHYLDEIIEQISEFSKRVILADANLDKVLSAYNKHRDKPIREQAENIIHLFTLTNLGAPAAFKYFDTTIDRKRYTSTKEVLDATLIHQSITGLYETRIDLSQLGGDGGGGSGGTLNIEDEYRLHETSKEPDVSLGSTWLSDFPQAWAETGGMGLAVRQAPLIIPLKATSTPVSIKQYPMSQEARLGIKPHIQRLLDQGILVPCQSPWNTPLLPVKKPGTNDYRPVQDLREVNKRVEDIHPTVPNPYNLLSGLPPSHQWYTVLDLKDAFFCLRLHPTSQPLFAFEWRDPEMGISGQLTWTRLPQGFKNSPTLFNEALHRDLAGFRIQHPDLILLQYVDDLLLAATSELDCQQGTRALLQTLGDLGYRASAKKAQICQKQVKYLGYLLKEGQRWLTEARKETVMGQPIPKTPRQLREFLGKAGFCRLFIPGFAEMAAPLYPLTKPGTLFNWGPDQQKAFQEIKQALLTAPALGLPDLTKPFELFVDEKQGYAKGVLTQKLGPWRRPVAYLSKKLDPVAAGWPPCLRMVAAIAVLTKDAGKLTMGQPLVILAPHAVEALVKQPPDRWLSNARMTHYQALLLDTDRVQFGPVVALNPATLLPLPEEGLQHDCLDILAEAHGTRSDLMDQPLPDADHTWYTDGSSFLQEGQRKAGAAVTTETEVIWARALPAGTSAQRAELIALTQALKMAEGKKLNVYTDSRYAFATAHIHGEIYRRRGWLTSEGKEIKNKDEILALLKALFLPKRLSIIHCPGHQKGNSAEARGNRMADQAAREVATRETPETSTLLAGKRTADGSEFEKRTADGSEFESPKKKAKVE

SEQ ID NO: 2324 - protein, 2110 aa, synthetic construct
MPAAKRVKLDGGDKKYSIGLDIGTNSVGWAVITDEYKVPSKKFKVLGNTDRHSIKKNLIGALLFDSGETAEATRLKRTARRRYTRRKNRICYLQEIFSNEMAKVDDSFFHRLEESFLVEEDKKHERHPIFGNIVDEVAYHEKYPTIYHLRKKLVDSTDKADLRLIYLALAHMIKFRGHFLIEGDLNPDNSDVDKLFIQLVQTYNQLFEENPINASGVDAKAILSARLSKSRRLENLIAQLPGEKKNGLFGNLIALSLGLTPNFKSNFDLAEDAKLQLSKDTYDDDLDNLLAQIGDQYADLFLAAKNLSDAILLSDILRVNTEITKAPLSASMIKRYDEHHQDLTLLKALVRQQLPEKYKEIFFDQSKNGYAGYIDGGASQEEFYKFIKPILEKMDGTEELLVKLNREDLLRKQRTFDNGSIPHQIHLGELHAILRRQEDFYPFLKDNREKIEKILTFRIPYYVGPLARGNSRFAWMTRKSEETITPWNFEEVVDKGASAQSFIERMTNFDKNLPNEKVLPKHSLLYEYFTVYNELTKVKYVTEGMRKPAFLSGEQKKAIVDLLFKTNRKVTVKQLKEDYFKKIECFDSVEISGVEDRFNASLGTYHDLLKIIKDKDFLDNEENEDILEDIVLTLTLFEDREMIEERLKTYAHLFDDKVMKQLKRRRYTGWGRLSRKLINGIRDKQSGKTILDFLKSDGFANRNFMQLIHDDSLTFKEDIQKAQVSGQGDSLHEHIANLAGSPAIKKGILQTVKVVDELVKVMGRHKPENIVIEMARENQTTQKGQKNSRERMKRIEEGIKELGSQILKEHPVENTQLQNEKLYLYYLQNGRDMYVDQELDINRLSDYDVDHIVPQSFLKDDSIDNKVLTRSDKARGKSDNVPSEEVVKKMKNYWRQLLNAKLITQRKFDNLTKAERGGLSELDKAGFIKRQLVETRQITKHVAQILDSRMNTKYDENDKLIREVKVITLKSKLVSDFRKDFQFYKVREINNYHHAHDAYLNAVVGTALIKKYPKLESEFVYGDYKVYDVRKMIAKSEQEIGKATAKYFFYSNIMNFFKTEITLANGEIRKRPLIETNGETGEIVWDKGRDFATVRKVLSMPQVNIVKKTEVQTGGFSKESILPKRNSDKLIARKKDWDPKKYGGFDSPTVAYSVLVVAKVEKGKSKKLKSVKELLGITIMERSSFEKNPIDFLEAKGYKEVKKDLIIKLPKYSLFELENGRKRMLASAGELQKGNELALPSKYVNFLYLASHYEKLKGSPEDNEQKQLFVEQHKHYLDEIIEQISEFSKRVILADANLDKVLSAYNKHRDKPIREQAENIIHLFTLTNLGAPAAFKYFDTTIDRKRYTSTKEVLDATLIHQSITGLYETRIDLSQLGGDGGEAAAKEAAAKEAAAKEAAAKEAAAKGGTLNIEDEYRLHETSKEPDVSLGSTWLSDFPQAWAETGGMGLAVRQAPLIIPLKATSTPVSIKQYPMSQEARLGIKPHIQRLLDQGILVPCQSPWNTPLLPVKKPGTNDYRPVQDLREVNKRVEDIHPTVPNPYNLLSGLPPSHQWYTVLDLKDAFFCLRLHPTSQPLFAFEWRDPEMGISGQLTWTRLPQGFKNSPTLFNEALHRDLAGFRIQHPDLILLQYVDDLLLAATSELDCQQGTRALLQTLGDLGYRASAKKAQICQKQVKYLGYLLKEGQRWLTEARKETVMGQPIPKTPRQLREFLGKAGFCRLFIPGFAEMAAPLYPLTKPGTLFNWGPDQQKAFQEIKQALLTAPALGLPDLTKPFELFVDEKQGYAKGVLTQKLGPWRRPVAYLSKKLDPVAAGWPPCLRMVAAIAVLTKDAGKLTMGQPLVILAPHAVEALVKQPPDRWLSNARMTHYQALLLDTDRVQFGPVVALNPATLLPLPEEGLQHDCLDILAEAHGTRSDLMDQPLPDADHTWYTDGSSFLQEGQRKAGAAVTTETEVIWARALPAGTSAQRAELIALTQALKMAEGKKLNVYTDSRYAFATAHIHGEIYRRRGWLTSEGKEIKNKDEILALLKALFLPKRLSIIHCPGHQKGNSAEARGNRMADQAAREVATRETPETSTLLAGKRTADGSEFEKRTADGSEFESPKKKAKVE

SEQ ID NO: 2325 - protein, 2105 aa, synthetic construct
MPAAKRVKLDGGDKKYSIGLDIGTNSVGWAVITDEYKVPSKKFKVLGNTDRHSIKKNLIGALLFDSGETAEATRLKRTARRRYTRRKNRICYLQEIFSNEMAKVDDSFFHRLEESFLVEEDKKHERHPIFGNIVDEVAYHEKYPTIYHLRKKLVDSTDKADLRLIYLALAHMIKFRGHFLIEGDLNPDNSDVDKLFIQLVQTYNQLFEENPINASGVDAKAILSARLSKSRRLENLIAQLPGEKKNGLFGNLIALSLGLTPNFKSNFDLAEDAKLQLSKDTYDDDLDNLLAQIGDQYADLFLAAKNLSDAILLSDILRVNTEITKAPLSASMIKRYDEHHQDLTLLKALVRQQLPEKYKEIFFDQSKNGYAGYIDGGASQEEFYKFIKPILEKMDGTEELLVKLNREDLLRKQRTFDNGSIPHQIHLGELHAILRRQEDFYPFLKDNREKIEKILTFRIPYYVGPLARGNSRFAWMTRKSEETITPWNFEEVVDKGASAQSFIERMTNFDKNLPNEKVLPKHSLLYEYFTVYNELTKVKYVTEGMRKPAFLSGEQKKAIVDLLFKTNRKVTVKQLKEDYFKKIECFDSVEISGVEDRFNASLGTYHDLLKIIKDKDFLDNEENEDILEDIVLTLTLFEDREMIEERLKTYAHLFDDKVMKQLKRRRYTGWGRLSRKLINGIRDKQSGKTILDFLKSDGFANRNFMQLIHDDSLTFKEDIQKAQVSGQGDSLHEHIANLAGSPAIKKGILQTVKVVDELVKVMGRHKPENIVIEMARENQTTQKGQKNSRERMKRIEEGIKELGSQILKEHPVENTQLQNEKLYLYYLQNGRDMYVDQELDINRLSDYDVDHIVPQSFLKDDSIDNKVLTRSDKARGKSDNVPSEEVVKKMKNYWRQLLNAKLITQRKFDNLTKAERGGLSELDKAGFIKRQLVETRQITKHVAQILDSRMNTKYDENDKLIREVKVITLKSKLVSDFRKDFQFYKVREINNYHHAHDAYLNAVVGTALIKKYPKLESEFVYGDYKVYDVRKMIAKSEQEIGKATAKYFFYSNIMNFFKTEITLANGEIRKRPLIETNGETGEIVWDKGRDFATVRKVLSMPQVNIVKKTEVQTGGFSKESILPKRNSDKLIARKKDWDPKKYGGFDSPTVAYSVLVVAKVEKGKSKKLKSVKELLGITIMERSSFEKNPIDFLEAKGYKEVKKDLIIKLPKYSLFELENGRKRMLASAGELQKGNELALPSKYVNFLYLASHYEKLKGSPEDNEQKQLFVEQHKHYLDEIIEQISEFSKRVILADANLDKVLSAYNKHRDKPIREQAENIIHLFTLTNLGAPAAFKYFDTTIDRKRYTSTKEVLDATLIHQSITGLYETRIDLSQLGGDGGEAAAKEAAAKEAAAKEAAAKGGTLNIEDEYRLHETSKEPDVSLGSTWLSDFPQAWAETGGMGLAVRQAPLIIPLKATSTPVSIKQYPMSQEARLGIKPHIQRLLDQGILVPCQSPWNTPLLPVKKPGTNDYRPVQDLREVNKRVEDIHPTVPNPYNLLSGLPPSHQWYTVLDLKDAFFCLRLHPTSQPLFAFEWRDPEMGISGQLTWTRLPQGFKNSPTLFNEALHRDLAGFRIQHPDLILLQYVDDLLLAATSELDCQQGTRALLQTLGDLGYRASAKKAQICQKQVKYLGYLLKEGQRWLTEARKETVMGQPIPKTPRQLREFLGKAGFCRLFIPGFAEMAAPLYPLTKPGTLFNWGPDQQKAFQEIKQALLTAPALGLPDLTKPFELFVDEKQGYAKGVLTQKLGPWRRPVAYLSKKLDPVAAGWPPCLRMVAAIAVLTKDAGKLTMGQPLVILAPHAVEALVKQPPDRWLSNARMTHYQALLLDTDRVQFGPVVALNPATLLPLPEEGLQHDCLDILAEAHGTRSDLMDQPLPDADHTWYTDGSSFLQEGQRKAGAAVTTETEVIWARALPAGTSAQRAELIALTQALKMAEGKKLNVYTDSRYAFATAHIHGEIYRRRGWLTSEGKEIKNKDEILALLKALFLPKRLSIIHCPGHQKGNSAEARGNRMADQAAREVATRETPETSTLLAGKRTADGSEFEKRTADGSEFESPKKKAKVE

SEQ ID NO: 2326 - protein, 2096 aa, synthetic construct
MPAAKRVKLDGGDKKYSIGLDIGTNSVGWAVITDEYKVPSKKFKVLGNTDRHSIKKNLIGALLFDSGETAEATRLKRTARRRYTRRKNRICYLQEIFSNEMAKVDDSFFHRLEESFLVEEDKKHERHPIFGNIVDEVAYHEKYPTIYHLRKKLVDSTDKADLRLIYLALAHMIKFRGHFLIEGDLNPDNSDVDKLFIQLVQTYNQLFEENPINASGVDAKAILSARLSKSRRLENLIAQLPGEKKNGLFGNLIALSLGLTPNFKSNFDLAEDAKLQLSKDTYDDDLDNLLAQIGDQYADLFLAAKNLSDAILLSDILRVNTEITKAPLSASMIKRYDEHHQDLTLLKALVRQQLPEKYKEIFFDQSKNGYAGYIDGGASQEEFYKFIKPILEKMDGTEELLVKLNREDLLRKQRTFDNGSIPHQIHLGELHAILRRQEDFYPFLKDNREKIEKILTFRIPYYVGPLARGNSRFAWMTRKSEETITPWNFEEVVDKGASAQSFIERMTNFDKNLPNEKVLPKHSLLYEYFTVYNELTKVKYVTEGMRKPAFLSGEQKKAIVDLLFKTNRKVTVKQLKEDYFKKIECFDSVEISGVEDRFNASLGTYHDLLKIIKDKDFLDNEENEDILEDIVLTLTLFEDREMIEERLKTYAHLFDDKVMKQLKRRRYTGWGRLSRKLINGIRDKQSGKTILDFLKSDGFANRNFMQLIHDDSLTFKEDIQKAQVSGQGDSLHEHIANLAGSPAIKKGILQTVKVVDELVKVMGRHKPENIVIEMARENQTTQKGQKNSRERMKRIEEGIKELGSQILKEHPVENTQLQNEKLYLYYLQNGRDMYVDQELDINRLSDYDVDHIVPQSFLKDDSIDNKVLTRSDKARGKSDNVPSEEVVKKMKNYWRQLLNAKLITQRKFDNLTKAERGGLSELDKAGFIKRQLVETRQITKHVAQILDSRMNTKYDENDKLIREVKVITLKSKLVSDFRKDFQFYKVREINNYHHAHDAYLNAVVGTALIKKYPKLESEFVYGDYKVYDVRKMIAKSEQEIGKATAKYFFYSNIMNFFKTEITLANGEIRKRPLIETNGETGEIVWDKGRDFATVRKVLSMPQVNIVKKTEVQTGGFSKESILPKRNSDKLIARKKDWDPKKYGGFDSPTVAYSVLVVAKVEKGKSKKLKSVKELLGITIMERSSFEKNPIDFLEAKGYKEVKKDLIIKLPKYSLFELENGRKRMLASAGELQKGNELALPSKYVNFLYLASHYEKLKGSPEDNEQKQLFVEQHKHYLDEIIEQISEFSKRVILADANLDKVLSAYNKHRDKPIREQAENIIHLFTLTNLGAPAAFKYFDTTIDRKRYTSTKEVLDATLIHQSITGLYETRIDLSQLGGDGGGGSEAAAKPAPGGTLNIEDEYRLHETSKEPDVSLGSTWLSDFPQAWAETGGMGLAVRQAPLIIPLKATSTPVSIKQYPMSQEARLGIKPHIQRLLDQGILVPCQSPWNTPLLPVKKPGTNDYRPVQDLREVNKRVEDIHPTVPNPYNLLSGLPPSHQWYTVLDLKDAFFCLRLHPTSQPLFAFEWRDPEMGISGQLTWTRLPQGFKNSPTLFNEALHRDLAGFRIQHPDLILLQYVDDLLLAATSELDCQQGTRALLQTLGDLGYRASAKKAQICQKQVKYLGYLLKEGQRWLTEARKETVMGQPIPKTPRQLREFLGKAGFCRLFIPGFAEMAAPLYPLTKPGTLFNWGPDQQKAFQEIKQALLTAPALGLPDLTKPFELFVDEKQGYAKGVLTQKLGPWRRPVAYLSKKLDPVAAGWPPCLRMVAAIAVLTKDAGKLTMGQPLVILAPHAVEALVKQPPDRWLSNARMTHYQALLLDTDRVQFGPVVALNPATLLPLPEEGLQHDCLDILAEAHGTRSDLMDQPLPDADHTWYTDGSSFLQEGQRKAGAAVTTETEVIWARALPAGTSAQRAELIALTQALKMAEGKKLNVYTDSRYAFATAHIHGEIYRRRGWLTSEGKEIKNKDEILALLKALFLPKRLSIIHCPGHQKGNSAEARGNRMADQAAREVATRETPETSTLLAGKRTADGSEFEKRTADGSEFESPKKKAKVE

SEQ ID NO: 2327 - protein, 2096 aa, synthetic construct
MPAAKRVKLDGGDKKYSIGLDIGTNSVGWAVITDEYKVPSKKFKVLGNTDRHSIKKNLIGALLFDSGETAEATRLKRTARRRYTRRKNRICYLQEIFSNEMAKVDDSFFHRLEESFLVEEDKKHERHPIFGNIVDEVAYHEKYPTIYHLRKKLVDSTDKADLRLIYLALAHMIKFRGHFLIEGDLNPDNSDVDKLFIQLVQTYNQLFEENPINASGVDAKAILSARLSKSRRLENLIAQLPGEKKNGLFGNLIALSLGLTPNFKSNFDLAEDAKLQLSKDTYDDDLDNLLAQIGDQYADLFLAAKNLSDAILLSDILRVNTEITKAPLSASMIKRYDEHHQDLTLLKALVRQQLPEKYKEIFFDQSKNGYAGYIDGGASQEEFYKFIKPILEKMDGTEELLVKLNREDLLRKQRTFDNGSIPHQIHLGELHAILRRQEDFYPFLKDNREKIEKILTFRIPYYVGPLARGNSRFAWMTRKSEETITPWNFEEVVDKGASAQSFIERMTNFDKNLPNEKVLPKHSLLYEYFTVYNELTKVKYVTEGMRKPAFLSGEQKKAIVDLLFKTNRKVTVKQLKEDYFKKIECFDSVEISGVEDRFNASLGTYHDLLKIIKDKDFLDNEENEDILEDIVLTLTLFEDREMIEERLKTYAHLFDDKVMKQLKRRRYTGWGRLSRKLINGIRDKQSGKTILDFLKSDGFANRNFMQLIHDDSLTFKEDIQKAQVSGQGDSLHEHIANLAGSPAIKKGILQTVKVVDELVKVMGRHKPENIVIEMARENQTTQKGQKNSRERMKRIEEGIKELGSQILKEHPVENTQLQNEKLYLYYLQNGRDMYVDQELDINRLSDYDVDHIVPQSFLKDDSIDNKVLTRSDKARGKSDNVPSEEVVKKMKNYWRQLLNAKLITQRKFDNLTKAERGGLSELDKAGFIKRQLVETRQITKHVAQILDSRMNTKYDENDKLIREVKVITLKSKLVSDFRKDFQFYKVREINNYHHAHDAYLNAVVGTALIKKYPKLESEFVYGDYKVYDVRKMIAKSEQEIGKATAKYFFYSNIMNFFKTEITLANGEIRKRPLIETNGETGEIVWDKGRDFATVRKVLSMPQVNIVKKTEVQTGGFSKESILPKRNSDKLIARKKDWDPKKYGGFDSPTVAYSVLVVAKVEKGKSKKLKSVKELLGITIMERSSFEKNPIDFLEAKGYKEVKKDLIIKLPKYSLFELENGRKRMLASAGELQKGNELALPSKYVNFLYLASHYEKLKGSPEDNEQKQLFVEQHKHYLDEIIEQISEFSKRVILADANLDKVLSAYNKHRDKPIREQAENIIHLFTLTNLGAPAAFKYFDTTIDRKRYTSTKEVLDATLIHQSITGLYETRIDLSQLGGDGGGGGGSSEAAAKGGTLNIEDEYRLHETSKEPDVSLGSTWLSDFPQAWAETGGMGLAVRQAPLIIPLKATSTPVSIKQYPMSQEARLGIKPHIQRLLDQGILVPCQSPWNTPLLPVKKPGTNDYRPVQDLREVNKRVEDIHPTVPNPYNLLSGLPPSHQWYTVLDLKDAFFCLRLHPTSQPLFAFEWRDPEMGISGQLTWTRLPQGFKNSPTLFNEALHRDLAGFRIQHPDLILLQYVDDLLLAATSELDCQQGTRALLQTLGDLGYRASAKKAQICQKQVKYLGYLLKEGQRWLTEARKETVMGQPIPKTPRQLREFLGKAGFCRLFIPGFAEMAAPLYPLTKPGTLFNWGPDQQKAFQEIKQALLTAPALGLPDLTKPFELFVDEKQGYAKGVLTQKLGPWRRPVAYLSKKLDPVAAGWPPCLRMVAAIAVLTKDAGKLTMGQPLVILAPHAVEALVKQPPDRWLSNARMTHYQALLLDTDRVQFGPVVALNPATLLPLPEEGLQHDCLDILAEAHGTRSDLMDQPLPDADHTWYTDGSSFLQEGQRKAGAAVTTETEVIWARALPAGTSAQRAELIALTQALKMAEGKKLNVYTDSRYAFATAHIHGEIYRRRGWLTSEGKEIKNKDEILALLKALFLPKRLSIIHCPGHQKGNSAEARGNRMADQAAREVATRETPETSTLLAGKRTADGSEFEKRTADGSEFESPKKKAKVE

SEQ ID NO: 2328 - protein, 2090 aa, synthetic construct
MPAAKRVKLDGGDKKYSIGLDIGTNSVGWAVITDEYKVPSKKFKVLGNTDRHSIKKNLIGALLFDSGETAEATRLKRTARRRYTRRKNRICYLQEIFSNEMAKVDDSFFHRLEESFLVEEDKKHERHPIFGNIVDEVAYHEKYPTIYHLRKKLVDSTDKADLRLIYLALAHMIKFRGHFLIEGDLNPDNSDVDKLFIQLVQTYNQLFEENPINASGVDAKAILSARLSKSRRLENLIAQLPGEKKNGLFGNLIALSLGLTPNFKSNFDLAEDAKLQLSKDTYDDDLDNLLAQIGDQYADLFLAAKNLSDAILLSDILRVNTEITKAPLSASMIKRYDEHHQDLTLLKALVRQQLPEKYKEIFFDQSKNGYAGYIDGGASQEEFYKFIKPILEKMDGTEELLVKLNREDLLRKQRTFDNGSIPHQIHLGELHAILRRQEDFYPFLKDNREKIEKILTFRIPYYVGPLARGNSRFAWMTRKSEETITPWNFEEVVDKGASAQSFIERMTNFDKNLPNEKVLPKHSLLYEYFTVYNELTKVKYVTEGMRKPAFLSGEQKKAIVDLLFKTNRKVTVKQLKEDYFKKIECFDSVEISGVEDRFNASLGTYHDLLKIIKDKDFLDNEENEDILEDIVLTLTLFEDREMIEERLKTYAHLFDDKVMKQLKRRRYTGWGRLSRKLINGIRDKQSGKTILDFLKSDGFANRNFMQLIHDDSLTFKEDIQKAQVSGQGDSLHEHIANLAGSPAIKKGILQTVKVVDELVKVMGRHKPENIVIEMARENQTTQKGQKNSRERMKRIEEGIKELGSQILKEHPVENTQLQNEKLYLYYLQNGRDMYVDQELDINRLSDYDVDHIVPQSFLKDDSIDNKVLTRSDKARGKSDNVPSEEVVKKMKNYWRQLLNAKLITQRKFDNLTKAERGGLSELDKAGFIKRQLVETRQITKHVAQILDSRMNTKYDENDKLIREVKVITLKSKLVSDFRKDFQFYKVREINNYHHAHDAYLNAVVGTALIKKYPKLESEFVYGDYKVYDVRKMIAKSEQEIGKATAKYFFYSNIMNFFKTEITLANGEIRKRPLIETNGETGEIVWDKGRDFATVRKVLSMPQVNIVKKTEVQTGGFSKESILPKRNSDKLIARKKDWDPKKYGGFDSPTVAYSVLVVAKVEKGKSKKLKSVKELLGITIMERSSFEKNPIDFLEAKGYKEVKKDLIIKLPKYSLFELENGRKRMLASAGELQKGNELALPSKYVNFLYLASHYEKLKGSPEDNEQKQLFVEQHKHYLDEIIEQISEFSKRVILADANLDKVLSAYNKHRDKPIREQAENIIHLFTLTNLGAPAAFKYFDTTIDRKRYTSTKEVLDATLIHQSITGLYETRIDLSQLGGDGGEAAAKGGTLNIEDEYRLHETSKEPDVSLGSTWLSDFPQAWAETGGMGLAVRQAPLIIPLKATSTPVSIKQYPMSQEARLGIKPHIQRLLDQGILVPCQSPWNTPLLPVKKPGTNDYRPVQDLREVNKRVEDIHPTVPNPYNLLSGLPPSHQWYTVLDLKDAFFCLRLHPTSQPLFAFEWRDPEMGISGQLTWTRLPQGFKNSPTLFNEALHRDLAGFRIQHPDLILLQYVDDLLLAATSELDCQQGTRALLQTLGDLGYRASAKKAQICQKQVKYLGYLLKEGQRWLTEARKETVMGQPIPKTPRQLREFLGKAGFCRLFIPGFAEMAAPLYPLTKPGTLFNWGPDQQKAFQEIKQALLTAPALGLPDLTKPFELFVDEKQGYAKGVLTQKLGPWRRPVAYLSKKLDPVAAGWPPCLRMVAAIAVLTKDAGKLTMGQPLVILAPHAVEALVKQPPDRWLSNARMTHYQALLLDTDRVQFGPVVALNPATLLPLPEEGLQHDCLDILAEAHGTRSDLMDQPLPDADHTWYTDGSSFLQEGQRKAGAAVTTETEVIWARALPAGTSAQRAELIALTQALKMAEGKKLNVYTDSRYAFATAHIHGEIYRRRGWLTSEGKEIKNKDEILALLKALFLPKRLSIIHCPGHQKGNSAEARGNRMADQAAREVATRETPETSTLLAGKRTADGSEFEKRTADGSEFESPKKKAKVE

SEQ ID NO: 2329 - protein, 2094 aa, synthetic construct
MPAAKRVKLDGGDKKYSIGLDIGTNSVGWAVITDEYKVPSKKFKVLGNTDRHSIKKNLIGALLFDSGETAEATRLKRTARRRYTRRKNRICYLQEIFSNEMAKVDDSFFHRLEESFLVEEDKKHERHPIFGNIVDEVAYHEKYPTIYHLRKKLVDSTDKADLRLIYLALAHMIKFRGHFLIEGDLNPDNSDVDKLFIQLVQTYNQLFEENPINASGVDAKAILSARLSKSRRLENLIAQLPGEKKNGLFGNLIALSLGLTPNFKSNFDLAEDAKLQLSKDTYDDDLDNLLAQIGDQYADLFLAAKNLSDAILLSDILRVNTEITKAPLSASMIKRYDEHHQDLTLLKALVRQQLPEKYKEIFFDQSKNGYAGYIDGGASQEEFYKFIKPILEKMDGTEELLVKLNREDLLRKQRTFDNGSIPHQIHLGELHAILRRQEDFYPFLKDNREKIEKILTFRIPYYVGPLARGNSRFAWMTRKSEETITPWNFEEVVDKGASAQSFIERMTNFDKNLPNEKVLPKHSLLYEYFTVYNELTKVKYVTEGMRKPAFLSGEQKKAIVDLLFKTNRKVTVKQLKEDYFKKIECFDSVEISGVEDRFNASLGTYHDLLKIIKDKDFLDNEENEDILEDIVLTLTLFEDREMIEERLKTYAHLFDDKVMKQLKRRRYTGWGRLSRKLINGIRDKQSGKTILDFLKSDGFANRNFMQLIHDDSLTFKEDIQKAQVSGQGDSLHEHIANLAGSPAIKKGILQTVKVVDELVKVMGRHKPENIVIEMARENQTTQKGQKNSRERMKRIEEGIKELGSQILKEHPVENTQLQNEKLYLYYLQNGRDMYVDQELDINRLSDYDVDHIVPQSFLKDDSIDNKVLTRSDKARGKSDNVPSEEVVKKMKNYWRQLLNAKLITQRKFDNLTKAERGGLSELDKAGFIKRQLVETRQITKHVAQILDSRMNTKYDENDKLIREVKVITLKSKLVSDFRKDFQFYKVREINNYHHAHDAYLNAVVGTALIKKYPKLESEFVYGDYKVYDVRKMIAKSEQEIGKATAKYFFYSNIMNFFKTEITLANGEIRKRPLIETNGETGEIVWDKGRDFATVRKVLSMPQVNIVKKTEVQTGGFSKESILPKRNSDKLIARKKDWDPKKYGGFDSPTVAYSVLVVAKVEKGKSKKLKSVKELLGITIMERSSFEKNPIDFLEAKGYKEVKKDLIIKLPKYSLFELENGRKRMLASAGELQKGNELALPSKYVNFLYLASHYEKLKGSPEDNEQKQLFVEQHKHYLDEIIEQISEFSKRVILADANLDKVLSAYNKHRDKPIREQAENIIHLFTLTNLGAPAAFKYFDTTIDRKRYTSTKEVLDATLIHQSITGLYETRIDLSQLGGDGGGSSPAPGGGGGTLNIEDEYRLHETSKEPDVSLGSTWLSDFPQAWAETGGMGLAVRQAPLIIPLKATSTPVSIKQYPMSQEARLGIKPHIQRLLDQGILVPCQSPWNTPLLPVKKPGTNDYRPVQDLREVNKRVEDIHPTVPNPYNLLSGLPPSHQWYTVLDLKDAFFCLRLHPTSQPLFAFEWRDPEMGISGQLTWTRLPQGFKNSPTLFNEALHRDLAGFRIQHPDLILLQYVDDLLLAATSELDCQQGTRALLQTLGDLGYRASAKKAQICQKQVKYLGYLLKEGQRWLTEARKETVMGQPIPKTPRQLREFLGKAGFCRLFIPGFAEMAAPLYPLTKPGTLFNWGPDQQKAFQEIKQALLTAPALGLPDLTKPFELFVDEKQGYAKGVLTQKLGPWRRPVAYLSKKLDPVAAGWPPCLRMVAAIAVLTKDAGKLTMGQPLVILAPHAVEALVKQPPDRWLSNARMTHYQALLLDTDRVQFGPVVALNPATLLPLPEEGLQHDCLDILAEAHGTRSDLMDQPLPDADHTWYTDGSSFLQEGQRKAGAAVTTETEVIWARALPAGTSAQRAELIALTQALKMAEGKKLNVYTDSRYAFATAHIHGEIYRRRGWLTSEGKEIKNKDEILALLKALFLPKRLSIIHCPGHQKGNSAEARGNRMADQAAREVATRETPETSTLLAGKRTADGSEFEKRTADGSEFESPKKKAKVE

SEQ ID NO: 2330 - skipped

SEQ ID NO: 2331 - protein, 2094 aa, synthetic construct
MPAAKRVKLDGGDKKYSIGLDIGTNSVGWAVITDEYKVPSKKFKVLGNTDRHSIKKNLIGALLFDSGETAEATRLKRTARRRYTRRKNRICYLQEIFSNEMAKVDDSFFHRLEESFLVEEDKKHERHPIFGNIVDEVAYHEKYPTIYHLRKKLVDSTDKADLRLIYLALAHMIKFRGHFLIEGDLNPDNSDVDKLFIQLVQTYNQLFEENPINASGVDAKAILSARLSKSRRLENLIAQLPGEKKNGLFGNLIALSLGLTPNFKSNFDLAEDAKLQLSKDTYDDDLDNLLAQIGDQYADLFLAAKNLSDAILLSDILRVNTEITKAPLSASMIKRYDEHHQDLTLLKALVRQQLPEKYKEIFFDQSKNGYAGYIDGGASQEEFYKFIKPILEKMDGTEELLVKLNREDLLRKQRTFDNGSIPHQIHLGELHAILRRQEDFYPFLKDNREKIEKILTFRIPYYVGPLARGNSRFAWMTRKSEETITPWNFEEVVDKGASAQSFIERMTNFDKNLPNEKVLPKHSLLYEYFTVYNELTKVKYVTEGMRKPAFLSGEQKKAIVDLLFKTNRKVTVKQLKEDYFKKIECFDSVEISGVEDRFNASLGTYHDLLKIIKDKDFLDNEENEDILEDIVLTLTLFEDREMIEERLKTYAHLFDDKVMKQLKRRRYTGWGRLSRKLINGIRDKQSGKTILDFLKSDGFANRNFMQLIHDDSLTFKEDIQKAQVSGQGDSLHEHIANLAGSPAIKKGILQTVKVVDELVKVMGRHKPENIVIEMARENQTTQKGQKNSRERMKRIEEGIKELGSQILKEHPVENTQLQNEKLYLYYLQNGRDMYVDQELDINRLSDYDVDHIVPQSFLKDDSIDNKVLTRSDKARGKSDNVPSEEVVKKMKNYWRQLLNAKLITQRKFDNLTKAERGGLSELDKAGFIKRQLVETRQITKHVAQILDSRMNTKYDENDKLIREVKVITLKSKLVSDFRKDFQFYKVREINNYHHAHDAYLNAVVGTALIKKYPKLESEFVYGDYKVYDVRKMIAKSEQEIGKATAKYFFYSNIMNFFKTEITLANGEIRKRPLIETNGETGEIVWDKGRDFATVRKVLSMPQVNIVKKTEVQTGGFSKESILPKRNSDKLIARKKDWDPKKYGGFDSPTVAYSVLVVAKVEKGKSKKLKSVKELLGITIMERSSFEKNPIDFLEAKGYKEVKKDLIIKLPKYSLFELENGRKRMLASAGELQKGNELALPSKYVNFLYLASHYEKLKGSPEDNEQKQLFVEQHKHYLDEIIEQISEFSKRVILADANLDKVLSAYNKHRDKPIREQAENIIHLFTLTNLGAPAAFKYFDTTIDRKRYTSTKEVLDATLIHQSITGLYETRIDLSQLGGDGGGGSGSSGGGGGTLNIEDEYRLHETSKEPDVSLGSTWLSDFPQAWAETGGMGLAVRQAPLIIPLKATSTPVSIKQYPMSQEARLGIKPHIQRLLDQGILVPCQSPWNTPLLPVKKPGTNDYRPVQDLREVNKRVEDIHPTVPNPYNLLSGLPPSHQWYTVLDLKDAFFCLRLHPTSQPLFAFEWRDPEMGISGQLTWTRLPQGFKNSPTLFNEALHRDLAGFRIQHPDLILLQYVDDLLLAATSELDCQQGTRALLQTLGDLGYRASAKKAQICQKQVKYLGYLLKEGQRWLTEARKETVMGQPIPKTPRQLREFLGKAGFCRLFIPGFAEMAAPLYPLTKPGTLFNWGPDQQKAFQEIKQALLTAPALGLPDLTKPFELFVDEKQGYAKGVLTQKLGPWRRPVAYLSKKLDPVAAGWPPCLRMVAAIAVLTKDAGKLTMGQPLVILAPHAVEALVKQPPDRWLSNARMTHYQALLLDTDRVQFGPVVALNPATLLPLPEEGLQHDCLDILAEAHGTRSDLMDQPLPDADHTWYTDGSSFLQEGQRKAGAAVTTETEVIWARALPAGTSAQRAELIALTQALKMAEGKKLNVYTDSRYAFATAHIHGEIYRRRGWLTSEGKEIKNKDEILALLKALFLPKRLSIIHCPGHQKGNSAEARGNRMADQAAREVATRETPETSTLLAGKRTADGSEFEKRTADGSEFESPKKKAKVE

SEQ ID NO: 2332 - protein, 2096 aa, synthetic construct
MPAAKRVKLDGGDKKYSIGLDIGTNSVGWAVITDEYKVPSKKFKVLGNTDRHSIKKNLIGALLFDSGETAEATRLKRTARRRYTRRKNRICYLQEIFSNEMAKVDDSFFHRLEESFLVEEDKKHERHPIFGNIVDEVAYHEKYPTIYHLRKKLVDSTDKADLRLIYLALAHMIKFRGHFLIEGDLNPDNSDVDKLFIQLVQTYNQLFEENPINASGVDAKAILSARLSKSRRLENLIAQLPGEKKNGLFGNLIALSLGLTPNFKSNFDLAEDAKLQLSKDTYDDDLDNLLAQIGDQYADLFLAAKNLSDAILLSDILRVNTEITKAPLSASMIKRYDEHHQDLTLLKALVRQQLPEKYKEIFFDQSKNGYAGYIDGGASQEEFYKFIKPILEKMDGTEELLVKLNREDLLRKQRTFDNGSIPHQIHLGELHAILRRQEDFYPFLKDNREKIEKILTFRIPYYVGPLARGNSRFAWMTRKSEETITPWNFEEVVDKGASAQSFIERMTNFDKNLPNEKVLPKHSLLYEYFTVYNELTKVKYVTEGMRKPAFLSGEQKKAIVDLLFKTNRKVTVKQLKEDYFKKIECFDSVEISGVEDRFNASLGTYHDLLKIIKDKDFLDNEENEDILEDIVLTLTLFEDREMIEERLKTYAHLFDDKVMKQLKRRRYTGWGRLSRKLINGIRDKQSGKTILDFLKSDGFANRNFMQLIHDDSLTFKEDIQKAQVSGQGDSLHEHIANLAGSPAIKKGILQTVKVVDELVKVMGRHKPENIVIEMARENQTTQKGQKNSRERMKRIEEGIKELGSQILKEHPVENTQLQNEKLYLYYLQNGRDMYVDQELDINRLSDYDVDHIVPQSFLKDDSIDNKVLTRSDKARGKSDNVPSEEVVKKMKNYWRQLLNAKLITQRKFDNLTKAERGGLSELDKAGFIKRQLVETRQITKHVAQILDSRMNTKYDENDKLIREVKVITLKSKLVSDFRKDFQFYKVREINNYHHAHDAYLNAVVGTALIKKYPKLESEFVYGDYKVYDVRKMIAKSEQEIGKATAKYFFYSNIMNFFKTEITLANGEIRKRPLIETNGETGEIVWDKGRDFATVRKVLSMPQVNIVKKTEVQTGGFSKESILPKRNSDKLIARKKDWDPKKYGGFDSPTVAYSVLVVAKVEKGKSKKLKSVKELLGITIMERSSFEKNPIDFLEAKGYKEVKKDLIIKLPKYSLFELENGRKRMLASAGELQKGNELALPSKYVNFLYLASHYEKLKGSPEDNEQKQLFVEQHKHYLDEIIEQISEFSKRVILADANLDKVLSAYNKHRDKPIREQAENIIHLFTLTNLGAPAAFKYFDTTIDRKRYTSTKEVLDATLIHQSITGLYETRIDLSQLGGDGGPAPGGSEAAAKGGTLNIEDEYRLHETSKEPDVSLGSTWLSDFPQAWAETGGMGLAVRQAPLIIPLKATSTPVSIKQYPMSQEARLGIKPHIQRLLDQGILVPCQSPWNTPLLPVKKPGTNDYRPVQDLREVNKRVEDIHPTVPNPYNLLSGLPPSHQWYTVLDLKDAFFCLRLHPTSQPLFAFEWRDPEMGISGQLTWTRLPQGFKNSPTLFNEALHRDLAGFRIQHPDLILLQYVDDLLLAATSELDCQQGTRALLQTLGDLGYRASAKKAQICQKQVKYLGYLLKEGQRWLTEARKETVMGQPIPKTPRQLREFLGKAGFCRLFIPGFAEMAAPLYPLTKPGTLFNWGPDQQKAFQEIKQALLTAPALGLPDLTKPFELFVDEKQGYAKGVLTQKLGPWRRPVAYLSKKLDPVAAGWPPCLRMVAAIAVLTKDAGKLTMGQPLVILAPHAVEALVKQPPDRWLSNARMTHYQALLLDTDRVQFGPVVALNPATLLPLPEEGLQHDCLDILAEAHGTRSDLMDQPLPDADHTWYTDGSSFLQEGQRKAGAAVTTETEVIWARALPAGTSAQRAELIALTQALKMAEGKKLNVYTDSRYAFATAHIHGEIYRRRGWLTSEGKEIKNKDEILALLKALFLPKRLSIIHCPGHQKGNSAEARGNRMADQAAREVATRETPETSTLLAGKRTADGSEFEKRTADGSEFESPKKKAKVE

SEQ ID NO: 2333 - protein, 2100 aa, synthetic construct
MPAAKRVKLDGGDKKYSIGLDIGTNSVGWAVITDEYKVPSKKFKVLGNTDRHSIKKNLIGALLFDSGETAEATRLKRTARRRYTRRKNRICYLQEIFSNEMAKVDDSFFHRLEESFLVEEDKKHERHPIFGNIVDEVAYHEKYPTIYHLRKKLVDSTDKADLRLIYLALAHMIKFRGHFLIEGDLNPDNSDVDKLFIQLVQTYNQLFEENPINASGVDAKAILSARLSKSRRLENLIAQLPGEKKNGLFGNLIALSLGLTPNFKSNFDLAEDAKLQLSKDTYDDDLDNLLAQIGDQYADLFLAAKNLSDAILLSDILRVNTEITKAPLSASMIKRYDEHHQDLTLLKALVRQQLPEKYKEIFFDQSKNGYAGYIDGGASQEEFYKFIKPILEKMDGTEELLVKLNREDLLRKQRTFDNGSIPHQIHLGELHAILRRQEDFYPFLKDNREKIEKILTFRIPYYVGPLARGNSRFAWMTRKSEETITPWNFEEVVDKGASAQSFIERMTNFDKNLPNEKVLPKHSLLYEYFTVYNELTKVKYVTEGMRKPAFLSGEQKKAIVDLLFKTNRKVTVKQLKEDYFKKIECFDSVEISGVEDRFNASLGTYHDLLKIIKDKDFLDNEENEDILEDIVLTLTLFEDREMIEERLKTYAHLFDDKVMKQLKRRRYTGWGRLSRKLINGIRDKQSGKTILDFLKSDGFANRNFMQLIHDDSLTFKEDIQKAQVSGQGDSLHEHIANLAGSPAIKKGILQTVKVVDELVKVMGRHKPENIVIEMARENQTTQKGQKNSRERMKRIEEGIKELGSQILKEHPVENTQLQNEKLYLYYLQNGRDMYVDQELDINRLSDYDVDHIVPQSFLKDDSIDNKVLTRSDKARGKSDNVPSEEVVKKMKNYWRQLLNAKLITQRKFDNLTKAERGGLSELDKAGFIKRQLVETRQITKHVAQILDSRMNTKYDENDKLIREVKVITLKSKLVSDFRKDFQFYKVREINNYHHAHDAYLNAVVGTALIKKYPKLESEFVYGDYKVYDVRKMIAKSEQEIGKATAKYFFYSNIMNFFKTEITLANGEIRKRPLIETNGETGEIVWDKGRDFATVRKVLSMPQVNIVKKTEVQTGGFSKESILPKRNSDKLIARKKDWDPKKYGGFDSPTVAYSVLVVAKVEKGKSKKLKSVKELLGITIMERSSFEKNPIDFLEAKGYKEVKKDLIIKLPKYSLFELENGRKRMLASAGELQKGNELALPSKYVNFLYLASHYEKLKGSPEDNEQKQLFVEQHKHYLDEIIEQISEFSKRVILADANLDKVLSAYNKHRDKPIREQAENIIHLFTLTNLGAPAAFKYFDTTIDRKRYTSTKEVLDATLIHQSITGLYETRIDLSQLGGDGGGGGGSGGGGSGGGGSGGTLNIEDEYRLHETSKEPDVSLGSTWLSDFPQAWAETGGMGLAVRQAPLIIPLKATSTPVSIKQYPMSQEARLGIKPHIQRLLDQGILVPCQSPWNTPLLPVKKPGTNDYRPVQDLREVNKRVEDIHPTVPNPYNLLSGLPPSHQWYTVLDLKDAFFCLRLHPTSQPLFAFEWRDPEMGISGQLTWTRLPQGFKNSPTLFNEALHRDLAGFRIQHPDLILLQYVDDLLLAATSELDCQQGTRALLQTLGDLGYRASAKKAQICQKQVKYLGYLLKEGQRWLTEARKETVMGQPIPKTPRQLREFLGKAGFCRLFIPGFAEMAAPLYPLTKPGTLFNWGPDQQKAFQEIKQALLTAPALGLPDLTKPFELFVDEKQGYAKGVLTQKLGPWRRPVAYLSKKLDPVAAGWPPCLRMVAAIAVLTKDAGKLTMGQPLVILAPHAVEALVKQPPDRWLSNARMTHYQALLLDTDRVQFGPVVALNPATLLPLPEEGLQHDCLDILAEAHGTRSDLMDQPLPDADHTWYTDGSSFLQEGQRKAGAAVTTETEVIWARALPAGTSAQRAELIALTQALKMAEGKKLNVYTDSRYAFATAHIHGEIYRRRGWLTSEGKEIKNKDEILALLKALFLPKRLSIIHCPGHQKGNSAEARGNRMADQAAREVATRETPETSTLLAGKRTADGSEFEKRTADGSEFESPKKKAKVE

SEQ ID NO: 2334 - skipped

SEQ ID NO: 2335 - protein, 2091 aa, synthetic construct
MPAAKRVKLDGGDKKYSIGLDIGTNSVGWAVITDEYKVPSKKFKVLGNTDRHSIKKNLIGALLFDSGETAEATRLKRTARRRYTRRKNRICYLQEIFSNEMAKVDDSFFHRLEESFLVEEDKKHERHPIFGNIVDEVAYHEKYPTIYHLRKKLVDSTDKADLRLIYLALAHMIKFRGHFLIEGDLNPDNSDVDKLFIQLVQTYNQLFEENPINASGVDAKAILSARLSKSRRLENLIAQLPGEKKNGLFGNLIALSLGLTPNFKSNFDLAEDAKLQLSKDTYDDDLDNLLAQIGDQYADLFLAAKNLSDAILLSDILRVNTEITKAPLSASMIKRYDEHHQDLTLLKALVRQQLPEKYKEIFFDQSKNGYAGYIDGGASQEEFYKFIKPILEKMDGTEELLVKLNREDLLRKQRTFDNGSIPHQIHLGELHAILRRQEDFYPFLKDNREKIEKILTFRIPYYVGPLARGNSRFAWMTRKSEETITPWNFEEVVDKGASAQSFIERMTNFDKNLPNEKVLPKHSLLYEYFTVYNELTKVKYVTEGMRKPAFLSGEQKKAIVDLLFKTNRKVTVKQLKEDYFKKIECFDSVEISGVEDRFNASLGTYHDLLKIIKDKDFLDNEENEDILEDIVLTLTLFEDREMIEERLKTYAHLFDDKVMKQLKRRRYTGWGRLSRKLINGIRDKQSGKTILDFLKSDGFANRNFMQLIHDDSLTFKEDIQKAQVSGQGDSLHEHIANLAGSPAIKKGILQTVKVVDELVKVMGRHKPENIVIEMARENQTTQKGQKNSRERMKRIEEGIKELGSQILKEHPVENTQLQNEKLYLYYLQNGRDMYVDQELDINRLSDYDVDHIVPQSFLKDDSIDNKVLTRSDKARGKSDNVPSEEVVKKMKNYWRQLLNAKLITQRKFDNLTKAERGGLSELDKAGFIKRQLVETRQITKHVAQILDSRMNTKYDENDKLIREVKVITLKSKLVSDFRKDFQFYKVREINNYHHAHDAYLNAVVGTALIKKYPKLESEFVYGDYKVYDVRKMIAKSEQEIGKATAKYFFYSNIMNFFKTEITLANGEIRKRPLIETNGETGEIVWDKGRDFATVRKVLSMPQVNIVKKTEVQTGGFSKESILPKRNSDKLIARKKDWDPKKYGGFDSPTVAYSVLVVAKVEKGKSKKLKSVKELLGITIMERSSFEKNPIDFLEAKGYKEVKKDLIIKLPKYSLFELENGRKRMLASAGELQKGNELALPSKYVNFLYLASHYEKLKGSPEDNEQKQLFVEQHKHYLDEIIEQISEFSKRVILADANLDKVLSAYNKHRDKPIREQAENIIHLFTLTNLGAPAAFKYFDTTIDRKRYTSTKEVLDATLIHQSITGLYETRIDLSQLGGDGGGGSGGGGGTLNIEDEYRLHETSKEPDVSLGSTWLSDFPQAWAETGGMGLAVRQAPLIIPLKATSTPVSIKQYPMSQEARLGIKPHIQRLLDQGILVPCQSPWNTPLLPVKKPGTNDYRPVQDLREVNKRVEDIHPTVPNPYNLLSGLPPSHQWYTVLDLKDAFFCLRLHPTSQPLFAFEWRDPEMGISGQLTWTRLPQGFKNSPTLFNEALHRDLAGFRIQHPDLILLQYVDDLLLAATSELDCQQGTRALLQTLGDLGYRASAKKAQICQKQVKYLGYLLKEGQRWLTEARKETVMGQPIPKTPRQLREFLGKAGFCRLFIPGFAEMAAPLYPLTKPGTLFNWGPDQQKAFQEIKQALLTAPALGLPDLTKPFELFVDEKQGYAKGVLTQKLGPWRRPVAYLSKKLDPVAAGWPPCLRMVAAIAVLTKDAGKLTMGQPLVILAPHAVEALVKQPPDRWLSNARMTHYQALLLDTDRVQFGPVVALNPATLLPLPEEGLQHDCLDILAEAHGTRSDLMDQPLPDADHTWYTDGSSFLQEGQRKAGAAVTTETEVIWARALPAGTSAQRAELIALTQALKMAEGKKLNVYTDSRYAFATAHIHGEIYRRRGWLTSEGKEIKNKDEILALLKALFLPKRLSIIHCPGHQKGNSAEARGNRMADQAAREVATRETPETSTLLAGKRTADGSEFEKRTADGSEFESPKKKAKVE

SEQ ID NO: 2336-2337 - skipped (2 entries)

SEQ ID NO: 2338 - protein, 2096 aa, synthetic construct
MPAAKRVKLDGGDKKYSIGLDIGTNSVGWAVITDEYKVPSKKFKVLGNTDRHSIKKNLIGALLFDSGETAEATRLKRTARRRYTRRKNRICYLQEIFSNEMAKVDDSFFHRLEESFLVEEDKKHERHPIFGNIVDEVAYHEKYPTIYHLRKKLVDSTDKADLRLIYLALAHMIKFRGHFLIEGDLNPDNSDVDKLFIQLVQTYNQLFEENPINASGVDAKAILSARLSKSRRLENLIAQLPGEKKNGLFGNLIALSLGLTPNFKSNFDLAEDAKLQLSKDTYDDDLDNLLAQIGDQYADLFLAAKNLSDAILLSDILRVNTEITKAPLSASMIKRYDEHHQDLTLLKALVRQQLPEKYKEIFFDQSKNGYAGYIDGGASQEEFYKFIKPILEKMDGTEELLVKLNREDLLRKQRTFDNGSIPHQIHLGELHAILRRQEDFYPFLKDNREKIEKILTFRIPYYVGPLARGNSRFAWMTRKSEETITPWNFEEVVDKGASAQSFIERMTNFDKNLPNEKVLPKHSLLYEYFTVYNELTKVKYVTEGMRKPAFLSGEQKKAIVDLLFKTNRKVTVKQLKEDYFKKIECFDSVEISGVEDRFNASLGTYHDLLKIIKDKDFLDNEENEDILEDIVLTLTLFEDREMIEERLKTYAHLFDDKVMKQLKRRRYTGWGRLSRKLINGIRDKQSGKTILDFLKSDGFANRNFMQLIHDDSLTFKEDIQKAQVSGQGDSLHEHIANLAGSPAIKKGILQTVKVVDELVKVMGRHKPENIVIEMARENQTTQKGQKNSRERMKRIEEGIKELGSQILKEHPVENTQLQNEKLYLYYLQNGRDMYVDQELDINRLSDYDVDHIVPQSFLKDDSIDNKVLTRSDKARGKSDNVPSEEVVKKMKNYWRQLLNAKLITQRKFDNLTKAERGGLSELDKAGFIKRQLVETRQITKHVAQILDSRMNTKYDENDKLIREVKVITLKSKLVSDFRKDFQFYKVREINNYHHAHDAYLNAVVGTALIKKYPKLESEFVYGDYKVYDVRKMIAKSEQEIGKATAKYFFYSNIMNFFKTEITLANGEIRKRPLIETNGETGEIVWDKGRDFATVRKVLSMPQVNIVKKTEVQTGGFSKESILPKRNSDKLIARKKDWDPKKYGGFDSPTVAYSVLVVAKVEKGKSKKLKSVKELLGITIMERSSFEKNPIDFLEAKGYKEVKKDLIIKLPKYSLFELENGRKRMLASAGELQKGNELALPSKYVNFLYLASHYEKLKGSPEDNEQKQLFVEQHKHYLDEIIEQISEFSKRVILADANLDKVLSAYNKHRDKPIREQAENIIHLFTLTNLGAPAAFKYFDTTIDRKRYTSTKEVLDATLIHQSITGLYETRIDLSQLGGDGGGGSPAPEAAAKGGTLNIEDEYRLHETSKEPDVSLGSTWLSDFPQAWAETGGMGLAVRQAPLIIPLKATSTPVSIKQYPMSQEARLGIKPHIQRLLDQGILVPCQSPWNTPLLPVKKPGTNDYRPVQDLREVNKRVEDIHPTVPNPYNLLSGLPPSHQWYTVLDLKDAFFCLRLHPTSQPLFAFEWRDPEMGISGQLTWTRLPQGFKNSPTLFNEALHRDLAGFRIQHPDLILLQYVDDLLLAATSELDCQQGTRALLQTLGDLGYRASAKKAQICQKQVKYLGYLLKEGQRWLTEARKETVMGQPIPKTPRQLREFLGKAGFCRLFIPGFAEMAAPLYPLTKPGTLFNWGPDQQKAFQEIKQALLTAPALGLPDLTKPFELFVDEKQGYAKGVLTQKLGPWRRPVAYLSKKLDPVAAGWPPCLRMVAAIAVLTKDAGKLTMGQPLVILAPHAVEALVKQPPDRWLSNARMTHYQALLLDTDRVQFGPVVALNPATLLPLPEEGLQHDCLDILAEAHGTRSDLMDQPLPDADHTWYTDGSSFLQEGQRKAGAAVTTETEVIWARALPAGTSAQRAELIALTQALKMAEGKKLNVYTDSRYAFATAHIHGEIYRRRGWLTSEGKEIKNKDEILALLKALFLPKRLSIIHCPGHQKGNSAEARGNRMADQAAREVATRETPETSTLLAGKRTADGSEFEKRTADGSEFESPKKKAKVE

SEQ ID NO: 2339-2341 - skipped (3 entries)

SEQ ID NO: 2342 - protein, 2093 aa, synthetic construct
MPAAKRVKLDGGDKKYSIGLDIGTNSVGWAVITDEYKVPSKKFKVLGNTDRHSIKKNLIGALLFDSGETAEATRLKRTARRRYTRRKNRICYLQEIFSNEMAKVDDSFFHRLEESFLVEEDKKHERHPIFGNIVDEVAYHEKYPTIYHLRKKLVDSTDKADLRLIYLALAHMIKFRGHFLIEGDLNPDNSDVDKLFIQLVQTYNQLFEENPINASGVDAKAILSARLSKSRRLENLIAQLPGEKKNGLFGNLIALSLGLTPNFKSNFDLAEDAKLQLSKDTYDDDLDNLLAQIGDQYADLFLAAKNLSDAILLSDILRVNTEITKAPLSASMIKRYDEHHQDLTLLKALVRQQLPEKYKEIFFDQSKNGYAGYIDGGASQEEFYKFIKPILEKMDGTEELLVKLNREDLLRKQRTFDNGSIPHQIHLGELHAILRRQEDFYPFLKDNREKIEKILTFRIPYYVGPLARGNSRFAWMTRKSEETITPWNFEEVVDKGASAQSFIERMTNFDKNLPNEKVLPKHSLLYEYFTVYNELTKVKYVTEGMRKPAFLSGEQKKAIVDLLFKTNRKVTVKQLKEDYFKKIECFDSVEISGVEDRFNASLGTYHDLLKIIKDKDFLDNEENEDILEDIVLTLTLFEDREMIEERLKTYAHLFDDKVMKQLKRRRYTGWGRLSRKLINGIRDKQSGKTILDFLKSDGFANRNFMQLIHDDSLTFKEDIQKAQVSGQGDSLHEHIANLAGSPAIKKGILQTVKVVDELVKVMGRHKPENIVIEMARENQTTQKGQKNSRERMKRIEEGIKELGSQILKEHPVENTQLQNEKLYLYYLQNGRDMYVDQELDINRLSDYDVDHIVPQSFLKDDSIDNKVLTRSDKARGKSDNVPSEEVVKKMKNYWRQLLNAKLITQRKFDNLTKAERGGLSELDKAGFIKRQLVETRQITKHVAQILDSRMNTKYDENDKLIREVKVITLKSKLVSDFRKDFQFYKVREINNYHHAHDAYLNAVVGTALIKKYPKLESEFVYGDYKVYDVRKMIAKSEQEIGKATAKYFFYSNIMNFFKTEITLANGEIRKRPLIETNGETGEIVWDKGRDFATVRKVLSMPQVNIVKKTEVQTGGFSKESILPKRNSDKLIARKKDWDPKKYGGFDSPTVAYSVLVVAKVEKGKSKKLKSVKELLGITIMERSSFEKNPIDFLEAKGYKEVKKDLIIKLPKYSLFELENGRKRMLASAGELQKGNELALPSKYVNFLYLASHYEKLKGSPEDNEQKQLFVEQHKHYLDEIIEQISEFSKRVILADANLDKVLSAYNKHRDKPIREQAENIIHLFTLTNLGAPAAFKYFDTTIDRKRYTSTKEVLDATLIHQSITGLYETRIDLSQLGGDGGGGGEAAAKGGTLNIEDEYRLHETSKEPDVSLGSTWLSDFPQAWAETGGMGLAVRQAPLIIPLKATSTPVSIKQYPMSQEARLGIKPHIQRLLDQGILVPCQSPWNTPLLPVKKPGTNDYRPVQDLREVNKRVEDIHPTVPNPYNLLSGLPPSHQWYTVLDLKDAFFCLRLHPTSQPLFAFEWRDPEMGISGQLTWTRLPQGFKNSPTLFNEALHRDLAGFRIQHPDLILLQYVDDLLLAATSELDCQQGTRALLQTLGDLGYRASAKKAQICQKQVKYLGYLLKEGQRWLTEARKETVMGQPIPKTPRQLREFLGKAGFCRLFIPGFAEMAAPLYPLTKPGTLFNWGPDQQKAFQEIKQALLTAPALGLPDLTKPFELFVDEKQGYAKGVLTQKLGPWRRPVAYLSKKLDPVAAGWPPCLRMVAAIAVLTKDAGKLTMGQPLVILAPHAVEALVKQPPDRWLSNARMTHYQALLLDTDRVQFGPVVALNPATLLPLPEEGLQHDCLDILAEAHGTRSDLMDQPLPDADHTWYTDGSSFLQEGQRKAGAAVTTETEVIWARALPAGTSAQRAELIALTQALKMAEGKKLNVYTDSRYAFATAHIHGEIYRRRGWLTSEGKEIKNKDEILALLKALFLPKRLSIIHCPGHQKGNSAEARGNRMADQAAREVATRETPETSTLLAGKRTADGSEFEKRTADGSEFESPKKKAKVE

SEQ ID NO: 2343 - protein, 2131 aa, synthetic construct
MPAAKRVKLDGGDKKYSIGLDIGTNSVGWAVITDEYKVPSKKFKVLGNTDRHSIKKNLIGALLFDSGETAEATRLKRTARRRYTRRKNRICYLQEIFSNEMAKVDDSFFHRLEESFLVEEDKKHERHPIFGNIVDEVAYHEKYPTIYHLRKKLVDSTDKADLRLIYLALAHMIKFRGHFLIEGDLNPDNSDVDKLFIQLVQTYNQLFEENPINASGVDAKAILSARLSKSRRLENLIAQLPGEKKNGLFGNLIALSLGLTPNFKSNFDLAEDAKLQLSKDTYDDDLDNLLAQIGDQYADLFLAAKNLSDAILLSDILRVNTEITKAPLSASMIKRYDEHHQDLTLLKALVRQQLPEKYKEIFFDQSKNGYAGYIDGGASQEEFYKFIKPILEKMDGTEELLVKLNREDLLRKQRTFDNGSIPHQIHLGELHAILRRQEDFYPFLKDNREKIEKILTFRIPYYVGPLARGNSRFAWMTRKSEETITPWNFEEVVDKGASAQSFIERMTNFDKNLPNEKVLPKHSLLYEYFTVYNELTKVKYVTEGMRKPAFLSGEQKKAIVDLLFKTNRKVTVKQLKEDYFKKIECFDSVEISGVEDRFNASLGTYHDLLKIIKDKDFLDNEENEDILEDIVLTLTLFEDREMIEERLKTYAHLFDDKVMKQLKRRRYTGWGRLSRKLINGIRDKQSGKTILDFLKSDGFANRNFMQLIHDDSLTFKEDIQKAQVSGQGDSLHEHIANLAGSPAIKKGILQTVKVVDELVKVMGRHKPENIVIEMARENQTTQKGQKNSRERMKRIEEGIKELGSQILKEHPVENTQLQNEKLYLYYLQNGRDMYVDQELDINRLSDYDVDHIVPQSFLKDDSIDNKVLTRSDKARGKSDNVPSEEVVKKMKNYWRQLLNAKLITQRKFDNLTKAERGGLSELDKAGFIKRQLVETRQITKHVAQILDSRMNTKYDENDKLIREVKVITLKSKLVSDFRKDFQFYKVREINNYHHAHDAYLNAVVGTALIKKYPKLESEFVYGDYKVYDVRKMIAKSEQEIGKATAKYFFYSNIMNFFKTEITLANGEIRKRPLIETNGETGEIVWDKGRDFATVRKVLSMPQVNIVKKTEVQTGGFSKESILPKRNSDKLIARKKDWDPKKYGGFDSPTVAYSVLVVAKVEKGKSKKLKSVKELLGITIMERSSFEKNPIDFLEAKGYKEVKKDLIIKLPKYSLFELENGRKRMLASAGELQKGNELALPSKYVNFLYLASHYEKLKGSPEDNEQKQLFVEQHKHYLDEIIEQISEFSKRVILADANLDKVLSAYNKHRDKPIREQAENIIHLFTLTNLGAPAAFKYFDTTIDRKRYTSTKEVLDATLIHQSITGLYETRIDLSQLGGDGGAEAAAKEAAAKEAAAKEAAAKALEAEAAAKEAAAKEAAAKEAAAKAGGTLNIEDEYRLHETSKEPDVSLGSTWLSDFPQAWAETGGMGLAVRQAPLIIPLKATSTPVSIKQYPMSQEARLGIKPHIQRLLDQGILVPCQSPWNTPLLPVKKPGTNDYRPVQDLREVNKRVEDIHPTVPNPYNLLSGLPPSHQWYTVLDLKDAFFCLRLHPTSQPLFAFEWRDPEMGISGQLTWTRLPQGFKNSPTLFNEALHRDLAGFRIQHPDLILLQYVDDLLLAATSELDCQQGTRALLQTLGDLGYRASAKKAQICQKQVKYLGYLLKEGQRWLTEARKETVMGQPIPKTPRQLREFLGKAGFCRLFIPGFAEMAAPLYPLTKPGTLFNWGPDQQKAFQEIKQALLTAPALGLPDLTKPFELFVDEKQGYAKGVLTQKLGPWRRPVAYLSKKLDPVAAGWPPCLRMVAAIAVLTKDAGKLTMGQPLVILAPHAVEALVKQPPDRWLSNARMTHYQALLLDTDRVQFGPVVALNPATLLPLPEEGLQHDCLDILAEAHGTRSDLMDQPLPDADHTWYTDGSSFLQEGQRKAGAAVTTETEVIWARALPAGTSAQRAELIALTQALKMAEGKKLNVYTDSRYAFATAHIHGEIYRRRGWLTSEGKEIKNKDEILALLKALFLPKRLSIIHCPGHQKGNSAEARGNRMADQAAREVATRETPETSTLLAGKRTADGSEFEKRTADGSEFESPKKKAKVE

SEQ ID NO: 2344 - skipped

SEQ ID NO: 2345 - protein, 2096 aa, synthetic construct
MPAAKRVKLDGGDKKYSIGLDIGTNSVGWAVITDEYKVPSKKFKVLGNTDRHSIKKNLIGALLFDSGETAEATRLKRTARRRYTRRKNRICYLQEIFSNEMAKVDDSFFHRLEESFLVEEDKKHERHPIFGNIVDEVAYHEKYPTIYHLRKKLVDSTDKADLRLIYLALAHMIKFRGHFLIEGDLNPDNSDVDKLFIQLVQTYNQLFEENPINASGVDAKAILSARLSKSRRLENLIAQLPGEKKNGLFGNLIALSLGLTPNFKSNFDLAEDAKLQLSKDTYDDDLDNLLAQIGDQYADLFLAAKNLSDAILLSDILRVNTEITKAPLSASMIKRYDEHHQDLTLLKALVRQQLPEKYKEIFFDQSKNGYAGYIDGGASQEEFYKFIKPILEKMDGTEELLVKLNREDLLRKQRTFDNGSIPHQIHLGELHAILRRQEDFYPFLKDNREKIEKILTFRIPYYVGPLARGNSRFAWMTRKSEETITPWNFEEVVDKGASAQSFIERMTNFDKNLPNEKVLPKHSLLYEYFTVYNELTKVKYVTEGMRKPAFLSGEQKKAIVDLLFKTNRKVTVKQLKEDYFKKIECFDSVEISGVEDRFNASLGTYHDLLKIIKDKDFLDNEENEDILEDIVLTLTLFEDREMIEERLKTYAHLFDDKVMKQLKRRRYTGWGRLSRKLINGIRDKQSGKTILDFLKSDGFANRNFMQLIHDDSLTFKEDIQKAQVSGQGDSLHEHIANLAGSPAIKKGILQTVKVVDELVKVMGRHKPENIVIEMARENQTTQKGQKNSRERMKRIEEGIKELGSQILKEHPVENTQLQNEKLYLYYLQNGRDMYVDQELDINRLSDYDVDHIVPQSFLKDDSIDNKVLTRSDKARGKSDNVPSEEVVKKMKNYWRQLLNAKLITQRKFDNLTKAERGGLSELDKAGFIKRQLVETRQITKHVAQILDSRMNTKYDENDKLIREVKVITLKSKLVSDFRKDFQFYKVREINNYHHAHDAYLNAVVGTALIKKYPKLESEFVYGDYKVYDVRKMIAKSEQEIGKATAKYFFYSNIMNFFKTEITLANGEIRKRPLIETNGETGEIVWDKGRDFATVRKVLSMPQVNIVKKTEVQTGGFSKESILPKRNSDKLIARKKDWDPKKYGGFDSPTVAYSVLVVAKVEKGKSKKLKSVKELLGITIMERSSFEKNPIDFLEAKGYKEVKKDLIIKLPKYSLFELENGRKRMLASAGELQKGNELALPSKYVNFLYLASHYEKLKGSPEDNEQKQLFVEQHKHYLDEIIEQISEFSKRVILADANLDKVLSAYNKHRDKPIREQAENIIHLFTLTNLGAPAAFKYFDTTIDRKRYTSTKEVLDATLIHQSITGLYETRIDLSQLGGDGGGSSPAPEAAAKGGTLNIEDEYRLHETSKEPDVSLGSTWLSDFPQAWAETGGMGLAVRQAPLIIPLKATSTPVSIKQYPMSQEARLGIKPHIQRLLDQGILVPCQSPWNTPLLPVKKPGTNDYRPVQDLREVNKRVEDIHPTVPNPYNLLSGLPPSHQWYTVLDLKDAFFCLRLHPTSQPLFAFEWRDPEMGISGQLTWTRLPQGFKNSPTLFNEALHRDLAGFRIQHPDLILLQYVDDLLLAATSELDCQQGTRALLQTLGDLGYRASAKKAQICQKQVKYLGYLLKEGQRWLTEARKETVMGQPIPKTPRQLREFLGKAGFCRLFIPGFAEMAAPLYPLTKPGTLFNWGPDQQKAFQEIKQALLTAPALGLPDLTKPFELFVDEKQGYAKGVLTQKLGPWRRPVAYLSKKLDPVAAGWPPCLRMVAAIAVLTKDAGKLTMGQPLVILAPHAVEALVKQPPDRWLSNARMTHYQALLLDTDRVQFGPVVALNPATLLPLPEEGLQHDCLDILAEAHGTRSDLMDQPLPDADHTWYTDGSSFLQEGQRKAGAAVTTETEVIWARALPAGTSAQRAELIALTQALKMAEGKKLNVYTDSRYAFATAHIHGEIYRRRGWLTSEGKEIKNKDEILALLKALFLPKRLSIIHCPGHQKGNSAEARGNRMADQAAREVATRETPETSTLLAGKRTADGSEFEKRTADGSEFESPKKKAKVE

SEQ ID NO: 2346 - protein, 2094 aa, synthetic construct
MPAAKRVKLDGGDKKYSIGLDIGTNSVGWAVITDEYKVPSKKFKVLGNTDRHSIKKNLIGALLFDSGETAEATRLKRTARRRYTRRKNRICYLQEIFSNEMAKVDDSFFHRLEESFLVEEDKKHERHPIFGNIVDEVAYHEKYPTIYHLRKKLVDSTDKADLRLIYLALAHMIKFRGHFLIEGDLNPDNSDVDKLFIQLVQTYNQLFEENPINASGVDAKAILSARLSKSRRLENLIAQLPGEKKNGLFGNLIALSLGLTPNFKSNFDLAEDAKLQLSKDTYDDDLDNLLAQIGDQYADLFLAAKNLSDAILLSDILRVNTEITKAPLSASMIKRYDEHHQDLTLLKALVRQQLPEKYKEIFFDQSKNGYAGYIDGGASQEEFYKFIKPILEKMDGTEELLVKLNREDLLRKQRTFDNGSIPHQIHLGELHAILRRQEDFYPFLKDNREKIEKILTFRIPYYVGPLARGNSRFAWMTRKSEETITPWNFEEVVDKGASAQSFIERMTNFDKNLPNEKVLPKHSLLYEYFTVYNELTKVKYVTEGMRKPAFLSGEQKKAIVDLLFKTNRKVTVKQLKEDYFKKIECFDSVEISGVEDRFNASLGTYHDLLKIIKDKDFLDNEENEDILEDIVLTLTLFEDREMIEERLKTYAHLFDDKVMKQLKRRRYTGWGRLSRKLINGIRDKQSGKTILDFLKSDGFANRNFMQLIHDDSLTFKEDIQKAQVSGQGDSLHEHIANLAGSPAIKKGILQTVKVVDELVKVMGRHKPENIVIEMARENQTTQKGQKNSRERMKRIEEGIKELGSQILKEHPVENTQLQNEKLYLYYLQNGRDMYVDQELDINRLSDYDVDHIVPQSFLKDDSIDNKVLTRSDKARGKSDNVPSEEVVKKMKNYWRQLLNAKLITQRKFDNLTKAERGGLSELDKAGFIKRQLVETRQITKHVAQILDSRMNTKYDENDKLIREVKVITLKSKLVSDFRKDFQFYKVREINNYHHAHDAYLNAVVGTALIKKYPKLESEFVYGDYKVYDVRKMIAKSEQEIGKATAKYFFYSNIMNFFKTEITLANGEIRKRPLIETNGETGEIVWDKGRDFATVRKVLSMPQVNIVKKTEVQTGGFSKESILPKRNSDKLIARKKDWDPKKYGGFDSPTVAYSVLVVAKVEKGKSKKLKSVKELLGITIMERSSFEKNPIDFLEAKGYKEVKKDLIIKLPKYSLFELENGRKRMLASAGELQKGNELALPSKYVNFLYLASHYEKLKGSPEDNEQKQLFVEQHKHYLDEIIEQISEFSKRVILADANLDKVLSAYNKHRDKPIREQAENIIHLFTLTNLGAPAAFKYFDTTIDRKRYTSTKEVLDATLIHQSITGLYETRIDLSQLGGDGGGGGGSSPAPGGTLNIEDEYRLHETSKEPDVSLGSTWLSDFPQAWAETGGMGLAVRQAPLIIPLKATSTPVSIKQYPMSQEARLGIKPHIQRLLDQGILVPCQSPWNTPLLPVKKPGTNDYRPVQDLREVNKRVEDIHPTVPNPYNLLSGLPPSHQWYTVLDLKDAFFCLRLHPTSQPLFAFEWRDPEMGISGQLTWTRLPQGFKNSPTLFNEALHRDLAGFRIQHPDLILLQYVDDLLLAATSELDCQQGTRALLQTLGDLGYRASAKKAQICQKQVKYLGYLLKEGQRWLTEARKETVMGQPIPKTPRQLREFLGKAGFCRLFIPGFAEMAAPLYPLTKPGTLFNWGPDQQKAFQEIKQALLTAPALGLPDLTKPFELFVDEKQGYAKGVLTQKLGPWRRPVAYLSKKLDPVAAGWPPCLRMVAAIAVLTKDAGKLTMGQPLVILAPHAVEALVKQPPDRWLSNARMTHYQALLLDTDRVQFGPVVALNPATLLPLPEEGLQHDCLDILAEAHGTRSDLMDQPLPDADHTWYTDGSSFLQEGQRKAGAAVTTETEVIWARALPAGTSAQRAELIALTQALKMAEGKKLNVYTDSRYAFATAHIHGEIYRRRGWLTSEGKEIKNKDEILALLKALFLPKRLSIIHCPGHQKGNSAEARGNRMADQAAREVATRETPETSTLLAGKRTADGSEFEKRTADGSEFESPKKKAKVE

SEQ ID NO: 2347 - protein, 2096 aa, synthetic construct
MPAAKRVKLDGGDKKYSIGLDIGTNSVGWAVITDEYKVPSKKFKVLGNTDRHSIKKNLIGALLFDSGETAEATRLKRTARRRYTRRKNRICYLQEIFSNEMAKVDDSFFHRLEESFLVEEDKKHERHPIFGNIVDEVAYHEKYPTIYHLRKKLVDSTDKADLRLIYLALAHMIKFRGHFLIEGDLNPDNSDVDKLFIQLVQTYNQLFEENPINASGVDAKAILSARLSKSRRLENLIAQLPGEKKNGLFGNLIALSLGLTPNFKSNFDLAEDAKLQLSKDTYDDDLDNLLAQIGDQYADLFLAAKNLSDAILLSDILRVNTEITKAPLSASMIKRYDEHHQDLTLLKALVRQQLPEKYKEIFFDQSKNGYAGYIDGGASQEEFYKFIKPILEKMDGTEELLVKLNREDLLRKQRTFDNGSIPHQIHLGELHAILRRQEDFYPFLKDNREKIEKILTFRIPYYVGPLARGNSRFAWMTRKSEETITPWNFEEVVDKGASAQSFIERMTNFDKNLPNEKVLPKHSLLYEYFTVYNELTKVKYVTEGMRKPAFLSGEQKKAIVDLLFKTNRKVTVKQLKEDYFKKIECFDSVEISGVEDRFNASLGTYHDLLKIIKDKDFLDNEENEDILEDIVLTLTLFEDREMIEERLKTYAHLFDDKVMKQLKRRRYTGWGRLSRKLINGIRDKQSGKTILDFLKSDGFANRNFMQLIHDDSLTFKEDIQKAQVSGQGDSLHEHIANLAGSPAIKKGILQTVKVVDELVKVMGRHKPENIVIEMARENQTTQKGQKNSRERMKRIEEGIKELGSQILKEHPVENTQLQNEKLYLYYLQNGRDMYVDQELDINRLSDYDVDHIVPQSFLKDDSIDNKVLTRSDKARGKSDNVPSEEVVKKMKNYWRQLLNAKLITQRKFDNLTKAERGGLSELDKAGFIKRQLVETRQITKHVAQILDSRMNTKYDENDKLIREVKVITLKSKLVSDFRKDFQFYKVREINNYHHAHDAYLNAVVGTALIKKYPKLESEFVYGDYKVYDVRKMIAKSEQEIGKATAKYFFYSNIMNFFKTEITLANGEIRKRPLIETNGETGEIVWDKGRDFATVRKVLSMPQVNIVKKTEVQTGGFSKESILPKRNSDKLIARKKDWDPKKYGGFDSPTVAYSVLVVAKVEKGKSKKLKSVKELLGITIMERSSFEKNPIDFLEAKGYKEVKKDLIIKLPKYSLFELENGRKRMLASAGELQKGNELALPSKYVNFLYLASHYEKLKGSPEDNEQKQLFVEQHKHYLDEIIEQISEFSKRVILADANLDKVLSAYNKHRDKPIREQAENIIHLFTLTNLGAPAAFKYFDTTIDRKRYTSTKEVLDATLIHQSITGLYETRIDLSQLGGDGGPAPEAAAKGSSGGTLNIEDEYRLHETSKEPDVSLGSTWLSDFPQAWAETGGMGLAVRQAPLIIPLKATSTPVSIKQYPMSQEARLGIKPHIQRLLDQGILVPCQSPWNTPLLPVKKPGTNDYRPVQDLREVNKRVEDIHPTVPNPYNLLSGLPPSHQWYTVLDLKDAFFCLRLHPTSQPLFAFEWRDPEMGISGQLTWTRLPQGFKNSPTLFNEALHRDLAGFRIQHPDLILLQYVDDLLLAATSELDCQQGTRALLQTLGDLGYRASAKKAQICQKQVKYLGYLLKEGQRWLTEARKETVMGQPIPKTPRQLREFLGKAGFCRLFIPGFAEMAAPLYPLTKPGTLFNWGPDQQKAFQEIKQALLTAPALGLPDLTKPFELFVDEKQGYAKGVLTQKLGPWRRPVAYLSKKLDPVAAGWPPCLRMVAAIAVLTKDAGKLTMGQPLVILAPHAVEALVKQPPDRWLSNARMTHYQALLLDTDRVQFGPVVALNPATLLPLPEEGLQHDCLDILAEAHGTRSDLMDQPLPDADHTWYTDGSSFLQEGQRKAGAAVTTETEVIWARALPAGTSAQRAELIALTQALKMAEGKKLNVYTDSRYAFATAHIHGEIYRRRGWLTSEGKEIKNKDEILALLKALFLPKRLSIIHCPGHQKGNSAEARGNRMADQAAREVATRETPETSTLLAGKRTADGSEFEKRTADGSEFESPKKKAKVE

SEQ ID NO: 2348-2352 - skipped (5 entries)

SEQ ID NO: 2353 - protein, 2091 aa, synthetic construct
MPAAKRVKLDGGDKKYSIGLDIGTNSVGWAVITDEYKVPSKKFKVLGNTDRHSIKKNLIGALLFDSGETAEATRLKRTARRRYTRRKNRICYLQEIFSNEMAKVDDSFFHRLEESFLVEEDKKHERHPIFGNIVDEVAYHEKYPTIYHLRKKLVDSTDKADLRLIYLALAHMIKFRGHFLIEGDLNPDNSDVDKLFIQLVQTYNQLFEENPINASGVDAKAILSARLSKSRRLENLIAQLPGEKKNGLFGNLIALSLGLTPNFKSNFDLAEDAKLQLSKDTYDDDLDNLLAQIGDQYADLFLAAKNLSDAILLSDILRVNTEITKAPLSASMIKRYDEHHQDLTLLKALVRQQLPEKYKEIFFDQSKNGYAGYIDGGASQEEFYKFIKPILEKMDGTEELLVKLNREDLLRKQRTFDNGSIPHQIHLGELHAILRRQEDFYPFLKDNREKIEKILTFRIPYYVGPLARGNSRFAWMTRKSEETITPWNFEEVVDKGASAQSFIERMTNFDKNLPNEKVLPKHSLLYEYFTVYNELTKVKYVTEGMRKPAFLSGEQKKAIVDLLFKTNRKVTVKQLKEDYFKKIECFDSVEISGVEDRFNASLGTYHDLLKIIKDKDFLDNEENEDILEDIVLTLTLFEDREMIEERLKTYAHLFDDKVMKQLKRRRYTGWGRLSRKLINGIRDKQSGKTILDFLKSDGFANRNFMQLIHDDSLTFKEDIQKAQVSGQGDSLHEHIANLAGSPAIKKGILQTVKVVDELVKVMGRHKPENIVIEMARENQTTQKGQKNSRERMKRIEEGIKELGSQILKEHPVENTQLQNEKLYLYYLQNGRDMYVDQELDINRLSDYDVDHIVPQSFLKDDSIDNKVLTRSDKARGKSDNVPSEEVVKKMKNYWRQLLNAKLITQRKFDNLTKAERGGLSELDKAGFIKRQLVETRQITKHVAQILDSRMNTKYDENDKLIREVKVITLKSKLVSDFRKDFQFYKVREINNYHHAHDAYLNAVVGTALIKKYPKLESEFVYGDYKVYDVRKMIAKSEQEIGKATAKYFFYSNIMNFFKTEITLANGEIRKRPLIETNGETGEIVWDKGRDFATVRKVLSMPQVNIVKKTEVQTGGFSKESILPKRNSDKLIARKKDWDPKKYGGFDSPTVAYSVLVVAKVEKGKSKKLKSVKELLGITIMERSSFEKNPIDFLEAKGYKEVKKDLIIKLPKYSLFELENGRKRMLASAGELQKGNELALPSKYVNFLYLASHYEKLKGSPEDNEQKQLFVEQHKHYLDEIIEQISEFSKRVILADANLDKVLSAYNKHRDKPIREQAENIIHLFTLTNLGAPAAFKYFDTTIDRKRYTSTKEVLDATLIHQSITGLYETRIDLSQLGGDGGGGSGSSGGTLNIEDEYRLHETSKEPDVSLGSTWLSDFPQAWAETGGMGLAVRQAPLIIPLKATSTPVSIKQYPMSQEARLGIKPHIQRLLDQGILVPCQSPWNTPLLPVKKPGTNDYRPVQDLREVNKRVEDIHPTVPNPYNLLSGLPPSHQWYTVLDLKDAFFCLRLHPTSQPLFAFEWRDPEMGISGQLTWTRLPQGFKNSPTLFNEALHRDLAGFRIQHPDLILLQYVDDLLLAATSELDCQQGTRALLQTLGDLGYRASAKKAQICQKQVKYLGYLLKEGQRWLTEARKETVMGQPIPKTPRQLREFLGKAGFCRLFIPGFAEMAAPLYPLTKPGTLFNWGPDQQKAFQEIKQALLTAPALGLPDLTKPFELFVDEKQGYAKGVLTQKLGPWRRPVAYLSKKLDPVAAGWPPCLRMVAAIAVLTKDAGKLTMGQPLVILAPHAVEALVKQPPDRWLSNARMTHYQALLLDTDRVQFGPVVALNPATLLPLPEEGLQHDCLDILAEAHGTRSDLMDQPLPDADHTWYTDGSSFLQEGQRKAGAAVTTETEVIWARALPAGTSAQRAELIALTQALKMAEGKKLNVYTDSRYAFATAHIHGEIYRRRGWLTSEGKEIKNKDEILALLKALFLPKRLSIIHCPGHQKGNSAEARGNRMADQAAREVATRETPETSTLLAGKRTADGSEFEKRTADGSEFESPKKKAKVE

SEQ ID NO: 2354-2358 - skipped (5 entries)

SEQ ID NO: 2359 - protein, 2096 aa, synthetic construct
MPAAKRVKLDGGDKKYSIGLDIGTNSVGWAVITDEYKVPSKKFKVLGNTDRHSIKKNLIGALLFDSGETAEATRLKRTARRRYTRRKNRICYLQEIFSNEMAKVDDSFFHRLEESFLVEEDKKHERHPIFGNIVDEVAYHEKYPTIYHLRKKLVDSTDKADLRLIYLALAHMIKFRGHFLIEGDLNPDNSDVDKLFIQLVQTYNQLFEENPINASGVDAKAILSARLSKSRRLENLIAQLPGEKKNGLFGNLIALSLGLTPNFKSNFDLAEDAKLQLSKDTYDDDLDNLLAQIGDQYADLFLAAKNLSDAILLSDILRVNTEITKAPLSASMIKRYDEHHQDLTLLKALVRQQLPEKYKEIFFDQSKNGYAGYIDGGASQEEFYKFIKPILEKMDGTEELLVKLNREDLLRKQRTFDNGSIPHQIHLGELHAILRRQEDFYPFLKDNREKIEKILTFRIPYYVGPLARGNSRFAWMTRKSEETITPWNFEEVVDKGASAQSFIERMTNFDKNLPNEKVLPKHSLLYEYFTVYNELTKVKYVTEGMRKPAFLSGEQKKAIVDLLFKTNRKVTVKQLKEDYFKKIECFDSVEISGVEDRFNASLGTYHDLLKIIKDKDFLDNEENEDILEDIVLTLTLFEDREMIEERLKTYAHLFDDKVMKQLKRRRYTGWGRLSRKLINGIRDKQSGKTILDFLKSDGFANRNFMQLIHDDSLTFKEDIQKAQVSGQGDSLHEHIANLAGSPAIKKGILQTVKVVDELVKVMGRHKPENIVIEMARENQTTQKGQKNSRERMKRIEEGIKELGSQILKEHPVENTQLQNEKLYLYYLQNGRDMYVDQELDINRLSDYDVDHIVPQSFLKDDSIDNKVLTRSDKARGKSDNVPSEEVVKKMKNYWRQLLNAKLITQRKFDNLTKAERGGLSELDKAGFIKRQLVETRQITKHVAQILDSRMNTKYDENDKLIREVKVITLKSKLVSDFRKDFQFYKVREINNYHHAHDAYLNAVVGTALIKKYPKLESEFVYGDYKVYDVRKMIAKSEQEIGKATAKYFFYSNIMNFFKTEITLANGEIRKRPLIETNGETGEIVWDKGRDFATVRKVLSMPQVNIVKKTEVQTGGFSKESILPKRNSDKLIARKKDWDPKKYGGFDSPTVAYSVLVVAKVEKGKSKKLKSVKELLGITIMERSSFEKNPIDFLEAKGYKEVKKDLIIKLPKYSLFELENGRKRMLASAGELQKGNELALPSKYVNFLYLASHYEKLKGSPEDNEQKQLFVEQHKHYLDEIIEQISEFSKRVILADANLDKVLSAYNKHRDKPIREQAENIIHLFTLTNLGAPAAFKYFDTTIDRKRYTSTKEVLDATLIHQSITGLYETRIDLSQLGGDGGGSSEAAAKPAPGGTLNIEDEYRLHETSKEPDVSLGSTWLSDFPQAWAETGGMGLAVRQAPLIIPLKATSTPVSIKQYPMSQEARLGIKPHIQRLLDQGILVPCQSPWNTPLLPVKKPGTNDYRPVQDLREVNKRVEDIHPTVPNPYNLLSGLPPSHQWYTVLDLKDAFFCLRLHPTSQPLFAFEWRDPEMGISGQLTWTRLPQGFKNSPTLFNEALHRDLAGFRIQHPDLILLQYVDDLLLAATSELDCQQGTRALLQTLGDLGYRASAKKAQICQKQVKYLGYLLKEGQRWLTEARKETVMGQPIPKTPRQLREFLGKAGFCRLFIPGFAEMAAPLYPLTKPGTLFNWGPDQQKAFQEIKQALLTAPALGLPDLTKPFELFVDEKQGYAKGVLTQKLGPWRRPVAYLSKKLDPVAAGWPPCLRMVAAIAVLTKDAGKLTMGQPLVILAPHAVEALVKQPPDRWLSNARMTHYQALLLDTDRVQFGPVVALNPATLLPLPEEGLQHDCLDILAEAHGTRSDLMDQPLPDADHTWYTDGSSFLQEGQRKAGAAVTTETEVIWARALPAGTSAQRAELIALTQALKMAEGKKLNVYTDSRYAFATAHIHGEIYRRRGWLTSEGKEIKNKDEILALLKALFLPKRLSIIHCPGHQKGNSAEARGNRMADQAAREVATRETPETSTLLAGKRTADGSEFEKRTADGSEFESPKKKAKVE

SEQ ID NO: 2360 - protein, 2094 aa, synthetic construct
MPAAKRVKLDGGDKKYSIGLDIGTNSVGWAVITDEYKVPSKKFKVLGNTDRHSIKKNLIGALLFDSGETAEATRLKRTARRRYTRRKNRICYLQEIFSNEMAKVDDSFFHRLEESFLVEEDKKHERHPIFGNIVDEVAYHEKYPTIYHLRKKLVDSTDKADLRLIYLALAHMIKFRGHFLIEGDLNPDNSDVDKLFIQLVQTYNQLFEENPINASGVDAKAILSARLSKSRRLENLIAQLPGEKKNGLFGNLIALSLGLTPNFKSNFDLAEDAKLQLSKDTYDDDLDNLLAQIGDQYADLFLAAKNLSDAILLSDILRVNTEITKAPLSASMIKRYDEHHQDLTLLKALVRQQLPEKYKEIFFDQSKNGYAGYIDGGASQEEFYKFIKPILEKMDGTEELLVKLNREDLLRKQRTFDNGSIPHQIHLGELHAILRRQEDFYPFLKDNREKIEKILTFRIPYYVGPLARGNSRFAWMTRKSEETITPWNFEEVVDKGASAQSFIERMTNFDKNLPNEKVLPKHSLLYEYFTVYNELTKVKYVTEGMRKPAFLSGEQKKAIVDLLFKTNRKVTVKQLKEDYFKKIECFDSVEISGVEDRFNASLGTYHDLLKIIKDKDFLDNEENEDILEDIVLTLTLFEDREMIEERLKTYAHLFDDKVMKQLKRRRYTGWGRLSRKLINGIRDKQSGKTILDFLKSDGFANRNFMQLIHDDSLTFKEDIQKAQVSGQGDSLHEHIANLAGSPAIKKGILQTVKVVDELVKVMGRHKPENIVIEMARENQTTQKGQKNSRERMKRIEEGIKELGSQILKEHPVENTQLQNEKLYLYYLQNGRDMYVDQELDINRLSDYDVDHIVPQSFLKDDSIDNKVLTRSDKARGKSDNVPSEEVVKKMKNYWRQLLNAKLITQRKFDNLTKAERGGLSELDKAGFIKRQLVETRQITKHVAQILDSRMNTKYDENDKLIREVKVITLKSKLVSDFRKDFQFYKVREINNYHHAHDAYLNAVVGTALIKKYPKLESEFVYGDYKVYDVRKMIAKSEQEIGKATAKYFFYSNIMNFFKTEITLANGEIRKRPLIETNGETGEIVWDKGRDFATVRKVLSMPQVNIVKKTEVQTGGFSKESILPKRNSDKLIARKKDWDPKKYGGFDSPTVAYSVLVVAKVEKGKSKKLKSVKELLGITIMERSSFEKNPIDFLEAKGYKEVKKDLIIKLPKYSLFELENGRKRMLASAGELQKGNELALPSKYVNFLYLASHYEKLKGSPEDNEQKQLFVEQHKHYLDEIIEQISEFSKRVILADANLDKVLSAYNKHRDKPIREQAENIIHLFTLTNLGAPAAFKYFDTTIDRKRYTSTKEVLDATLIHQSITGLYETRIDLSQLGGDGGGGSGGSGGSGGTLNIEDEYRLHETSKEPDVSLGSTWLSDFPQAWAETGGMGLAVRQAPLIIPLKATSTPVSIKQYPMSQEARLGIKPHIQRLLDQGILVPCQSPWNTPLLPVKKPGTNDYRPVQDLREVNKRVEDIHPTVPNPYNLLSGLPPSHQWYTVLDLKDAFFCLRLHPTSQPLFAFEWRDPEMGISGQLTWTRLPQGFKNSPTLFNEALHRDLAGFRIQHPDLILLQYVDDLLLAATSELDCQQGTRALLQTLGDLGYRASAKKAQICQKQVKYLGYLLKEGQRWLTEARKETVMGQPIPKTPRQLREFLGKAGFCRLFIPGFAEMAAPLYPLTKPGTLFNWGPDQQKAFQEIKQALLTAPALGLPDLTKPFELFVDEKQGYAKGVLTQKLGPWRRPVAYLSKKLDPVAAGWPPCLRMVAAIAVLTKDAGKLTMGQPLVILAPHAVEALVKQPPDRWLSNARMTHYQALLLDTDRVQFGPVVALNPATLLPLPEEGLQHDCLDILAEAHGTRSDLMDQPLPDADHTWYTDGSSFLQEGQRKAGAAVTTETEVIWARALPAGTSAQRAELIALTQALKMAEGKKLNVYTDSRYAFATAHIHGEIYRRRGWLTSEGKEIKNKDEILALLKALFLPKRLSIIHCPGHQKGNSAEARGNRMADQAAREVATRETPETSTLLAGKRTADGSEFEKRTADGSEFESPKKKAKVE

SEQ ID NO: 2361-2362 - skipped (2 entries)

SEQ ID NO: 2363 - protein, 2093 aa, synthetic construct
MPAAKRVKLDGGDKKYSIGLDIGTNSVGWAVITDEYKVPSKKFKVLGNTDRHSIKKNLIGALLFDSGETAEATRLKRTARRRYTRRKNRICYLQEIFSNEMAKVDDSFFHRLEESFLVEEDKKHERHPIFGNIVDEVAYHEKYPTIYHLRKKLVDSTDKADLRLIYLALAHMIKFRGHFLIEGDLNPDNSDVDKLFIQLVQTYNQLFEENPINASGVDAKAILSARLSKSRRLENLIAQLPGEKKNGLFGNLIALSLGLTPNFKSNFDLAEDAKLQLSKDTYDDDLDNLLAQIGDQYADLFLAAKNLSDAILLSDILRVNTEITKAPLSASMIKRYDEHHQDLTLLKALVRQQLPEKYKEIFFDQSKNGYAGYIDGGASQEEFYKFIKPILEKMDGTEELLVKLNREDLLRKQRTFDNGSIPHQIHLGELHAILRRQEDFYPFLKDNREKIEKILTFRIPYYVGPLARGNSRFAWMTRKSEETITPWNFEEVVDKGASAQSFIERMTNFDKNLPNEKVLPKHSLLYEYFTVYNELTKVKYVTEGMRKPAFLSGEQKKAIVDLLFKTNRKVTVKQLKEDYFKKIECFDSVEISGVEDRFNASLGTYHDLLKIIKDKDFLDNEENEDILEDIVLTLTLFEDREMIEERLKTYAHLFDDKVMKQLKRRRYTGWGRLSRKLINGIRDKQSGKTILDFLKSDGFANRNFMQLIHDDSLTFKEDIQKAQVSGQGDSLHEHIANLAGSPAIKKGILQTVKVVDELVKVMGRHKPENIVIEMARENQTTQKGQKNSRERMKRIEEGIKELGSQILKEHPVENTQLQNEKLYLYYLQNGRDMYVDQELDINRLSDYDVDHIVPQSFLKDDSIDNKVLTRSDKARGKSDNVPSEEVVKKMKNYWRQLLNAKLITQRKFDNLTKAERGGLSELDKAGFIKRQLVETRQITKHVAQILDSRMNTKYDENDKLIREVKVITLKSKLVSDFRKDFQFYKVREINNYHHAHDAYLNAVVGTALIKKYPKLESEFVYGDYKVYDVRKMIAKSEQEIGKATAKYFFYSNIMNFFKTEITLANGEIRKRPLIETNGETGEIVWDKGRDFATVRKVLSMPQVNIVKKTEVQTGGFSKESILPKRNSDKLIARKKDWDPKKYGGFDSPTVAYSVLVVAKVEKGKSKKLKSVKELLGITIMERSSFEKNPIDFLEAKGYKEVKKDLIIKLPKYSLFELENGRKRMLASAGELQKGNELALPSKYVNFLYLASHYEKLKGSPEDNEQKQLFVEQHKHYLDEIIEQISEFSKRVILADANLDKVLSAYNKHRDKPIREQAENIIHLFTLTNLGAPAAFKYFDTTIDRKRYTSTKEVLDATLIHQSITGLYETRIDLSQLGGDGGGGSEAAAKGGTLNIEDEYRLHETSKEPDVSLGSTWLSDFPQAWAETGGMGLAVRQAPLIIPLKATSTPVSIKQYPMSQEARLGIKPHIQRLLDQGILVPCQSPWNTPLLPVKKPGTNDYRPVQDLREVNKRVEDIHPTVPNPYNLLSGLPPSHQWYTVLDLKDAFFCLRLHPTSQPLFAFEWRDPEMGISGQLTWTRLPQGFKNSPTLFNEALHRDLAGFRIQHPDLILLQYVDDLLLAATSELDCQQGTRALLQTLGDLGYRASAKKAQICQKQVKYLGYLLKEGQRWLTEARKETVMGQPIPKTPRQLREFLGKAGFCRLFIPGFAEMAAPLYPLTKPGTLFNWGPDQQKAFQEIKQALLTAPALGLPDLTKPFELFVDEKQGYAKGVLTQKLGPWRRPVAYLSKKLDPVAAGWPPCLRMVAAIAVLTKDAGKLTMGQPLVILAPHAVEALVKQPPDRWLSNARMTHYQALLLDTDRVQFGPVVALNPATLLPLPEEGLQHDCLDILAEAHGTRSDLMDQPLPDADHTWYTDGSSFLQEGQRKAGAAVTTETEVIWARALPAGTSAQRAELIALTQALKMAEGKKLNVYTDSRYAFATAHIHGEIYRRRGWLTSEGKEIKNKDEILALLKALFLPKRLSIIHCPGHQKGNSAEARGNRMADQAAREVATRETPETSTLLAGKRTADGSEFEKRTADGSEFESPKKKAKVE

SEQ ID NO: 2364 - protein, 2090 aa, synthetic construct
MPAAKRVKLDGGDKKYSIGLDIGTNSVGWAVITDEYKVPSKKFKVLGNTDRHSIKKNLIGALLFDSGETAEATRLKRTARRRYTRRKNRICYLQEIFSNEMAKVDDSFFHRLEESFLVEEDKKHERHPIFGNIVDEVAYHEKYPTIYHLRKKLVDSTDKADLRLIYLALAHMIKFRGHFLIEGDLNPDNSDVDKLFIQLVQTYNQLFEENPINASGVDAKAILSARLSKSRRLENLIAQLPGEKKNGLFGNLIALSLGLTPNFKSNFDLAEDAKLQLSKDTYDDDLDNLLAQIGDQYADLFLAAKNLSDAILLSDILRVNTEITKAPLSASMIKRYDEHHQDLTLLKALVRQQLPEKYKEIFFDQSKNGYAGYIDGGASQEEFYKFIKPILEKMDGTEELLVKLNREDLLRKQRTFDNGSIPHQIHLGELHAILRRQEDFYPFLKDNREKIEKILTFRIPYYVGPLARGNSRFAWMTRKSEETITPWNFEEVVDKGASAQSFIERMTNFDKNLPNEKVLPKHSLLYEYFTVYNELTKVKYVTEGMRKPAFLSGEQKKAIVDLLFKTNRKVTVKQLKEDYFKKIECFDSVEISGVEDRFNASLGTYHDLLKIIKDKDFLDNEENEDILEDIVLTLTLFEDREMIEERLKTYAHLFDDKVMKQLKRRRYTGWGRLSRKLINGIRDKQSGKTILDFLKSDGFANRNFMQLIHDDSLTFKEDIQKAQVSGQGDSLHEHIANLAGSPAIKKGILQTVKVVDELVKVMGRHKPENIVIEMARENQTTQKGQKNSRERMKRIEEGIKELGSQILKEHPVENTQLQNEKLYLYYLQNGRDMYVDQELDINRLSDYDVDHIVPQSFLKDDSIDNKVLTRSDKARGKSDNVPSEEVVKKMKNYWRQLLNAKLITQRKFDNLTKAERGGLSELDKAGFIKRQLVETRQITKHVAQILDSRMNTKYDENDKLIREVKVITLKSKLVSDFRKDFQFYKVREINNYHHAHDAYLNAVVGTALIKKYPKLESEFVYGDYKVYDVRKMIAKSEQEIGKATAKYFFYSNIMNFFKTEITLANGEIRKRPLIETNGETGEIVWDKGRDFATVRKVLSMPQVNIVKKTEVQTGGFSKESILPKRNSDKLIARKKDWDPKKYGGFDSPTVAYSVLVVAKVEKGKSKKLKSVKELLGITIMERSSFEKNPIDFLEAKGYKEVKKDLIIKLPKYSLFELENGRKRMLASAGELQKGNELALPSKYVNFLYLASHYEKLKGSPEDNEQKQLFVEQHKHYLDEIIEQISEFSKRVILADANLDKVLSAYNKHRDKPIREQAENIIHLFTLTNLGAPAAFKYFDTTIDRKRYTSTKEVLDATLIHQSITGLYETRIDLSQLGGDGGPAPAPGGTLNIEDEYRLHETSKEPDVSLGSTWLSDFPQAWAETGGMGLAVRQAPLIIPLKATSTPVSIKQYPMSQEARLGIKPHIQRLLDQGILVPCQSPWNTPLLPVKKPGTNDYRPVQDLREVNKRVEDIHPTVPNPYNLLSGLPPSHQWYTVLDLKDAFFCLRLHPTSQPLFAFEWRDPEMGISGQLTWTRLPQGFKNSPTLFNEALHRDLAGFRIQHPDLILLQYVDDLLLAATSELDCQQGTRALLQTLGDLGYRASAKKAQICQKQVKYLGYLLKEGQRWLTEARKETVMGQPIPKTPRQLREFLGKAGFCRLFIPGFAEMAAPLYPLTKPGTLFNWGPDQQKAFQEIKQALLTAPALGLPDLTKPFELFVDEKQGYAKGVLTQKLGPWRRPVAYLSKKLDPVAAGWPPCLRMVAAIAVLTKDAGKLTMGQPLVILAPHAVEALVKQPPDRWLSNARMTHYQALLLDTDRVQFGPVVALNPATLLPLPEEGLQHDCLDILAEAHGTRSDLMDQPLPDADHTWYTDGSSFLQEGQRKAGAAVTTETEVIWARALPAGTSAQRAELIALTQALKMAEGKKLNVYTDSRYAFATAHIHGEIYRRRGWLTSEGKEIKNKDEILALLKALFLPKRLSIIHCPGHQKGNSAEARGNRMADQAAREVATRETPETSTLLAGKRTADGSEFEKRTADGSEFESPKKKAKVE

SEQ ID NO: 2365 - protein, 2094 aa, synthetic construct
MPAAKRVKLDGGDKKYSIGLDIGTNSVGWAVITDEYKVPSKKFKVLGNTDRHSIKKNLIGALLFDSGETAEATRLKRTARRRYTRRKNRICYLQEIFSNEMAKVDDSFFHRLEESFLVEEDKKHERHPIFGNIVDEVAYHEKYPTIYHLRKKLVDSTDKADLRLIYLALAHMIKFRGHFLIEGDLNPDNSDVDKLFIQLVQTYNQLFEENPINASGVDAKAILSARLSKSRRLENLIAQLPGEKKNGLFGNLIALSLGLTPNFKSNFDLAEDAKLQLSKDTYDDDLDNLLAQIGDQYADLFLAAKNLSDAILLSDILRVNTEITKAPLSASMIKRYDEHHQDLTLLKALVRQQLPEKYKEIFFDQSKNGYAGYIDGGASQEEFYKFIKPILEKMDGTEELLVKLNREDLLRKQRTFDNGSIPHQIHLGELHAILRRQEDFYPFLKDNREKIEKILTFRIPYYVGPLARGNSRFAWMTRKSEETITPWNFEEVVDKGASAQSFIERMTNFDKNLPNEKVLPKHSLLYEYFTVYNELTKVKYVTEGMRKPAFLSGEQKKAIVDLLFKTNRKVTVKQLKEDYFKKIECFDSVEISGVEDRFNASLGTYHDLLKIIKDKDFLDNEENEDILEDIVLTLTLFEDREMIEERLKTYAHLFDDKVMKQLKRRRYTGWGRLSRKLINGIRDKQSGKTILDFLKSDGFANRNFMQLIHDDSLTFKEDIQKAQVSGQGDSLHEHIANLAGSPAIKKGILQTVKVVDELVKVMGRHKPENIVIEMARENQTTQKGQKNSRERMKRIEEGIKELGSQILKEHPVENTQLQNEKLYLYYLQNGRDMYVDQELDINRLSDYDVDHIVPQSFLKDDSIDNKVLTRSDKARGKSDNVPSEEVVKKMKNYWRQLLNAKLITQRKFDNLTKAERGGLSELDKAGFIKRQLVETRQITKHVAQILDSRMNTKYDENDKLIREVKVITLKSKLVSDFRKDFQFYKVREINNYHHAHDAYLNAVVGTALIKKYPKLESEFVYGDYKVYDVRKMIAKSEQEIGKATAKYFFYSNIMNFFKTEITLANGEIRKRPLIETNGETGEIVWDKGRDFATVRKVLSMPQVNIVKKTEVQTGGFSKESILPKRNSDKLIARKKDWDPKKYGGFDSPTVAYSVLVVAKVEKGKSKKLKSVKELLGITIMERSSFEKNPIDFLEAKGYKEVKKDLIIKLPKYSLFELENGRKRMLASAGELQKGNELALPSKYVNFLYLASHYEKLKGSPEDNEQKQLFVEQHKHYLDEIIEQISEFSKRVILADANLDKVLSAYNKHRDKPIREQAENIIHLFTLTNLGAPAAFKYFDTTIDRKRYTSTKEVLDATLIHQSITGLYETRIDLSQLGGDGGGGSPAPGGGGGTLNIEDEYRLHETSKEPDVSLGSTWLSDFPQAWAETGGMGLAVRQAPLIIPLKATSTPVSIKQYPMSQEARLGIKPHIQRLLDQGILVPCQSPWNTPLLPVKKPGTNDYRPVQDLREVNKRVEDIHPTVPNPYNLLSGLPPSHQWYTVLDLKDAFFCLRLHPTSQPLFAFEWRDPEMGISGQLTWTRLPQGFKNSPTLFNEALHRDLAGFRIQHPDLILLQYVDDLLLAATSELDCQQGTRALLQTLGDLGYRASAKKAQICQKQVKYLGYLLKEGQRWLTEARKETVMGQPIPKTPRQLREFLGKAGFCRLFIPGFAEMAAPLYPLTKPGTLFNWGPDQQKAFQEIKQALLTAPALGLPDLTKPFELFVDEKQGYAKGVLTQKLGPWRRPVAYLSKKLDPVAAGWPPCLRMVAAIAVLTKDAGKLTMGQPLVILAPHAVEALVKQPPDRWLSNARMTHYQALLLDTDRVQFGPVVALNPATLLPLPEEGLQHDCLDILAEAHGTRSDLMDQPLPDADHTWYTDGSSFLQEGQRKAGAAVTTETEVIWARALPAGTSAQRAELIALTQALKMAEGKKLNVYTDSRYAFATAHIHGEIYRRRGWLTSEGKEIKNKDEILALLKALFLPKRLSIIHCPGHQKGNSAEARGNRMADQAAREVATRETPETSTLLAGKRTADGSEFEKRTADGSEFESPKKKAKVE

SEQ ID NO: 2366-2369 - skipped (4 entries)

SEQ ID NO: 2370 - protein, 2096 aa, synthetic construct
MPAAKRVKLDGGDKKYSIGLDIGTNSVGWAVITDEYKVPSKKFKVLGNTDRHSIKKNLIGALLFDSGETAEATRLKRTARRRYTRRKNRICYLQEIFSNEMAKVDDSFFHRLEESFLVEEDKKHERHPIFGNIVDEVAYHEKYPTIYHLRKKLVDSTDKADLRLIYLALAHMIKFRGHFLIEGDLNPDNSDVDKLFIQLVQTYNQLFEENPINASGVDAKAILSARLSKSRRLENLIAQLPGEKKNGLFGNLIALSLGLTPNFKSNFDLAEDAKLQLSKDTYDDDLDNLLAQIGDQYADLFLAAKNLSDAILLSDILRVNTEITKAPLSASMIKRYDEHHQDLTLLKALVRQQLPEKYKEIFFDQSKNGYAGYIDGGASQEEFYKFIKPILEKMDGTEELLVKLNREDLLRKQRTFDNGSIPHQIHLGELHAILRRQEDFYPFLKDNREKIEKILTFRIPYYVGPLARGNSRFAWMTRKSEETITPWNFEEVVDKGASAQSFIERMTNFDKNLPNEKVLPKHSLLYEYFTVYNELTKVKYVTEGMRKPAFLSGEQKKAIVDLLFKTNRKVTVKQLKEDYFKKIECFDSVEISGVEDRFNASLGTYHDLLKIIKDKDFLDNEENEDILEDIVLTLTLFEDREMIEERLKTYAHLFDDKVMKQLKRRRYTGWGRLSRKLINGIRDKQSGKTILDFLKSDGFANRNFMQLIHDDSLTFKEDIQKAQVSGQGDSLHEHIANLAGSPAIKKGILQTVKVVDELVKVMGRHKPENIVIEMARENQTTQKGQKNSRERMKRIEEGIKELGSQILKEHPVENTQLQNEKLYLYYLQNGRDMYVDQELDINRLSDYDVDHIVPQSFLKDDSIDNKVLTRSDKARGKSDNVPSEEVVKKMKNYWRQLLNAKLITQRKFDNLTKAERGGLSELDKAGFIKRQLVETRQITKHVAQILDSRMNTKYDENDKLIREVKVITLKSKLVSDFRKDFQFYKVREINNYHHAHDAYLNAVVGTALIKKYPKLESEFVYGDYKVYDVRKMIAKSEQEIGKATAKYFFYSNIMNFFKTEITLANGEIRKRPLIETNGETGEIVWDKGRDFATVRKVLSMPQVNIVKKTEVQTGGFSKESILPKRNSDKLIARKKDWDPKKYGGFDSPTVAYSVLVVAKVEKGKSKKLKSVKELLGITIMERSSFEKNPIDFLEAKGYKEVKKDLIIKLPKYSLFELENGRKRMLASAGELQKGNELALPSKYVNFLYLASHYEKLKGSPEDNEQKQLFVEQHKHYLDEIIEQISEFSKRVILADANLDKVLSAYNKHRDKPIREQAENIIHLFTLTNLGAPAAFKYFDTTIDRKRYTSTKEVLDATLIHQSITGLYETRIDLSQLGGDGGEAAAKGGSGSSGGTLNIEDEYRLHETSKEPDVSLGSTWLSDFPQAWAETGGMGLAVRQAPLIIPLKATSTPVSIKQYPMSQEARLGIKPHIQRLLDQGILVPCQSPWNTPLLPVKKPGTNDYRPVQDLREVNKRVEDIHPTVPNPYNLLSGLPPSHQWYTVLDLKDAFFCLRLHPTSQPLFAFEWRDPEMGISGQLTWTRLPQGFKNSPTLFNEALHRDLAGFRIQHPDLILLQYVDDLLLAATSELDCQQGTRALLQTLGDLGYRASAKKAQICQKQVKYLGYLLKEGQRWLTEARKETVMGQPIPKTPRQLREFLGKAGFCRLFIPGFAEMAAPLYPLTKPGTLFNWGPDQQKAFQEIKQALLTAPALGLPDLTKPFELFVDEKQGYAKGVLTQKLGPWRRPVAYLSKKLDPVAAGWPPCLRMVAAIAVLTKDAGKLTMGQPLVILAPHAVEALVKQPPDRWLSNARMTHYQALLLDTDRVQFGPVVALNPATLLPLPEEGLQHDCLDILAEAHGTRSDLMDQPLPDADHTWYTDGSSFLQEGQRKAGAAVTTETEVIWARALPAGTSAQRAELIALTQALKMAEGKKLNVYTDSRYAFATAHIHGEIYRRRGWLTSEGKEIKNKDEILALLKALFLPKRLSIIHCPGHQKGNSAEARGNRMADQAAREVATRETPETSTLLAGKRTADGSEFEKRTADGSEFESPKKKAKVE

SEQ ID NO: 2371 - protein, 2094 aa, synthetic construct
MPAAKRVKLDGGDKKYSIGLDIGTNSVGWAVITDEYKVPSKKFKVLGNTDRHSIKKNLIGALLFDSGETAEATRLKRTARRRYTRRKNRICYLQEIFSNEMAKVDDSFFHRLEESFLVEEDKKHERHPIFGNIVDEVAYHEKYPTIYHLRKKLVDSTDKADLRLIYLALAHMIKFRGHFLIEGDLNPDNSDVDKLFIQLVQTYNQLFEENPINASGVDAKAILSARLSKSRRLENLIAQLPGEKKNGLFGNLIALSLGLTPNFKSNFDLAEDAKLQLSKDTYDDDLDNLLAQIGDQYADLFLAAKNLSDAILLSDILRVNTEITKAPLSASMIKRYDEHHQDLTLLKALVRQQLPEKYKEIFFDQSKNGYAGYIDGGASQEEFYKFIKPILEKMDGTEELLVKLNREDLLRKQRTFDNGSIPHQIHLGELHAILRRQEDFYPFLKDNREKIEKILTFRIPYYVGPLARGNSRFAWMTRKSEETITPWNFEEVVDKGASAQSFIERMTNFDKNLPNEKVLPKHSLLYEYFTVYNELTKVKYVTEGMRKPAFLSGEQKKAIVDLLFKTNRKVTVKQLKEDYFKKIECFDSVEISGVEDRFNASLGTYHDLLKIIKDKDFLDNEENEDILEDIVLTLTLFEDREMIEERLKTYAHLFDDKVMKQLKRRRYTGWGRLSRKLINGIRDKQSGKTILDFLKSDGFANRNFMQLIHDDSLTFKEDIQKAQVSGQGDSLHEHIANLAGSPAIKKGILQTVKVVDELVKVMGRHKPENIVIEMARENQTTQKGQKNSRERMKRIEEGIKELGSQILKEHPVENTQLQNEKLYLYYLQNGRDMYVDQELDINRLSDYDVDHIVPQSFLKDDSIDNKVLTRSDKARGKSDNVPSEEVVKKMKNYWRQLLNAKLITQRKFDNLTKAERGGLSELDKAGFIKRQLVETRQITKHVAQILDSRMNTKYDENDKLIREVKVITLKSKLVSDFRKDFQFYKVREINNYHHAHDAYLNAVVGTALIKKYPKLESEFVYGDYKVYDVRKMIAKSEQEIGKATAKYFFYSNIMNFFKTEITLANGEIRKRPLIETNGETGEIVWDKGRDFATVRKVLSMPQVNIVKKTEVQTGGFSKESILPKRNSDKLIARKKDWDPKKYGGFDSPTVAYSVLVVAKVEKGKSKKLKSVKELLGITIMERSSFEKNPIDFLEAKGYKEVKKDLIIKLPKYSLFELENGRKRMLASAGELQKGNELALPSKYVNFLYLASHYEKLKGSPEDNEQKQLFVEQHKHYLDEIIEQISEFSKRVILADANLDKVLSAYNKHRDKPIREQAENIIHLFTLTNLGAPAAFKYFDTTIDRKRYTSTKEVLDATLIHQSITGLYETRIDLSQLGGDGGGGSGGGGSSGGTLNIEDEYRLHETSKEPDVSLGSTWLSDFPQAWAETGGMGLAVRQAPLIIPLKATSTPVSIKQYPMSQEARLGIKPHIQRLLDQGILVPCQSPWNTPLLPVKKPGTNDYRPVQDLREVNKRVEDIHPTVPNPYNLLSGLPPSHQWYTVLDLKDAFFCLRLHPTSQPLFAFEWRDPEMGISGQLTWTRLPQGFKNSPTLFNEALHRDLAGFRIQHPDLILLQYVDDLLLAATSELDCQQGTRALLQTLGDLGYRASAKKAQICQKQVKYLGYLLKEGQRWLTEARKETVMGQPIPKTPRQLREFLGKAGFCRLFIPGFAEMAAPLYPLTKPGTLFNWGPDQQKAFQEIKQALLTAPALGLPDLTKPFELFVDEKQGYAKGVLTQKLGPWRRPVAYLSKKLDPVAAGWPPCLRMVAAIAVLTKDAGKLTMGQPLVILAPHAVEALVKQPPDRWLSNARMTHYQALLLDTDRVQFGPVVALNPATLLPLPEEGLQHDCLDILAEAHGTRSDLMDQPLPDADHTWYTDGSSFLQEGQRKAGAAVTTETEVIWARALPAGTSAQRAELIALTQALKMAEGKKLNVYTDSRYAFATAHIHGEIYRRRGWLTSEGKEIKNKDEILALLKALFLPKRLSIIHCPGHQKGNSAEARGNRMADQAAREVATRETPETSTLLAGKRTADGSEFEKRTADGSEFESPKKKAKVE

SEQ ID NO: 2372-2381 - skipped (10 entries)

SEQ ID NO: 2382 - protein, 2093 aa, synthetic construct
MPAAKRVKLDGGDKKYSIGLDIGTNSVGWAVITDEYKVPSKKFKVLGNTDRHSIKKNLIGALLFDSGETAEATRLKRTARRRYTRRKNRICYLQEIFSNEMAKVDDSFFHRLEESFLVEEDKKHERHPIFGNIVDEVAYHEKYPTIYHLRKKLVDSTDKADLRLIYLALAHMIKFRGHFLIEGDLNPDNSDVDKLFIQLVQTYNQLFEENPINASGVDAKAILSARLSKSRRLENLIAQLPGEKKNGLFGNLIALSLGLTPNFKSNFDLAEDAKLQLSKDTYDDDLDNLLAQIGDQYADLFLAAKNLSDAILLSDILRVNTEITKAPLSASMIKRYDEHHQDLTLLKALVRQQLPEKYKEIFFDQSKNGYAGYIDGGASQEEFYKFIKPILEKMDGTEELLVKLNREDLLRKQRTFDNGSIPHQIHLGELHAILRRQEDFYPFLKDNREKIEKILTFRIPYYVGPLARGNSRFAWMTRKSEETITPWNFEEVVDKGASAQSFIERMTNFDKNLPNEKVLPKHSLLYEYFTVYNELTKVKYVTEGMRKPAFLSGEQKKAIVDLLFKTNRKVTVKQLKEDYFKKIECFDSVEISGVEDRFNASLGTYHDLLKIIKDKDFLDNEENEDILEDIVLTLTLFEDREMIEERLKTYAHLFDDKVMKQLKRRRYTGWGRLSRKLINGIRDKQSGKTILDFLKSDGFANRNFMQLIHDDSLTFKEDIQKAQVSGQGDSLHEHIANLAGSPAIKKGILQTVKVVDELVKVMGRHKPENIVIEMARENQTTQKGQKNSRERMKRIEEGIKELGSQILKEHPVENTQLQNEKLYLYYLQNGRDMYVDQELDINRLSDYDVDHIVPQSFLKDDSIDNKVLTRSDKARGKSDNVPSEEVVKKMKNYWRQLLNAKLITQRKFDNLTKAERGGLSELDKAGFIKRQLVETRQITKHVAQILDSRMNTKYDENDKLIREVKVITLKSKLVSDFRKDFQFYKVREINNYHHAHDAYLNAVVGTALIKKYPKLESEFVYGDYKVYDVRKMIAKSEQEIGKATAKYFFYSNIMNFFKTEITLANGEIRKRPLIETNGETGEIVWDKGRDFATVRKVLSMPQVNIVKKTEVQTGGFSKESILPKRNSDKLIARKKDWDPKKYGGFDSPTVAYSVLVVAKVEKGKSKKLKSVKELLGITIMERSSFEKNPIDFLEAKGYKEVKKDLIIKLPKYSLFELENGRKRMLASAGELQKGNELALPSKYVNFLYLASHYEKLKGSPEDNEQKQLFVEQHKHYLDEIIEQISEFSKRVILADANLDKVLSAYNKHRDKPIREQAENIIHLFTLTNLGAPAAFKYFDTTIDRKRYTSTKEVLDATLIHQSITGLYETRIDLSQLGGDGGGSSEAAAKGGTLNIEDEYRLHETSKEPDVSLGSTWLSDFPQAWAETGGMGLAVRQAPLIIPLKATSTPVSIKQYPMSQEARLGIKPHIQRLLDQGILVPCQSPWNTPLLPVKKPGTNDYRPVQDLREVNKRVEDIHPTVPNPYNLLSGLPPSHQWYTVLDLKDAFFCLRLHPTSQPLFAFEWRDPEMGISGQLTWTRLPQGFKNSPTLFNEALHRDLAGFRIQHPDLILLQYVDDLLLAATSELDCQQGTRALLQTLGDLGYRASAKKAQICQKQVKYLGYLLKEGQRWLTEARKETVMGQPIPKTPRQLREFLGKAGFCRLFIPGFAEMAAPLYPLTKPGTLFNWGPDQQKAFQEIKQALLTAPALGLPDLTKPFELFVDEKQGYAKGVLTQKLGPWRRPVAYLSKKLDPVAAGWPPCLRMVAAIAVLTKDAGKLTMGQPLVILAPHAVEALVKQPPDRWLSNARMTHYQALLLDTDRVQFGPVVALNPATLLPLPEEGLQHDCLDILAEAHGTRSDLMDQPLPDADHTWYTDGSSFLQEGQRKAGAAVTTETEVIWARALPAGTSAQRAELIALTQALKMAEGKKLNVYTDSRYAFATAHIHGEIYRRRGWLTSEGKEIKNKDEILALLKALFLPKRLSIIHCPGHQKGNSAEARGNRMADQAAREVATRETPETSTLLAGKRTADGSEFEKRTADGSEFESPKKKAKVE

SEQ ID NO: 2383-2394 - skipped (12 entries)

SEQ ID NO: 2395 - protein, 2091 aa, synthetic construct
MPAAKRVKLDGGDKKYSIGLDIGTNSVGWAVITDEYKVPSKKFKVLGNTDRHSIKKNLIGALLFDSGETAEATRLKRTARRRYTRRKNRICYLQEIFSNEMAKVDDSFFHRLEESFLVEEDKKHERHPIFGNIVDEVAYHEKYPTIYHLRKKLVDSTDKADLRLIYLALAHMIKFRGHFLIEGDLNPDNSDVDKLFIQLVQTYNQLFEENPINASGVDAKAILSARLSKSRRLENLIAQLPGEKKNGLFGNLIALSLGLTPNFKSNFDLAEDAKLQLSKDTYDDDLDNLLAQIGDQYADLFLAAKNLSDAILLSDILRVNTEITKAPLSASMIKRYDEHHQDLTLLKALVRQQLPEKYKEIFFDQSKNGYAGYIDGGASQEEFYKFIKPILEKMDGTEELLVKLNREDLLRKQRTFDNGSIPHQIHLGELHAILRRQEDFYPFLKDNREKIEKILTFRIPYYVGPLARGNSRFAWMTRKSEETITPWNFEEVVDKGASAQSFIERMTNFDKNLPNEKVLPKHSLLYEYFTVYNELTKVKYVTEGMRKPAFLSGEQKKAIVDLLFKTNRKVTVKQLKEDYFKKIECFDSVEISGVEDRFNASLGTYHDLLKIIKDKDFLDNEENEDILEDIVLTLTLFEDREMIEERLKTYAHLFDDKVMKQLKRRRYTGWGRLSRKLINGIRDKQSGKTILDFLKSDGFANRNFMQLIHDDSLTFKEDIQKAQVSGQGDSLHEHIANLAGSPAIKKGILQTVKVVDELVKVMGRHKPENIVIEMARENQTTQKGQKNSRERMKRIEEGIKELGSQILKEHPVENTQLQNEKLYLYYLQNGRDMYVDQELDINRLSDYDVDHIVPQSFLKDDSIDNKVLTRSDKARGKSDNVPSEEVVKKMKNYWRQLLNAKLITQRKFDNLTKAERGGLSELDKAGFIKRQLVETRQITKHVAQILDSRMNTKYDENDKLIREVKVITLKSKLVSDFRKDFQFYKVREINNYHHAHDAYLNAVVGTALIKKYPKLESEFVYGDYKVYDVRKMIAKSEQEIGKATAKYFFYSNIMNFFKTEITLANGEIRKRPLIETNGETGEIVWDKGRDFATVRKVLSMPQVNIVKKTEVQTGGFSKESILPKRNSDKLIARKKDWDPKKYGGFDSPTVAYSVLVVAKVEKGKSKKLKSVKELLGITIMERSSFEKNPIDFLEAKGYKEVKKDLIIKLPKYSLFELENGRKRMLASAGELQKGNELALPSKYVNFLYLASHYEKLKGSPEDNEQKQLFVEQHKHYLDEIIEQISEFSKRVILADANLDKVLSAYNKHRDKPIREQAENIIHLFTLTNLGAPAAFKYFDTTIDRKRYTSTKEVLDATLIHQSITGLYETRIDLSQLGGDGGPAPGGGGGTLNIEDEYRLHETSKEPDVSLGSTWLSDFPQAWAETGGMGLAVRQAPLIIPLKATSTPVSIKQYPMSQEARLGIKPHIQRLLDQGILVPCQSPWNTPLLPVKKPGTNDYRPVQDLREVNKRVEDIHPTVPNPYNLLSGLPPSHQWYTVLDLKDAFFCLRLHPTSQPLFAFEWRDPEMGISGQLTWTRLPQGFKNSPTLFNEALHRDLAGFRIQHPDLILLQYVDDLLLAATSELDCQQGTRALLQTLGDLGYRASAKKAQICQKQVKYLGYLLKEGQRWLTEARKETVMGQPIPKTPRQLREFLGKAGFCRLFIPGFAEMAAPLYPLTKPGTLFNWGPDQQKAFQEIKQALLTAPALGLPDLTKPFELFVDEKQGYAKGVLTQKLGPWRRPVAYLSKKLDPVAAGWPPCLRMVAAIAVLTKDAGKLTMGQPLVILAPHAVEALVKQPPDRWLSNARMTHYQALLLDTDRVQFGPVVALNPATLLPLPEEGLQHDCLDILAEAHGTRSDLMDQPLPDADHTWYTDGSSFLQEGQRKAGAAVTTETEVIWARALPAGTSAQRAELIALTQALKMAEGKKLNVYTDSRYAFATAHIHGEIYRRRGWLTSEGKEIKNKDEILALLKALFLPKRLSIIHCPGHQKGNSAEARGNRMADQAAREVATRETPETSTLLAGKRTADGSEFEKRTADGSEFESPKKKAKVE

SEQ ID NO: 2396-2399 - skipped (4 entries)

SEQ ID NO: 2400 - protein, 2096 aa, synthetic construct
MPAAKRVKLDGGDKKYSIGLDIGTNSVGWAVITDEYKVPSKKFKVLGNTDRHSIKKNLIGALLFDSGETAEATRLKRTARRRYTRRKNRICYLQEIFSNEMAKVDDSFFHRLEESFLVEEDKKHERHPIFGNIVDEVAYHEKYPTIYHLRKKLVDSTDKADLRLIYLALAHMIKFRGHFLIEGDLNPDNSDVDKLFIQLVQTYNQLFEENPINASGVDAKAILSARLSKSRRLENLIAQLPGEKKNGLFGNLIALSLGLTPNFKSNFDLAEDAKLQLSKDTYDDDLDNLLAQIGDQYADLFLAAKNLSDAILLSDILRVNTEITKAPLSASMIKRYDEHHQDLTLLKALVRQQLPEKYKEIFFDQSKNGYAGYIDGGASQEEFYKFIKPILEKMDGTEELLVKLNREDLLRKQRTFDNGSIPHQIHLGELHAILRRQEDFYPFLKDNREKIEKILTFRIPYYVGPLARGNSRFAWMTRKSEETITPWNFEEVVDKGASAQSFIERMTNFDKNLPNEKVLPKHSLLYEYFTVYNELTKVKYVTEGMRKPAFLSGEQKKAIVDLLFKTNRKVTVKQLKEDYFKKIECFDSVEISGVEDRFNASLGTYHDLLKIIKDKDFLDNEENEDILEDIVLTLTLFEDREMIEERLKTYAHLFDDKVMKQLKRRRYTGWGRLSRKLINGIRDKQSGKTILDFLKSDGFANRNFMQLIHDDSLTFKEDIQKAQVSGQGDSLHEHIANLAGSPAIKKGILQTVKVVDELVKVMGRHKPENIVIEMARENQTTQKGQKNSRERMKRIEEGIKELGSQILKEHPVENTQLQNEKLYLYYLQNGRDMYVDQELDINRLSDYDVDHIVPQSFLKDDSIDNKVLTRSDKARGKSDNVPSEEVVKKMKNYWRQLLNAKLITQRKFDNLTKAERGGLSELDKAGFIKRQLVETRQITKHVAQILDSRMNTKYDENDKLIREVKVITLKSKLVSDFRKDFQFYKVREINNYHHAHDAYLNAVVGTALIKKYPKLESEFVYGDYKVYDVRKMIAKSEQEIGKATAKYFFYSNIMNFFKTEITLANGEIRKRPLIETNGETGEIVWDKGRDFATVRKVLSMPQVNIVKKTEVQTGGFSKESILPKRNSDKLIARKKDWDPKKYGGFDSPTVAYSVLVVAKVEKGKSKKLKSVKELLGITIMERSSFEKNPIDFLEAKGYKEVKKDLIIKLPKYSLFELENGRKRMLASAGELQKGNELALPSKYVNFLYLASHYEKLKGSPEDNEQKQLFVEQHKHYLDEIIEQISEFSKRVILADANLDKVLSAYNKHRDKPIREQAENIIHLFTLTNLGAPAAFKYFDTTIDRKRYTSTKEVLDATLIHQSITGLYETRIDLSQLGGDGGPAPEAAAKGGGGGTLNIEDEYRLHETSKEPDVSLGSTWLSDFPQAWAETGGMGLAVRQAPLIIPLKATSTPVSIKQYPMSQEARLGIKPHIQRLLDQGILVPCQSPWNTPLLPVKKPGTNDYRPVQDLREVNKRVEDIHPTVPNPYNLLSGLPPSHQWYTVLDLKDAFFCLRLHPTSQPLFAFEWRDPEMGISGQLTWTRLPQGFKNSPTLFNEALHRDLAGFRIQHPDLILLQYVDDLLLAATSELDCQQGTRALLQTLGDLGYRASAKKAQICQKQVKYLGYLLKEGQRWLTEARKETVMGQPIPKTPRQLREFLGKAGFCRLFIPGFAEMAAPLYPLTKPGTLFNWGPDQQKAFQEIKQALLTAPALGLPDLTKPFELFVDEKQGYAKGVLTQKLGPWRRPVAYLSKKLDPVAAGWPPCLRMVAAIAVLTKDAGKLTMGQPLVILAPHAVEALVKQPPDRWLSNARMTHYQALLLDTDRVQFGPVVALNPATLLPLPEEGLQHDCLDILAEAHGTRSDLMDQPLPDADHTWYTDGSSFLQEGQRKAGAAVTTETEVIWARALPAGTSAQRAELIALTQALKMAEGKKLNVYTDSRYAFATAHIHGEIYRRRGWLTSEGKEIKNKDEILALLKALFLPKRLSIIHCPGHQKGNSAEARGNRMADQAAREVATRETPETSTLLAGKRTADGSEFEKRTADGSEFESPKKKAKVE

SEQ ID NO: 2401-2402 - skipped (2 entries)

SEQ ID NO: 2403 - protein, 2094 aa, synthetic construct
MPAAKRVKLDGGDKKYSIGLDIGTNSVGWAVITDEYKVPSKKFKVLGNTDRHSIKKNLIGALLFDSGETAEATRLKRTARRRYTRRKNRICYLQEIFSNEMAKVDDSFFHRLEESFLVEEDKKHERHPIFGNIVDEVAYHEKYPTIYHLRKKLVDSTDKADLRLIYLALAHMIKFRGHFLIEGDLNPDNSDVDKLFIQLVQTYNQLFEENPINASGVDAKAILSARLSKSRRLENLIAQLPGEKKNGLFGNLIALSLGLTPNFKSNFDLAEDAKLQLSKDTYDDDLDNLLAQIGDQYADLFLAAKNLSDAILLSDILRVNTEITKAPLSASMIKRYDEHHQDLTLLKALVRQQLPEKYKEIFFDQSKNGYAGYIDGGASQEEFYKFIKPILEKMDGTEELLVKLNREDLLRKQRTFDNGSIPHQIHLGELHAILRRQEDFYPFLKDNREKIEKILTFRIPYYVGPLARGNSRFAWMTRKSEETITPWNFEEVVDKGASAQSFIERMTNFDKNLPNEKVLPKHSLLYEYFTVYNELTKVKYVTEGMRKPAFLSGEQKKAIVDLLFKTNRKVTVKQLKEDYFKKIECFDSVEISGVEDRFNASLGTYHDLLKIIKDKDFLDNEENEDILEDIVLTLTLFEDREMIEERLKTYAHLFDDKVMKQLKRRRYTGWGRLSRKLINGIRDKQSGKTILDFLKSDGFANRNFMQLIHDDSLTFKEDIQKAQVSGQGDSLHEHIANLAGSPAIKKGILQTVKVVDELVKVMGRHKPENIVIEMARENQTTQKGQKNSRERMKRIEEGIKELGSQILKEHPVENTQLQNEKLYLYYLQNGRDMYVDQELDINRLSDYDVDHIVPQSFLKDDSIDNKVLTRSDKARGKSDNVPSEEVVKKMKNYWRQLLNAKLITQRKFDNLTKAERGGLSELDKAGFIKRQLVETRQITKHVAQILDSRMNTKYDENDKLIREVKVITLKSKLVSDFRKDFQFYKVREINNYHHAHDAYLNAVVGTALIKKYPKLESEFVYGDYKVYDVRKMIAKSEQEIGKATAKYFFYSNIMNFFKTEITLANGEIRKRPLIETNGETGEIVWDKGRDFATVRKVLSMPQVNIVKKTEVQTGGFSKESILPKRNSDKLIARKKDWDPKKYGGFDSPTVAYSVLVVAKVEKGKSKKLKSVKELLGITIMERSSFEKNPIDFLEAKGYKEVKKDLIIKLPKYSLFELENGRKRMLASAGELQKGNELALPSKYVNFLYLASHYEKLKGSPEDNEQKQLFVEQHKHYLDEIIEQISEFSKRVILADANLDKVLSAYNKHRDKPIREQAENIIHLFTLTNLGAPAAFKYFDTTIDRKRYTSTKEVLDATLIHQSITGLYETRIDLSQLGGDGGPAPGGSGGGGGTLNIEDEYRLHETSKEPDVSLGSTWLSDFPQAWAETGGMGLAVRQAPLIIPLKATSTPVSIKQYPMSQEARLGIKPHIQRLLDQGILVPCQSPWNTPLLPVKKPGTNDYRPVQDLREVNKRVEDIHPTVPNPYNLLSGLPPSHQWYTVLDLKDAFFCLRLHPTSQPLFAFEWRDPEMGISGQLTWTRLPQGFKNSPTLFNEALHRDLAGFRIQHPDLILLQYVDDLLLAATSELDCQQGTRALLQTLGDLGYRASAKKAQICQKQVKYLGYLLKEGQRWLTEARKETVMGQPIPKTPRQLREFLGKAGFCRLFIPGFAEMAAPLYPLTKPGTLFNWGPDQQKAFQEIKQALLTAPALGLPDLTKPFELFVDEKQGYAKGVLTQKLGPWRRPVAYLSKKLDPVAAGWPPCLRMVAAIAVLTKDAGKLTMGQPLVILAPHAVEALVKQPPDRWLSNARMTHYQALLLDTDRVQFGPVVALNPATLLPLPEEGLQHDCLDILAEAHGTRSDLMDQPLPDADHTWYTDGSSFLQEGQRKAGAAVTTETEVIWARALPAGTSAQRAELIALTQALKMAEGKKLNVYTDSRYAFATAHIHGEIYRRRGWLTSEGKEIKNKDEILALLKALFLPKRLSIIHCPGHQKGNSAEARGNRMADQAAREVATRETPETSTLLAGKRTADGSEFEKRTADGSEFESPKKKAKVE

SEQ ID NO: 2404 - skipped

SEQ ID NO: 2405 - protein, 2100 aa, synthetic construct
MPAAKRVKLDGGDKKYSIGLDIGTNSVGWAVITDEYKVPSKKFKVLGNTDRHSIKKNLIGALLFDSGETAEATRLKRTARRRYTRRKNRICYLQEIFSNEMAKVDDSFFHRLEESFLVEEDKKHERHPIFGNIVDEVAYHEKYPTIYHLRKKLVDSTDKADLRLIYLALAHMIKFRGHFLIEGDLNPDNSDVDKLFIQLVQTYNQLFEENPINASGVDAKAILSARLSKSRRLENLIAQLPGEKKNGLFGNLIALSLGLTPNFKSNFDLAEDAKLQLSKDTYDDDLDNLLAQIGDQYADLFLAAKNLSDAILLSDILRVNTEITKAPLSASMIKRYDEHHQDLTLLKALVRQQLPEKYKEIFFDQSKNGYAGYIDGGASQEEFYKFIKPILEKMDGTEELLVKLNREDLLRKQRTFDNGSIPHQIHLGELHAILRRQEDFYPFLKDNREKIEKILTFRIPYYVGPLARGNSRFAWMTRKSEETITPWNFEEVVDKGASAQSFIERMTNFDKNLPNEKVLPKHSLLYEYFTVYNELTKVKYVTEGMRKPAFLSGEQKKAIVDLLFKTNRKVTVKQLKEDYFKKIECFDSVEISGVEDRFNASLGTYHDLLKIIKDKDFLDNEENEDILEDIVLTLTLFEDREMIEERLKTYAHLFDDKVMKQLKRRRYTGWGRLSRKLINGIRDKQSGKTILDFLKSDGFANRNFMQLIHDDSLTFKEDIQKAQVSGQGDSLHEHIANLAGSPAIKKGILQTVKVVDELVKVMGRHKPENIVIEMARENQTTQKGQKNSRERMKRIEEGIKELGSQILKEHPVENTQLQNEKLYLYYLQNGRDMYVDQELDINRLSDYDVDHIVPQSFLKDDSIDNKVLTRSDKARGKSDNVPSEEVVKKMKNYWRQLLNAKLITQRKFDNLTKAERGGLSELDKAGFIKRQLVETRQITKHVAQILDSRMNTKYDENDKLIREVKVITLKSKLVSDFRKDFQFYKVREINNYHHAHDAYLNAVVGTALIKKYPKLESEFVYGDYKVYDVRKMIAKSEQEIGKATAKYFFYSNIMNFFKTEITLANGEIRKRPLIETNGETGEIVWDKGRDFATVRKVLSMPQVNIVKKTEVQTGGFSKESILPKRNSDKLIARKKDWDPKKYGGFDSPTVAYSVLVVAKVEKGKSKKLKSVKELLGITIMERSSFEKNPIDFLEAKGYKEVKKDLIIKLPKYSLFELENGRKRMLASAGELQKGNELALPSKYVNFLYLASHYEKLKGSPEDNEQKQLFVEQHKHYLDEIIEQISEFSKRVILADANLDKVLSAYNKHRDKPIREQAENIIHLFTLTNLGAPAAFKYFDTTIDRKRYTSTKEVLDATLIHQSITGLYETRIDLSQLGGDGGGSSGSSGSSGSSGSSGGTLNIEDEYRLHETSKEPDVSLGSTWLSDFPQAWAETGGMGLAVRQAPLIIPLKATSTPVSIKQYPMSQEARLGIKPHIQRLLDQGILVPCQSPWNTPLLPVKKPGTNDYRPVQDLREVNKRVEDIHPTVPNPYNLLSGLPPSHQWYTVLDLKDAFFCLRLHPTSQPLFAFEWRDPEMGISGQLTWTRLPQGFKNSPTLFNEALHRDLAGFRIQHPDLILLQYVDDLLLAATSELDCQQGTRALLQTLGDLGYRASAKKAQICQKQVKYLGYLLKEGQRWLTEARKETVMGQPIPKTPRQLREFLGKAGFCRLFIPGFAEMAAPLYPLTKPGTLFNWGPDQQKAFQEIKQALLTAPALGLPDLTKPFELFVDEKQGYAKGVLTQKLGPWRRPVAYLSKKLDPVAAGWPPCLRMVAAIAVLTKDAGKLTMGQPLVILAPHAVEALVKQPPDRWLSNARMTHYQALLLDTDRVQFGPVVALNPATLLPLPEEGLQHDCLDILAEAHGTRSDLMDQPLPDADHTWYTDGSSFLQEGQRKAGAAVTTETEVIWARALPAGTSAQRAELIALTQALKMAEGKKLNVYTDSRYAFATAHIHGEIYRRRGWLTSEGKEIKNKDEILALLKALFLPKRLSIIHCPGHQKGNSAEARGNRMADQAAREVATRETPETSTLLAGKRTADGSEFEKRTADGSEFESPKKKAKVE

SEQ ID NO: 2406-2448 - skipped (43 entries)

SEQ ID NO: 2449 - protein, 2098 aa, synthetic construct
MPAAKRVKLDGGDKKYSIGLDIGTNSVGWAVITDEYKVPSKKFKVLGNTDRHSIKKNLIGALLFDSGETAEATRLKRTARRRYTRRKNRICYLQEIFSNEMAKVDDSFFHRLEESFLVEEDKKHERHPIFGNIVDEVAYHEKYPTIYHLRKKLVDSTDKADLRLIYLALAHMIKFRGHFLIEGDLNPDNSDVDKLFIQLVQTYNQLFEENPINASGVDAKAILSARLSKSRRLENLIAQLPGEKKNGLFGNLIALSLGLTPNFKSNFDLAEDAKLQLSKDTYDDDLDNLLAQIGDQYADLFLAAKNLSDAILLSDILRVNTEITKAPLSASMIKRYDEHHQDLTLLKALVRQQLPEKYKEIFFDQSKNGYAGYIDGGASQEEFYKFIKPILEKMDGTEELLVKLNREDLLRKQRTFDNGSIPHQIHLGELHAILRRQEDFYPFLKDNREKIEKILTFRIPYYVGPLARGNSRFAWMTRKSEETITPWNFEEVVDKGASAQSFIERMTNFDKNLPNEKVLPKHSLLYEYFTVYNELTKVKYVTEGMRKPAFLSGEQKKAIVDLLFKTNRKVTVKQLKEDYFKKIECFDSVEISGVEDRFNASLGTYHDLLKIIKDKDFLDNEENEDILEDIVLTLTLFEDREMIEERLKTYAHLFDDKVMKQLKRRRYTGWGRLSRKLINGIRDKQSGKTILDFLKSDGFANRNFMQLIHDDSLTFKEDIQKAQVSGQGDSLHEHIANLAGSPAIKKGILQTVKVVDELVKVMGRHKPENIVIEMARENQTTQKGQKNSRERMKRIEEGIKELGSQILKEHPVENTQLQNEKLYLYYLQNGRDMYVDQELDINRLSDYDVDHIVPQSFLKDDSIDNKVLTRSDKARGKSDNVPSEEVVKKMKNYWRQLLNAKLITQRKFDNLTKAERGGLSELDKAGFIKRQLVETRQITKHVAQILDSRMNTKYDENDKLIREVKVITLKSKLVSDFRKDFQFYKVREINNYHHAHDAYLNAVVGTALIKKYPKLESEFVYGDYKVYDVRKMIAKSEQEIGKATAKYFFYSNIMNFFKTEITLANGEIRKRPLIETNGETGEIVWDKGRDFATVRKVLSMPQVNIVKKTEVQTGGFSKESILPKRNSDKLIARKKDWDPKKYGGFDSPTVAYSVLVVAKVEKGKSKKLKSVKELLGITIMERSSFEKNPIDFLEAKGYKEVKKDLIIKLPKYSLFELENGRKRMLASAGELQKGNELALPSKYVNFLYLASHYEKLKGSPEDNEQKQLFVEQHKHYLDEIIEQISEFSKRVILADANLDKVLSAYNKHRDKPIREQAENIIHLFTLTNLGAPAAFKYFDTTIDRKRYTSTKEVLDATLIHQSITGLYETRIDLSQLGGDGGPAPAPAPAPAPAPGGTLNIEDEYRLHETSKGPDVPLGSTWLSDFPQAWAETGGMGLAVRQAPLIIPLKATSTPVSIKQYPMSQEARLGIKPHIQRLLDQGILVPCQSPWNTPLLPVKKPGTNDYRPVQDLREVNKRVEDIHPTVPNPYNLLSGLPPSHQWYTVLDLKDAFFCLRLHPTSQSLFAFEWRDPEMGISGQLTWTRLPQGFKNSPTLFNEALHRDLADFRIQHPDLILLQYVDDLLLAATSELDCQQGTRALLQTLGDLGYRASAKKAQICQKQVKYLGYLLKEGQRWLTEARKETVMGQPTPKTPRQLREFLGTAGFCRLWIPGFAEMAAPLYPLTKPGTLFEWGPDQQKAYQEIKQALLTAPALGLPDLTKPFELFVDEKQGYAKGVLTQKLGPWRRPVAYLSKKLDPVAAGWPPCLRMVAAIAVLTKDAGKLTMGQPLVILAPHAVEALVKQPPDRWLSNARMTHYQALLLDTDRVQFGPIVALNPATLLPLPEEGLQHDCLDILAEAHGTRPDLTDQPLPDADHTWYTDGSSFLQEGQRKAGAAVTTETEVVWAKALPAGTSAQRAELIALTQALKMAEGKKLNVYTDSRYAFATAHIHGEIYRRRGWLTSEGKEIKNKDEILALLKALFLPKRLSIIHCPGHQKGNRAEARGNRMADQAAREVATRETPETSTLLAGKRTADGSEFEKRTADGSEFESPKKKAKVE

SEQ ID NO: 2450-2502 - skipped (53 entries)

SEQ ID NO: 2503 - protein, 2093 aa, synthetic construct
MPAAKRVKLDGGDKKYSIGLDIGTNSVGWAVITDEYKVPSKKFKVLGNTDRHSIKKNLIGALLFDSGETAEATRLKRTARRRYTRRKNRICYLQEIFSNEMAKVDDSFFHRLEESFLVEEDKKHERHPIFGNIVDEVAYHEKYPTIYHLRKKLVDSTDKADLRLIYLALAHMIKFRGHFLIEGDLNPDNSDVDKLFIQLVQTYNQLFEENPINASGVDAKAILSARLSKSRRLENLIAQLPGEKKNGLFGNLIALSLGLTPNFKSNFDLAEDAKLQLSKDTYDDDLDNLLAQIGDQYADLFLAAKNLSDAILLSDILRVNTEITKAPLSASMIKRYDEHHQDLTLLKALVRQQLPEKYKEIFFDQSKNGYAGYIDGGASQEEFYKFIKPILEKMDGTEELLVKLNREDLLRKQRTFDNGSIPHQIHLGELHAILRRQEDFYPFLKDNREKIEKILTFRIPYYVGPLARGNSRFAWMTRKSEETITPWNFEEVVDKGASAQSFIERMTNFDKNLPNEKVLPKHSLLYEYFTVYNELTKVKYVTEGMRKPAFLSGEQKKAIVDLLFKTNRKVTVKQLKEDYFKKIECFDSVEISGVEDRFNASLGTYHDLLKIIKDKDFLDNEENEDILEDIVLTLTLFEDREMIEERLKTYAHLFDDKVMKQLKRRRYTGWGRLSRKLINGIRDKQSGKTILDFLKSDGFANRNFMQLIHDDSLTFKEDIQKAQVSGQGDSLHEHIANLAGSPAIKKGILQTVKVVDELVKVMGRHKPENIVIEMARENQTTQKGQKNSRERMKRIEEGIKELGSQILKEHPVENTQLQNEKLYLYYLQNGRDMYVDQELDINRLSDYDVDHIVPQSFLKDDSIDNKVLTRSDKARGKSDNVPSEEVVKKMKNYWRQLLNAKLITQRKFDNLTKAERGGLSELDKAGFIKRQLVETRQITKHVAQILDSRMNTKYDENDKLIREVKVITLKSKLVSDFRKDFQFYKVREINNYHHAHDAYLNAVVGTALIKKYPKLESEFVYGDYKVYDVRKMIAKSEQEIGKATAKYFFYSNIMNFFKTEITLANGEIRKRPLIETNGETGEIVWDKGRDFATVRKVLSMPQVNIVKKTEVQTGGFSKESILPKRNSDKLIARKKDWDPKKYGGFDSPTVAYSVLVVAKVEKGKSKKLKSVKELLGITIMERSSFEKNPIDFLEAKGYKEVKKDLIIKLPKYSLFELENGRKRMLASAGELQKGNELALPSKYVNFLYLASHYEKLKGSPEDNEQKQLFVEQHKHYLDEIIEQISEFSKRVILADANLDKVLSAYNKHRDKPIREQAENIIHLFTLTNLGAPAAFKYFDTTIDRKRYTSTKEVLDATLIHQSITGLYETRIDLSQLGGDGGGSSEAAAKGGTLNIEDEYRLHETSKGPDVPLGSTWLSDFPQAWAETGGMGLAVRQAPLIIPLKATSTPVSIKQYPMSQEARLGIKPHIQRLLDQGILVPCQSPWNTPLLPVKKPGTNDYRPVQDLREVNKRVEDIHPTVPNPYNLLSGLPPSHQWYTVLDLKDAFFCLRLHPTSQSLFAFEWRDPEMGISGQLTWTRLPQGFKNSPTLFNEALHRDLADFRIQHPDLILLQYVDDLLLAATSELDCQQGTRALLQTLGDLGYRASAKKAQICQKQVKYLGYLLKEGQRWLTEARKETVMGQPTPKTPRQLREFLGKAGFCRLFIPGFAEMAAPLYPLTKPGTLFEWGPDQQKAYQEIKQALLTAPALGLPDLTKPFELFVDEKQGYAKGVLTQKLGPWRRPVAYLSKKLDPVAAGWPPCLRMVAAIAVLTKDAGKLTMGQPLVILAPHAVEALVKQPPDRWLSNARMTHYQALLLDTDRVQFGPIVALNPATLLPLPEEGLQHDCLDILAEAHGTRPDLTDQPLPDADHTWYTDGSSFLQEGQRKAGAAVTTETEVVWAKALPAGTSAQRAELIALTQALKMAEGKKLNVYTDSRYAFATAHIHGEIYRRRGWLTSEGKEIKNKDEILALLKALFLPKRLSIIHCPGHQKGNRAEARGNRMADQAAREVATRETPETSTLLAGKRTADGSEFEKRTADGSEFESPKKKAKVE

SEQ ID NO: 2504 - protein, 2090 aa, synthetic construct
MPAAKRVKLDGGDKKYSIGLDIGTNSVGWAVITDEYKVPSKKFKVLGNTDRHSIKKNLIGALLFDSGETAEATRLKRTARRRYTRRKNRICYLQEIFSNEMAKVDDSFFHRLEESFLVEEDKKHERHPIFGNIVDEVAYHEKYPTIYHLRKKLVDSTDKADLRLIYLALAHMIKFRGHFLIEGDLNPDNSDVDKLFIQLVQTYNQLFEENPINASGVDAKAILSARLSKSRRLENLIAQLPGEKKNGLFGNLIALSLGLTPNFKSNFDLAEDAKLQLSKDTYDDDLDNLLAQIGDQYADLFLAAKNLSDAILLSDILRVNTEITKAPLSASMIKRYDEHHQDLTLLKALVRQQLPEKYKEIFFDQSKNGYAGYIDGGASQEEFYKFIKPILEKMDGTEELLVKLNREDLLRKQRTFDNGSIPHQIHLGELHAILRRQEDFYPFLKDNREKIEKILTFRIPYYVGPLARGNSRFAWMTRKSEETITPWNFEEVVDKGASAQSFIERMTNFDKNLPNEKVLPKHSLLYEYFTVYNELTKVKYVTEGMRKPAFLSGEQKKAIVDLLFKTNRKVTVKQLKEDYFKKIECFDSVEISGVEDRFNASLGTYHDLLKIIKDKDFLDNEENEDILEDIVLTLTLFEDREMIEERLKTYAHLFDDKVMKQLKRRRYTGWGRLSRKLINGIRDKQSGKTILDFLKSDGFANRNFMQLIHDDSLTFKEDIQKAQVSGQGDSLHEHIANLAGSPAIKKGILQTVKVVDELVKVMGRHKPENIVIEMARENQTTQKGQKNSRERMKRIEEGIKELGSQILKEHPVENTQLQNEKLYLYYLQNGRDMYVDQELDINRLSDYDVDHIVPQSFLKDDSIDNKVLTRSDKARGKSDNVPSEEVVKKMKNYWRQLLNAKLITQRKFDNLTKAERGGLSELDKAGFIKRQLVETRQITKHVAQILDSRMNTKYDENDKLIREVKVITLKSKLVSDFRKDFQFYKVREINNYHHAHDAYLNAVVGTALIKKYPKLESEFVYGDYKVYDVRKMIAKSEQEIGKATAKYFFYSNIMNFFKTEITLANGEIRKRPLIETNGETGEIVWDKGRDFATVRKVLSMPQVNIVKKTEVQTGGFSKESILPKRNSDKLIARKKDWDPKKYGGFDSPTVAYSVLVVAKVEKGKSKKLKSVKELLGITIMERSSFEKNPIDFLEAKGYKEVKKDLIIKLPKYSLFELENGRKRMLASAGELQKGNELALPSKYVNFLYLASHYEKLKGSPEDNEQKQLFVEQHKHYLDEIIEQISEFSKRVILADANLDKVLSAYNKHRDKPIREQAENIIHLFTLTNLGAPAAFKYFDTTIDRKRYTSTKEVLDATLIHQSITGLYETRIDLSQLGGDGGGGGGSGGTLNIEDEYRLHETSKGPDVPLGSTWLSDFPQAWAETGGMGLAVRQAPLIIPLKATSTPVSIKQYPMSQEARLGIKPHIQRLLDQGILVPCQSPWNTPLLPVKKPGTNDYRPVQDLREVNKRVEDIHPTVPNPYNLLSGLPPSHQWYTVLDLKDAFFCLRLHPTSQSLFAFEWRDPEMGISGQLTWTRLPQGFKNSPTLFNEALHRDLADFRIQHPDLILLQYVDDLLLAATSELDCQQGTRALLQTLGDLGYRASAKKAQICQKQVKYLGYLLKEGQRWLTEARKETVMGQPTPKTPRQLREFLGKAGFCRLFIPGFAEMAAPLYPLTKPGTLFEWGPDQQKAYQEIKQALLTAPALGLPDLTKPFELFVDEKQGYAKGVLTQKLGPWRRPVAYLSKKLDPVAAGWPPCLRMVAAIAVLTKDAGKLTMGQPLVILAPHAVEALVKQPPDRWLSNARMTHYQALLLDTDRVQFGPIVALNPATLLPLPEEGLQHDCLDILAEAHGTRPDLTDQPLPDADHTWYTDGSSFLQEGQRKAGAAVTTETEVVWAKALPAGTSAQRAELIALTQALKMAEGKKLNVYTDSRYAFATAHIHGEIYRRRGWLTSEGKEIKNKDEILALLKALFLPKRLSIIHCPGHQKGNRAEARGNRMADQAAREVATRETPETSTLLAGKRTADGSEFEKRTADGSEFESPKKKAKVE

SEQ ID NO: 2505 - protein, 2093 aa, synthetic construct
MPAAKRVKLDGGDKKYSIGLDIGTNSVGWAVITDEYKVPSKKFKVLGNTDRHSIKKNLIGALLFDSGETAEATRLKRTARRRYTRRKNRICYLQEIFSNEMAKVDDSFFHRLEESFLVEEDKKHERHPIFGNIVDEVAYHEKYPTIYHLRKKLVDSTDKADLRLIYLALAHMIKFRGHFLIEGDLNPDNSDVDKLFIQLVQTYNQLFEENPINASGVDAKAILSARLSKSRRLENLIAQLPGEKKNGLFGNLIALSLGLTPNFKSNFDLAEDAKLQLSKDTYDDDLDNLLAQIGDQYADLFLAAKNLSDAILLSDILRVNTEITKAPLSASMIKRYDEHHQDLTLLKALVRQQLPEKYKEIFFDQSKNGYAGYIDGGASQEEFYKFIKPILEKMDGTEELLVKLNREDLLRKQRTFDNGSIPHQIHLGELHAILRRQEDFYPFLKDNREKIEKILTFRIPYYVGPLARGNSRFAWMTRKSEETITPWNFEEVVDKGASAQSFIERMTNFDKNLPNEKVLPKHSLLYEYFTVYNELTKVKYVTEGMRKPAFLSGEQKKAIVDLLFKTNRKVTVKQLKEDYFKKIECFDSVEISGVEDRFNASLGTYHDLLKIIKDKDFLDNEENEDILEDIVLTLTLFEDREMIEERLKTYAHLFDDKVMKQLKRRRYTGWGRLSRKLINGIRDKQSGKTILDFLKSDGFANRNFMQLIHDDSLTFKEDIQKAQVSGQGDSLHEHIANLAGSPAIKKGILQTVKVVDELVKVMGRHKPENIVIEMARENQTTQKGQKNSRERMKRIEEGIKELGSQILKEHPVENTQLQNEKLYLYYLQNGRDMYVDQELDINRLSDYDVDHIVPQSFLKDDSIDNKVLTRSDKARGKSDNVPSEEVVKKMKNYWRQLLNAKLITQRKFDNLTKAERGGLSELDKAGFIKRQLVETRQITKHVAQILDSRMNTKYDENDKLIREVKVITLKSKLVSDFRKDFQFYKVREINNYHHAHDAYLNAVVGTALIKKYPKLESEFVYGDYKVYDVRKMIAKSEQEIGKATAKYFFYSNIMNFFKTEITLANGEIRKRPLIETNGETGEIVWDKGRDFATVRKVLSMPQVNIVKKTEVQTGGFSKESILPKRNSDKLIARKKDWDPKKYGGFDSPTVAYSVLVVAKVEKGKSKKLKSVKELLGITIMERSSFEKNPIDFLEAKGYKEVKKDLIIKLPKYSLFELENGRKRMLASAGELQKGNELALPSKYVNFLYLASHYEKLKGSPEDNEQKQLFVEQHKHYLDEIIEQISEFSKRVILADANLDKVLSAYNKHRDKPIREQAENIIHLFTLTNLGAPAAFKYFDTTIDRKRYTSTKEVLDATLIHQSITGLYETRIDLSQLGGDGGPAPEAAAKGGTLNIEDEYRLHETSKGPDVPLGSTWLSDFPQAWAETGGMGLAVRQAPLIIPLKATSTPVSIKQYPMSQEARLGIKPHIQRLLDQGILVPCQSPWNTPLLPVKKPGTNDYRPVQDLREVNKRVEDIHPTVPNPYNLLSGLPPSHQWYTVLDLKDAFFCLRLHPTSQSLFAFEWRDPEMGISGQLTWTRLPQGFKNSPTLFNEALHRDLADFRIQHPDLILLQYVDDLLLAATSELDCQQGTRALLQTLGDLGYRASAKKAQICQKQVKYLGYLLKEGQRWLTEARKETVMGQPTPKTPRQLREFLGKAGFCRLFIPGFAEMAAPLYPLTKPGTLFEWGPDQQKAYQEIKQALLTAPALGLPDLTKPFELFVDEKQGYAKGVLTQKLGPWRRPVAYLSKKLDPVAAGWPPCLRMVAAIAVLTKDAGKLTMGQPLVILAPHAVEALVKQPPDRWLSNARMTHYQALLLDTDRVQFGPIVALNPATLLPLPEEGLQHDCLDILAEAHGTRPDLTDQPLPDADHTWYTDGSSFLQEGQRKAGAAVTTETEVVWAKALPAGTSAQRAELIALTQALKMAEGKKLNVYTDSRYAFATAHIHGEIYRRRGWLTSEGKEIKNKDEILALLKALFLPKRLSIIHCPGHQKGNRAEARGNRMADQAAREVATRETPETSTLLAGKRTADGSEFEKRTADGSEFESPKKKAKVE

SEQ ID NO: 2506 - protein, 2096 aa, synthetic construct
MPAAKRVKLDGGDKKYSIGLDIGTNSVGWAVITDEYKVPSKKFKVLGNTDRHSIKKNLIGALLFDSGETAEATRLKRTARRRYTRRKNRICYLQEIFSNEMAKVDDSFFHRLEESFLVEEDKKHERHPIFGNIVDEVAYHEKYPTIYHLRKKLVDSTDKADLRLIYLALAHMIKFRGHFLIEGDLNPDNSDVDKLFIQLVQTYNQLFEENPINASGVDAKAILSARLSKSRRLENLIAQLPGEKKNGLFGNLIALSLGLTPNFKSNFDLAEDAKLQLSKDTYDDDLDNLLAQIGDQYADLFLAAKNLSDAILLSDILRVNTEITKAPLSASMIKRYDEHHQDLTLLKALVRQQLPEKYKEIFFDQSKNGYAGYIDGGASQEEFYKFIKPILEKMDGTEELLVKLNREDLLRKQRTFDNGSIPHQIHLGELHAILRRQEDFYPFLKDNREKIEKILTFRIPYYVGPLARGNSRFAWMTRKSEETITPWNFEEVVDKGASAQSFIERMTNFDKNLPNEKVLPKHSLLYEYFTVYNELTKVKYVTEGMRKPAFLSGEQKKAIVDLLFKTNRKVTVKQLKEDYFKKIECFDSVEISGVEDRFNASLGTYHDLLKIIKDKDFLDNEENEDILEDIVLTLTLFEDREMIEERLKTYAHLFDDKVMKQLKRRRYTGWGRLSRKLINGIRDKQSGKTILDFLKSDGFANRNFMQLIHDDSLTFKEDIQKAQVSGQGDSLHEHIANLAGSPAIKKGILQTVKVVDELVKVMGRHKPENIVIEMARENQTTQKGQKNSRERMKRIEEGIKELGSQILKEHPVENTQLQNEKLYLYYLQNGRDMYVDQELDINRLSDYDVDHIVPQSFLKDDSIDNKVLTRSDKARGKSDNVPSEEVVKKMKNYWRQLLNAKLITQRKFDNLTKAERGGLSELDKAGFIKRQLVETRQITKHVAQILDSRMNTKYDENDKLIREVKVITLKSKLVSDFRKDFQFYKVREINNYHHAHDAYLNAVVGTALIKKYPKLESEFVYGDYKVYDVRKMIAKSEQEIGKATAKYFFYSNIMNFFKTEITLANGEIRKRPLIETNGETGEIVWDKGRDFATVRKVLSMPQVNIVKKTEVQTGGFSKESILPKRNSDKLIARKKDWDPKKYGGFDSPTVAYSVLVVAKVEKGKSKKLKSVKELLGITIMERSSFEKNPIDFLEAKGYKEVKKDLIIKLPKYSLFELENGRKRMLASAGELQKGNELALPSKYVNFLYLASHYEKLKGSPEDNEQKQLFVEQHKHYLDEIIEQISEFSKRVILADANLDKVLSAYNKHRDKPIREQAENIIHLFTLTNLGAPAAFKYFDTTIDRKRYTSTKEVLDATLIHQSITGLYETRIDLSQLGGDGGEAAAKPAPGGGGGTLNIEDEYRLHETSKGPDVPLGSTWLSDFPQAWAETGGMGLAVRQAPLIIPLKATSTPVSIKQYPMSQEARLGIKPHIQRLLDQGILVPCQSPWNTPLLPVKKPGTNDYRPVQDLREVNKRVEDIHPTVPNPYNLLSGLPPSHQWYTVLDLKDAFFCLRLHPTSQSLFAFEWRDPEMGISGQLTWTRLPQGFKNSPTLFNEALHRDLADFRIQHPDLILLQYVDDLLLAATSELDCQQGTRALLQTLGDLGYRASAKKAQICQKQVKYLGYLLKEGQRWLTEARKETVMGQPTPKTPRQLREFLGKAGFCRLFIPGFAEMAAPLYPLTKPGTLFEWGPDQQKAYQEIKQALLTAPALGLPDLTKPFELFVDEKQGYAKGVLTQKLGPWRRPVAYLSKKLDPVAAGWPPCLRMVAAIAVLTKDAGKLTMGQPLVILAPHAVEALVKQPPDRWLSNARMTHYQALLLDTDRVQFGPIVALNPATLLPLPEEGLQHDCLDILAEAHGTRPDLTDQPLPDADHTWYTDGSSFLQEGQRKAGAAVTTETEVVWAKALPAGTSAQRAELIALTQALKMAEGKKLNVYTDSRYAFATAHIHGEIYRRRGWLTSEGKEIKNKDEILALLKALFLPKRLSIIHCPGHQKGNRAEARGNRMADQAAREVATRETPETSTLLAGKRTADGSEFEKRTADGSEFESPKKKAKVE

SEQ ID NO: 2507 - protein, 2100 aa, synthetic construct
MPAAKRVKLDGGDKKYSIGLDIGTNSVGWAVITDEYKVPSKKFKVLGNTDRHSIKKNLIGALLFDSGETAEATRLKRTARRRYTRRKNRICYLQEIFSNEMAKVDDSFFHRLEESFLVEEDKKHERHPIFGNIVDEVAYHEKYPTIYHLRKKLVDSTDKADLRLIYLALAHMIKFRGHFLIEGDLNPDNSDVDKLFIQLVQTYNQLFEENPINASGVDAKAILSARLSKSRRLENLIAQLPGEKKNGLFGNLIALSLGLTPNFKSNFDLAEDAKLQLSKDTYDDDLDNLLAQIGDQYADLFLAAKNLSDAILLSDILRVNTEITKAPLSASMIKRYDEHHQDLTLLKALVRQQLPEKYKEIFFDQSKNGYAGYIDGGASQEEFYKFIKPILEKMDGTEELLVKLNREDLLRKQRTFDNGSIPHQIHLGELHAILRRQEDFYPFLKDNREKIEKILTFRIPYYVGPLARGNSRFAWMTRKSEETITPWNFEEVVDKGASAQSFIERMTNFDKNLPNEKVLPKHSLLYEYFTVYNELTKVKYVTEGMRKPAFLSGEQKKAIVDLLFKTNRKVTVKQLKEDYFKKIECFDSVEISGVEDRFNASLGTYHDLLKIIKDKDFLDNEENEDILEDIVLTLTLFEDREMIEERLKTYAHLFDDKVMKQLKRRRYTGWGRLSRKLINGIRDKQSGKTILDFLKSDGFANRNFMQLIHDDSLTFKEDIQKAQVSGQGDSLHEHIANLAGSPAIKKGILQTVKVVDELVKVMGRHKPENIVIEMARENQTTQKGQKNSRERMKRIEEGIKELGSQILKEHPVENTQLQNEKLYLYYLQNGRDMYVDQELDINRLSDYDVDHIVPQSFLKDDSIDNKVLTRSDKARGKSDNVPSEEVVKKMKNYWRQLLNAKLITQRKFDNLTKAERGGLSELDKAGFIKRQLVETRQITKHVAQILDSRMNTKYDENDKLIREVKVITLKSKLVSDFRKDFQFYKVREINNYHHAHDAYLNAVVGTALIKKYPKLESEFVYGDYKVYDVRKMIAKSEQEIGKATAKYFFYSNIMNFFKTEITLANGEIRKRPLIETNGETGEIVWDKGRDFATVRKVLSMPQVNIVKKTEVQTGGFSKESILPKRNSDKLIARKKDWDPKKYGGFDSPTVAYSVLVVAKVEKGKSKKLKSVKELLGITIMERSSFEKNPIDFLEAKGYKEVKKDLIIKLPKYSLFELENGRKRMLASAGELQKGNELALPSKYVNFLYLASHYEKLKGSPEDNEQKQLFVEQHKHYLDEIIEQISEFSKRVILADANLDKVLSAYNKHRDKPIREQAENIIHLFTLTNLGAPAAFKYFDTTIDRKRYTSTKEVLDATLIHQSITGLYETRIDLSQLGGDGGEAAAKEAAAKEAAAKGGTLNIEDEYRLHETSKGPDVPLGSTWLSDFPQAWAETGGMGLAVRQAPLIIPLKATSTPVSIKQYPMSQEARLGIKPHIQRLLDQGILVPCQSPWNTPLLPVKKPGTNDYRPVQDLREVNKRVEDIHPTVPNPYNLLSGLPPSHQWYTVLDLKDAFFCLRLHPTSQSLFAFEWRDPEMGISGQLTWTRLPQGFKNSPTLFNEALHRDLADFRIQHPDLILLQYVDDLLLAATSELDCQQGTRALLQTLGDLGYRASAKKAQICQKQVKYLGYLLKEGQRWLTEARKETVMGQPTPKTPRQLREFLGKAGFCRLFIPGFAEMAAPLYPLTKPGTLFEWGPDQQKAYQEIKQALLTAPALGLPDLTKPFELFVDEKQGYAKGVLTQKLGPWRRPVAYLSKKLDPVAAGWPPCLRMVAAIAVLTKDAGKLTMGQPLVILAPHAVEALVKQPPDRWLSNARMTHYQALLLDTDRVQFGPIVALNPATLLPLPEEGLQHDCLDILAEAHGTRPDLTDQPLPDADHTWYTDGSSFLQEGQRKAGAAVTTETEVVWAKALPAGTSAQRAELIALTQALKMAEGKKLNVYTDSRYAFATAHIHGEIYRRRGWLTSEGKEIKNKDEILALLKALFLPKRLSIIHCPGHQKGNRAEARGNRMADQAAREVATRETPETSTLLAGKRTADGSEFEKRTADGSEFESPKKKAKVE

SEQ ID NO: 2508 - protein, 2088 aa, synthetic construct
MPAAKRVKLDGGDKKYSIGLDIGTNSVGWAVITDEYKVPSKKFKVLGNTDRHSIKKNLIGALLFDSGETAEATRLKRTARRRYTRRKNRICYLQEIFSNEMAKVDDSFFHRLEESFLVEEDKKHERHPIFGNIVDEVAYHEKYPTIYHLRKKLVDSTDKADLRLIYLALAHMIKFRGHFLIEGDLNPDNSDVDKLFIQLVQTYNQLFEENPINASGVDAKAILSARLSKSRRLENLIAQLPGEKKNGLFGNLIALSLGLTPNFKSNFDLAEDAKLQLSKDTYDDDLDNLLAQIGDQYADLFLAAKNLSDAILLSDILRVNTEITKAPLSASMIKRYDEHHQDLTLLKALVRQQLPEKYKEIFFDQSKNGYAGYIDGGASQEEFYKFIKPILEKMDGTEELLVKLNREDLLRKQRTFDNGSIPHQIHLGELHAILRRQEDFYPFLKDNREKIEKILTFRIPYYVGPLARGNSRFAWMTRKSEETITPWNFEEVVDKGASAQSFIERMTNFDKNLPNEKVLPKHSLLYEYFTVYNELTKVKYVTEGMRKPAFLSGEQKKAIVDLLFKTNRKVTVKQLKEDYFKKIECFDSVEISGVEDRFNASLGTYHDLLKIIKDKDFLDNEENEDILEDIVLTLTLFEDREMIEERLKTYAHLFDDKVMKQLKRRRYTGWGRLSRKLINGIRDKQSGKTILDFLKSDGFANRNFMQLIHDDSLTFKEDIQKAQVSGQGDSLHEHIANLAGSPAIKKGILQTVKVVDELVKVMGRHKPENIVIEMARENQTTQKGQKNSRERMKRIEEGIKELGSQILKEHPVENTQLQNEKLYLYYLQNGRDMYVDQELDINRLSDYDVDHIVPQSFLKDDSIDNKVLTRSDKARGKSDNVPSEEVVKKMKNYWRQLLNAKLITQRKFDNLTKAERGGLSELDKAGFIKRQLVETRQITKHVAQILDSRMNTKYDENDKLIREVKVITLKSKLVSDFRKDFQFYKVREINNYHHAHDAYLNAVVGTALIKKYPKLESEFVYGDYKVYDVRKMIAKSEQEIGKATAKYFFYSNIMNFFKTEITLANGEIRKRPLIETNGETGEIVWDKGRDFATVRKVLSMPQVNIVKKTEVQTGGFSKESILPKRNSDKLIARKKDWDPKKYGGFDSPTVAYSVLVVAKVEKGKSKKLKSVKELLGITIMERSSFEKNPIDFLEAKGYKEVKKDLIIKLPKYSLFELENGRKRMLASAGELQKGNELALPSKYVNFLYLASHYEKLKGSPEDNEQKQLFVEQHKHYLDEIIEQISEFSKRVILADANLDKVLSAYNKHRDKPIREQAENIIHLFTLTNLGAPAAFKYFDTTIDRKRYTSTKEVLDATLIHQSITGLYETRIDLSQLGGDGGGSSGGTLNIEDEYRLHETSKGPDVPLGSTWLSDFPQAWAETGGMGLAVRQAPLIIPLKATSTPVSIKQYPMSQEARLGIKPHIQRLLDQGILVPCQSPWNTPLLPVKKPGTNDYRPVQDLREVNKRVEDIHPTVPNPYNLLSGLPPSHQWYTVLDLKDAFFCLRLHPTSQSLFAFEWRDPEMGISGQLTWTRLPQGFKNSPTLFNEALHRDLADFRIQHPDLILLQYVDDLLLAATSELDCQQGTRALLQTLGDLGYRASAKKAQICQKQVKYLGYLLKEGQRWLTEARKETVMGQPTPKTPRQLREFLGKAGFCRLFIPGFAEMAAPLYPLTKPGTLFEWGPDQQKAYQEIKQALLTAPALGLPDLTKPFELFVDEKQGYAKGVLTQKLGPWRRPVAYLSKKLDPVAAGWPPCLRMVAAIAVLTKDAGKLTMGQPLVILAPHAVEALVKQPPDRWLSNARMTHYQALLLDTDRVQFGPIVALNPATLLPLPEEGLQHDCLDILAEAHGTRPDLTDQPLPDADHTWYTDGSSFLQEGQRKAGAAVTTETEVVWAKALPAGTSAQRAELIALTQALKMAEGKKLNVYTDSRYAFATAHIHGEIYRRRGWLTSEGKEIKNKDEILALLKALFLPKRLSIIHCPGHQKGNRAEARGNRMADQAAREVATRETPETSTLLAGKRTADGSEFEKRTADGSEFESPKKKAKVE

SEQ ID NO: 2509 - skipped

SEQ ID NO: 2510 - protein, 2096 aa, synthetic construct
MPAAKRVKLDGGDKKYSIGLDIGTNSVGWAVITDEYKVPSKKFKVLGNTDRHSIKKNLIGALLFDSGETAEATRLKRTARRRYTRRKNRICYLQEIFSNEMAKVDDSFFHRLEESFLVEEDKKHERHPIFGNIVDEVAYHEKYPTIYHLRKKLVDSTDKADLRLIYLALAHMIKFRGHFLIEGDLNPDNSDVDKLFIQLVQTYNQLFEENPINASGVDAKAILSARLSKSRRLENLIAQLPGEKKNGLFGNLIALSLGLTPNFKSNFDLAEDAKLQLSKDTYDDDLDNLLAQIGDQYADLFLAAKNLSDAILLSDILRVNTEITKAPLSASMIKRYDEHHQDLTLLKALVRQQLPEKYKEIFFDQSKNGYAGYIDGGASQEEFYKFIKPILEKMDGTEELLVKLNREDLLRKQRTFDNGSIPHQIHLGELHAILRRQEDFYPFLKDNREKIEKILTFRIPYYVGPLARGNSRFAWMTRKSEETITPWNFEEVVDKGASAQSFIERMTNFDKNLPNEKVLPKHSLLYEYFTVYNELTKVKYVTEGMRKPAFLSGEQKKAIVDLLFKTNRKVTVKQLKEDYFKKIECFDSVEISGVEDRFNASLGTYHDLLKIIKDKDFLDNEENEDILEDIVLTLTLFEDREMIEERLKTYAHLFDDKVMKQLKRRRYTGWGRLSRKLINGIRDKQSGKTILDFLKSDGFANRNFMQLIHDDSLTFKEDIQKAQVSGQGDSLHEHIANLAGSPAIKKGILQTVKVVDELVKVMGRHKPENIVIEMARENQTTQKGQKNSRERMKRIEEGIKELGSQILKEHPVENTQLQNEKLYLYYLQNGRDMYVDQELDINRLSDYDVDHIVPQSFLKDDSIDNKVLTRSDKARGKSDNVPSEEVVKKMKNYWRQLLNAKLITQRKFDNLTKAERGGLSELDKAGFIKRQLVETRQITKHVAQILDSRMNTKYDENDKLIREVKVITLKSKLVSDFRKDFQFYKVREINNYHHAHDAYLNAVVGTALIKKYPKLESEFVYGDYKVYDVRKMIAKSEQEIGKATAKYFFYSNIMNFFKTEITLANGEIRKRPLIETNGETGEIVWDKGRDFATVRKVLSMPQVNIVKKTEVQTGGFSKESILPKRNSDKLIARKKDWDPKKYGGFDSPTVAYSVLVVAKVEKGKSKKLKSVKELLGITIMERSSFEKNPIDFLEAKGYKEVKKDLIIKLPKYSLFELENGRKRMLASAGELQKGNELALPSKYVNFLYLASHYEKLKGSPEDNEQKQLFVEQHKHYLDEIIEQISEFSKRVILADANLDKVLSAYNKHRDKPIREQAENIIHLFTLTNLGAPAAFKYFDTTIDRKRYTSTKEVLDATLIHQSITGLYETRIDLSQLGGDGGPAPAPAPAPAPGGTLNIEDEYRLHETSKGPDVPLGSTWLSDFPQAWAETGGMGLAVRQAPLIIPLKATSTPVSIKQYPMSQEARLGIKPHIQRLLDQGILVPCQSPWNTPLLPVKKPGTNDYRPVQDLREVNKRVEDIHPTVPNPYNLLSGLPPSHQWYTVLDLKDAFFCLRLHPTSQSLFAFEWRDPEMGISGQLTWTRLPQGFKNSPTLFNEALHRDLADFRIQHPDLILLQYVDDLLLAATSELDCQQGTRALLQTLGDLGYRASAKKAQICQKQVKYLGYLLKEGQRWLTEARKETVMGQPTPKTPRQLREFLGKAGFCRLFIPGFAEMAAPLYPLTKPGTLFEWGPDQQKAYQEIKQALLTAPALGLPDLTKPFELFVDEKQGYAKGVLTQKLGPWRRPVAYLSKKLDPVAAGWPPCLRMVAAIAVLTKDAGKLTMGQPLVILAPHAVEALVKQPPDRWLSNARMTHYQALLLDTDRVQFGPIVALNPATLLPLPEEGLQHDCLDILAEAHGTRPDLTDQPLPDADHTWYTDGSSFLQEGQRKAGAAVTTETEVVWAKALPAGTSAQRAELIALTQALKMAEGKKLNVYTDSRYAFATAHIHGEIYRRRGWLTSEGKEIKNKDEILALLKALFLPKRLSIIHCPGHQKGNRAEARGNRMADQAAREVATRETPETSTLLAGKRTADGSEFEKRTADGSEFESPKKKAKVE

SEQ ID NO: 2511 - protein, 2095 aa, synthetic construct
MPAAKRVKLDGGDKKYSIGLDIGTNSVGWAVITDEYKVPSKKFKVLGNTDRHSIKKNLIGALLFDSGETAEATRLKRTARRRYTRRKNRICYLQEIFSNEMAKVDDSFFHRLEESFLVEEDKKHERHPIFGNIVDEVAYHEKYPTIYHLRKKLVDSTDKADLRLIYLALAHMIKFRGHFLIEGDLNPDNSDVDKLFIQLVQTYNQLFEENPINASGVDAKAILSARLSKSRRLENLIAQLPGEKKNGLFGNLIALSLGLTPNFKSNFDLAEDAKLQLSKDTYDDDLDNLLAQIGDQYADLFLAAKNLSDAILLSDILRVNTEITKAPLSASMIKRYDEHHQDLTLLKALVRQQLPEKYKEIFFDQSKNGYAGYIDGGASQEEFYKFIKPILEKMDGTEELLVKLNREDLLRKQRTFDNGSIPHQIHLGELHAILRRQEDFYPFLKDNREKIEKILTFRIPYYVGPLARGNSRFAWMTRKSEETITPWNFEEVVDKGASAQSFIERMTNFDKNLPNEKVLPKHSLLYEYFTVYNELTKVKYVTEGMRKPAFLSGEQKKAIVDLLFKTNRKVTVKQLKEDYFKKIECFDSVEISGVEDRFNASLGTYHDLLKIIKDKDFLDNEENEDILEDIVLTLTLFEDREMIEERLKTYAHLFDDKVMKQLKRRRYTGWGRLSRKLINGIRDKQSGKTILDFLKSDGFANRNFMQLIHDDSLTFKEDIQKAQVSGQGDSLHEHIANLAGSPAIKKGILQTVKVVDELVKVMGRHKPENIVIEMARENQTTQKGQKNSRERMKRIEEGIKELGSQILKEHPVENTQLQNEKLYLYYLQNGRDMYVDQELDINRLSDYDVDHIVPQSFLKDDSIDNKVLTRSDKARGKSDNVPSEEVVKKMKNYWRQLLNAKLITQRKFDNLTKAERGGLSELDKAGFIKRQLVETRQITKHVAQILDSRMNTKYDENDKLIREVKVITLKSKLVSDFRKDFQFYKVREINNYHHAHDAYLNAVVGTALIKKYPKLESEFVYGDYKVYDVRKMIAKSEQEIGKATAKYFFYSNIMNFFKTEITLANGEIRKRPLIETNGETGEIVWDKGRDFATVRKVLSMPQVNIVKKTEVQTGGFSKESILPKRNSDKLIARKKDWDPKKYGGFDSPTVAYSVLVVAKVEKGKSKKLKSVKELLGITIMERSSFEKNPIDFLEAKGYKEVKKDLIIKLPKYSLFELENGRKRMLASAGELQKGNELALPSKYVNFLYLASHYEKLKGSPEDNEQKQLFVEQHKHYLDEIIEQISEFSKRVILADANLDKVLSAYNKHRDKPIREQAENIIHLFTLTNLGAPAAFKYFDTTIDRKRYTSTKEVLDATLIHQSITGLYETRIDLSQLGGDGGGGGGSGGGGSGGTLNIEDEYRLHETSKGPDVPLGSTWLSDFPQAWAETGGMGLAVRQAPLIIPLKATSTPVSIKQYPMSQEARLGIKPHIQRLLDQGILVPCQSPWNTPLLPVKKPGTNDYRPVQDLREVNKRVEDIHPTVPNPYNLLSGLPPSHQWYTVLDLKDAFFCLRLHPTSQSLFAFEWRDPEMGISGQLTWTRLPQGFKNSPTLFNEALHRDLADFRIQHPDLILLQYVDDLLLAATSELDCQQGTRALLQTLGDLGYRASAKKAQICQKQVKYLGYLLKEGQRWLTEARKETVMGQPTPKTPRQLREFLGKAGFCRLFIPGFAEMAAPLYPLTKPGTLFEWGPDQQKAYQEIKQALLTAPALGLPDLTKPFELFVDEKQGYAKGVLTQKLGPWRRPVAYLSKKLDPVAAGWPPCLRMVAAIAVLTKDAGKLTMGQPLVILAPHAVEALVKQPPDRWLSNARMTHYQALLLDTDRVQFGPIVALNPATLLPLPEEGLQHDCLDILAEAHGTRPDLTDQPLPDADHTWYTDGSSFLQEGQRKAGAAVTTETEVVWAKALPAGTSAQRAELIALTQALKMAEGKKLNVYTDSRYAFATAHIHGEIYRRRGWLTSEGKEIKNKDEILALLKALFLPKRLSIIHCPGHQKGNRAEARGNRMADQAAREVATRETPETSTLLAGKRTADGSEFEKRTADGSEFESPKKKAKVE

SEQ ID NO: 2512 - protein, 2096 aa, synthetic construct
MPAAKRVKLDGGDKKYSIGLDIGTNSVGWAVITDEYKVPSKKFKVLGNTDRHSIKKNLIGALLFDSGETAEATRLKRTARRRYTRRKNRICYLQEIFSNEMAKVDDSFFHRLEESFLVEEDKKHERHPIFGNIVDEVAYHEKYPTIYHLRKKLVDSTDKADLRLIYLALAHMIKFRGHFLIEGDLNPDNSDVDKLFIQLVQTYNQLFEENPINASGVDAKAILSARLSKSRRLENLIAQLPGEKKNGLFGNLIALSLGLTPNFKSNFDLAEDAKLQLSKDTYDDDLDNLLAQIGDQYADLFLAAKNLSDAILLSDILRVNTEITKAPLSASMIKRYDEHHQDLTLLKALVRQQLPEKYKEIFFDQSKNGYAGYIDGGASQEEFYKFIKPILEKMDGTEELLVKLNREDLLRKQRTFDNGSIPHQIHLGELHAILRRQEDFYPFLKDNREKIEKILTFRIPYYVGPLARGNSRFAWMTRKSEETITPWNFEEVVDKGASAQSFIERMTNFDKNLPNEKVLPKHSLLYEYFTVYNELTKVKYVTEGMRKPAFLSGEQKKAIVDLLFKTNRKVTVKQLKEDYFKKIECFDSVEISGVEDRFNASLGTYHDLLKIIKDKDFLDNEENEDILEDIVLTLTLFEDREMIEERLKTYAHLFDDKVMKQLKRRRYTGWGRLSRKLINGIRDKQSGKTILDFLKSDGFANRNFMQLIHDDSLTFKEDIQKAQVSGQGDSLHEHIANLAGSPAIKKGILQTVKVVDELVKVMGRHKPENIVIEMARENQTTQKGQKNSRERMKRIEEGIKELGSQILKEHPVENTQLQNEKLYLYYLQNGRDMYVDQELDINRLSDYDVDHIVPQSFLKDDSIDNKVLTRSDKARGKSDNVPSEEVVKKMKNYWRQLLNAKLITQRKFDNLTKAERGGLSELDKAGFIKRQLVETRQITKHVAQILDSRMNTKYDENDKLIREVKVITLKSKLVSDFRKDFQFYKVREINNYHHAHDAYLNAVVGTALIKKYPKLESEFVYGDYKVYDVRKMIAKSEQEIGKATAKYFFYSNIMNFFKTEITLANGEIRKRPLIETNGETGEIVWDKGRDFATVRKVLSMPQVNIVKKTEVQTGGFSKESILPKRNSDKLIARKKDWDPKKYGGFDSPTVAYSVLVVAKVEKGKSKKLKSVKELLGITIMERSSFEKNPIDFLEAKGYKEVKKDLIIKLPKYSLFELENGRKRMLASAGELQKGNELALPSKYVNFLYLASHYEKLKGSPEDNEQKQLFVEQHKHYLDEIIEQISEFSKRVILADANLDKVLSAYNKHRDKPIREQAENIIHLFTLTNLGAPAAFKYFDTTIDRKRYTSTKEVLDATLIHQSITGLYETRIDLSQLGGDGGEAAAKPAPGGSGGTLNIEDEYRLHETSKGPDVPLGSTWLSDFPQAWAETGGMGLAVRQAPLIIPLKATSTPVSIKQYPMSQEARLGIKPHIQRLLDQGILVPCQSPWNTPLLPVKKPGTNDYRPVQDLREVNKRVEDIHPTVPNPYNLLSGLPPSHQWYTVLDLKDAFFCLRLHPTSQSLFAFEWRDPEMGISGQLTWTRLPQGFKNSPTLFNEALHRDLADFRIQHPDLILLQYVDDLLLAATSELDCQQGTRALLQTLGDLGYRASAKKAQICQKQVKYLGYLLKEGQRWLTEARKETVMGQPTPKTPRQLREFLGKAGFCRLFIPGFAEMAAPLYPLTKPGTLFEWGPDQQKAYQEIKQALLTAPALGLPDLTKPFELFVDEKQGYAKGVLTQKLGPWRRPVAYLSKKLDPVAAGWPPCLRMVAAIAVLTKDAGKLTMGQPLVILAPHAVEALVKQPPDRWLSNARMTHYQALLLDTDRVQFGPIVALNPATLLPLPEEGLQHDCLDILAEAHGTRPDLTDQPLPDADHTWYTDGSSFLQEGQRKAGAAVTTETEVVWAKALPAGTSAQRAELIALTQALKMAEGKKLNVYTDSRYAFATAHIHGEIYRRRGWLTSEGKEIKNKDEILALLKALFLPKRLSIIHCPGHQKGNRAEARGNRMADQAAREVATRETPETSTLLAGKRTADGSEFEKRTADGSEFESPKKKAKVE

SEQ ID NO: 2513 - protein, 2103 aa, synthetic construct
MPAAKRVKLDGGDKKYSIGLDIGTNSVGWAVITDEYKVPSKKFKVLGNTDRHSIKKNLIGALLFDSGETAEATRLKRTARRRYTRRKNRICYLQEIFSNEMAKVDDSFFHRLEESFLVEEDKKHERHPIFGNIVDEVAYHEKYPTIYHLRKKLVDSTDKADLRLIYLALAHMIKFRGHFLIEGDLNPDNSDVDKLFIQLVQTYNQLFEENPINASGVDAKAILSARLSKSRRLENLIAQLPGEKKNGLFGNLIALSLGLTPNFKSNFDLAEDAKLQLSKDTYDDDLDNLLAQIGDQYADLFLAAKNLSDAILLSDILRVNTEITKAPLSASMIKRYDEHHQDLTLLKALVRQQLPEKYKEIFFDQSKNGYAGYIDGGASQEEFYKFIKPILEKMDGTEELLVKLNREDLLRKQRTFDNGSIPHQIHLGELHAILRRQEDFYPFLKDNREKIEKILTFRIPYYVGPLARGNSRFAWMTRKSEETITPWNFEEVVDKGASAQSFIERMTNFDKNLPNEKVLPKHSLLYEYFTVYNELTKVKYVTEGMRKPAFLSGEQKKAIVDLLFKTNRKVTVKQLKEDYFKKIECFDSVEISGVEDRFNASLGTYHDLLKIIKDKDFLDNEENEDILEDIVLTLTLFEDREMIEERLKTYAHLFDDKVMKQLKRRRYTGWGRLSRKLINGIRDKQSGKTILDFLKSDGFANRNFMQLIHDDSLTFKEDIQKAQVSGQGDSLHEHIANLAGSPAIKKGILQTVKVVDELVKVMGRHKPENIVIEMARENQTTQKGQKNSRERMKRIEEGIKELGSQILKEHPVENTQLQNEKLYLYYLQNGRDMYVDQELDINRLSDYDVDHIVPQSFLKDDSIDNKVLTRSDKARGKSDNVPSEEVVKKMKNYWRQLLNAKLITQRKFDNLTKAERGGLSELDKAGFIKRQLVETRQITKHVAQILDSRMNTKYDENDKLIREVKVITLKSKLVSDFRKDFQFYKVREINNYHHAHDAYLNAVVGTALIKKYPKLESEFVYGDYKVYDVRKMIAKSEQEIGKATAKYFFYSNIMNFFKTEITLANGEIRKRPLIETNGETGEIVWDKGRDFATVRKVLSMPQVNIVKKTEVQTGGFSKESILPKRNSDKLIARKKDWDPKKYGGFDSPTVAYSVLVVAKVEKGKSKKLKSVKELLGITIMERSSFEKNPIDFLEAKGYKEVKKDLIIKLPKYSLFELENGRKRMLASAGELQKGNELALPSKYVNFLYLASHYEKLKGSPEDNEQKQLFVEQHKHYLDEIIEQISEFSKRVILADANLDKVLSAYNKHRDKPIREQAENIIHLFTLTNLGAPAAFKYFDTTIDRKRYTSTKEVLDATLIHQSITGLYETRIDLSQLGGDGGGGSGGSGGSGGSGGSGGSGGTLNIEDEYRLHETSKGPDVPLGSTWLSDFPQAWAETGGMGLAVRQAPLIIPLKATSTPVSIKQYPMSQEARLGIKPHIQRLLDQGILVPCQSPWNTPLLPVKKPGTNDYRPVQDLREVNKRVEDIHPTVPNPYNLLSGLPPSHQWYTVLDLKDAFFCLRLHPTSQSLFAFEWRDPEMGISGQLTWTRLPQGFKNSPTLFNEALHRDLADFRIQHPDLILLQYVDDLLLAATSELDCQQGTRALLQTLGDLGYRASAKKAQICQKQVKYLGYLLKEGQRWLTEARKETVMGQPTPKTPRQLREFLGKAGFCRLFIPGFAEMAAPLYPLTKPGTLFEWGPDQQKAYQEIKQALLTAPALGLPDLTKPFELFVDEKQGYAKGVLTQKLGPWRRPVAYLSKKLDPVAAGWPPCLRMVAAIAVLTKDAGKLTMGQPLVILAPHAVEALVKQPPDRWLSNARMTHYQALLLDTDRVQFGPIVALNPATLLPLPEEGLQHDCLDILAEAHGTRPDLTDQPLPDADHTWYTDGSSFLQEGQRKAGAAVTTETEVVWAKALPAGTSAQRAELIALTQALKMAEGKKLNVYTDSRYAFATAHIHGEIYRRRGWLTSEGKEIKNKDEILALLKALFLPKRLSIIHCPGHQKGNRAEARGNRMADQAAREVATRETPETSTLLAGKRTADGSEFEKRTADGSEFESPKKKAKVE

SEQ ID NO: 2514 - protein, 2096 aa, synthetic construct
MPAAKRVKLDGGDKKYSIGLDIGTNSVGWAVITDEYKVPSKKFKVLGNTDRHSIKKNLIGALLFDSGETAEATRLKRTARRRYTRRKNRICYLQEIFSNEMAKVDDSFFHRLEESFLVEEDKKHERHPIFGNIVDEVAYHEKYPTIYHLRKKLVDSTDKADLRLIYLALAHMIKFRGHFLIEGDLNPDNSDVDKLFIQLVQTYNQLFEENPINASGVDAKAILSARLSKSRRLENLIAQLPGEKKNGLFGNLIALSLGLTPNFKSNFDLAEDAKLQLSKDTYDDDLDNLLAQIGDQYADLFLAAKNLSDAILLSDILRVNTEITKAPLSASMIKRYDEHHQDLTLLKALVRQQLPEKYKEIFFDQSKNGYAGYIDGGASQEEFYKFIKPILEKMDGTEELLVKLNREDLLRKQRTFDNGSIPHQIHLGELHAILRRQEDFYPFLKDNREKIEKILTFRIPYYVGPLARGNSRFAWMTRKSEETITPWNFEEVVDKGASAQSFIERMTNFDKNLPNEKVLPKHSLLYEYFTVYNELTKVKYVTEGMRKPAFLSGEQKKAIVDLLFKTNRKVTVKQLKEDYFKKIECFDSVEISGVEDRFNASLGTYHDLLKIIKDKDFLDNEENEDILEDIVLTLTLFEDREMIEERLKTYAHLFDDKVMKQLKRRRYTGWGRLSRKLINGIRDKQSGKTILDFLKSDGFANRNFMQLIHDDSLTFKEDIQKAQVSGQGDSLHEHIANLAGSPAIKKGILQTVKVVDELVKVMGRHKPENIVIEMARENQTTQKGQKNSRERMKRIEEGIKELGSQILKEHPVENTQLQNEKLYLYYLQNGRDMYVDQELDINRLSDYDVDHIVPQSFLKDDSIDNKVLTRSDKARGKSDNVPSEEVVKKMKNYWRQLLNAKLITQRKFDNLTKAERGGLSELDKAGFIKRQLVETRQITKHVAQILDSRMNTKYDENDKLIREVKVITLKSKLVSDFRKDFQFYKVREINNYHHAHDAYLNAVVGTALIKKYPKLESEFVYGDYKVYDVRKMIAKSEQEIGKATAKYFFYSNIMNFFKTEITLANGEIRKRPLIETNGETGEIVWDKGRDFATVRKVLSMPQVNIVKKTEVQTGGFSKESILPKRNSDKLIARKKDWDPKKYGGFDSPTVAYSVLVVAKVEKGKSKKLKSVKELLGITIMERSSFEKNPIDFLEAKGYKEVKKDLIIKLPKYSLFELENGRKRMLASAGELQKGNELALPSKYVNFLYLASHYEKLKGSPEDNEQKQLFVEQHKHYLDEIIEQISEFSKRVILADANLDKVLSAYNKHRDKPIREQAENIIHLFTLTNLGAPAAFKYFDTTIDRKRYTSTKEVLDATLIHQSITGLYETRIDLSQLGGDGGPAPEAAAKGSSGGTLNIEDEYRLHETSKGPDVPLGSTWLSDFPQAWAETGGMGLAVRQAPLIIPLKATSTPVSIKQYPMSQEARLGIKPHIQRLLDQGILVPCQSPWNTPLLPVKKPGTNDYRPVQDLREVNKRVEDIHPTVPNPYNLLSGLPPSHQWYTVLDLKDAFFCLRLHPTSQSLFAFEWRDPEMGISGQLTWTRLPQGFKNSPTLFNEALHRDLADFRIQHPDLILLQYVDDLLLAATSELDCQQGTRALLQTLGDLGYRASAKKAQICQKQVKYLGYLLKEGQRWLTEARKETVMGQPTPKTPRQLREFLGKAGFCRLFIPGFAEMAAPLYPLTKPGTLFEWGPDQQKAYQEIKQALLTAPALGLPDLTKPFELFVDEKQGYAKGVLTQKLGPWRRPVAYLSKKLDPVAAGWPPCLRMVAAIAVLTKDAGKLTMGQPLVILAPHAVEALVKQPPDRWLSNARMTHYQALLLDTDRVQFGPIVALNPATLLPLPEEGLQHDCLDILAEAHGTRPDLTDQPLPDADHTWYTDGSSFLQEGQRKAGAAVTTETEVVWAKALPAGTSAQRAELIALTQALKMAEGKKLNVYTDSRYAFATAHIHGEIYRRRGWLTSEGKEIKNKDEILALLKALFLPKRLSIIHCPGHQKGNRAEARGNRMADQAAREVATRETPETSTLLAGKRTADGSEFEKRTADGSEFESPKKKAKVE

SEQ ID NO: 2515 - protein, 2096 aa, synthetic construct
MPAAKRVKLDGGDKKYSIGLDIGTNSVGWAVITDEYKVPSKKFKVLGNTDRHSIKKNLIGALLFDSGETAEATRLKRTARRRYTRRKNRICYLQEIFSNEMAKVDDSFFHRLEESFLVEEDKKHERHPIFGNIVDEVAYHEKYPTIYHLRKKLVDSTDKADLRLIYLALAHMIKFRGHFLIEGDLNPDNSDVDKLFIQLVQTYNQLFEENPINASGVDAKAILSARLSKSRRLENLIAQLPGEKKNGLFGNLIALSLGLTPNFKSNFDLAEDAKLQLSKDTYDDDLDNLLAQIGDQYADLFLAAKNLSDAILLSDILRVNTEITKAPLSASMIKRYDEHHQDLTLLKALVRQQLPEKYKEIFFDQSKNGYAGYIDGGASQEEFYKFIKPILEKMDGTEELLVKLNREDLLRKQRTFDNGSIPHQIHLGELHAILRRQEDFYPFLKDNREKIEKILTFRIPYYVGPLARGNSRFAWMTRKSEETITPWNFEEVVDKGASAQSFIERMTNFDKNLPNEKVLPKHSLLYEYFTVYNELTKVKYVTEGMRKPAFLSGEQKKAIVDLLFKTNRKVTVKQLKEDYFKKIECFDSVEISGVEDRFNASLGTYHDLLKIIKDKDFLDNEENEDILEDIVLTLTLFEDREMIEERLKTYAHLFDDKVMKQLKRRRYTGWGRLSRKLINGIRDKQSGKTILDFLKSDGFANRNFMQLIHDDSLTFKEDIQKAQVSGQGDSLHEHIANLAGSPAIKKGILQTVKVVDELVKVMGRHKPENIVIEMARENQTTQKGQKNSRERMKRIEEGIKELGSQILKEHPVENTQLQNEKLYLYYLQNGRDMYVDQELDINRLSDYDVDHIVPQSFLKDDSIDNKVLTRSDKARGKSDNVPSEEVVKKMKNYWRQLLNAKLITQRKFDNLTKAERGGLSELDKAGFIKRQLVETRQITKHVAQILDSRMNTKYDENDKLIREVKVITLKSKLVSDFRKDFQFYKVREINNYHHAHDAYLNAVVGTALIKKYPKLESEFVYGDYKVYDVRKMIAKSEQEIGKATAKYFFYSNIMNFFKTEITLANGEIRKRPLIETNGETGEIVWDKGRDFATVRKVLSMPQVNIVKKTEVQTGGFSKESILPKRNSDKLIARKKDWDPKKYGGFDSPTVAYSVLVVAKVEKGKSKKLKSVKELLGITIMERSSFEKNPIDFLEAKGYKEVKKDLIIKLPKYSLFELENGRKRMLASAGELQKGNELALPSKYVNFLYLASHYEKLKGSPEDNEQKQLFVEQHKHYLDEIIEQISEFSKRVILADANLDKVLSAYNKHRDKPIREQAENIIHLFTLTNLGAPAAFKYFDTTIDRKRYTSTKEVLDATLIHQSITGLYETRIDLSQLGGDGGGSSGGGEAAAKGGTLNIEDEYRLHETSKGPDVPLGSTWLSDFPQAWAETGGMGLAVRQAPLIIPLKATSTPVSIKQYPMSQEARLGIKPHIQRLLDQGILVPCQSPWNTPLLPVKKPGTNDYRPVQDLREVNKRVEDIHPTVPNPYNLLSGLPPSHQWYTVLDLKDAFFCLRLHPTSQSLFAFEWRDPEMGISGQLTWTRLPQGFKNSPTLFNEALHRDLADFRIQHPDLILLQYVDDLLLAATSELDCQQGTRALLQTLGDLGYRASAKKAQICQKQVKYLGYLLKEGQRWLTEARKETVMGQPTPKTPRQLREFLGKAGFCRLFIPGFAEMAAPLYPLTKPGTLFEWGPDQQKAYQEIKQALLTAPALGLPDLTKPFELFVDEKQGYAKGVLTQKLGPWRRPVAYLSKKLDPVAAGWPPCLRMVAAIAVLTKDAGKLTMGQPLVILAPHAVEALVKQPPDRWLSNARMTHYQALLLDTDRVQFGPIVALNPATLLPLPEEGLQHDCLDILAEAHGTRPDLTDQPLPDADHTWYTDGSSFLQEGQRKAGAAVTTETEVVWAKALPAGTSAQRAELIALTQALKMAEGKKLNVYTDSRYAFATAHIHGEIYRRRGWLTSEGKEIKNKDEILALLKALFLPKRLSIIHCPGHQKGNRAEARGNRMADQAAREVATRETPETSTLLAGKRTADGSEFEKRTADGSEFESPKKKAKVE

SEQ ID NO: 2516-2517 - skipped (2 entries)

SEQ ID NO: 2518 - protein, 2101 aa, synthetic construct
MPAAKRVKLDGGDKKYSIGLDIGTNSVGWAVITDEYKVPSKKFKVLGNTDRHSIKKNLIGALLFDSGETAEATRLKRTARRRYTRRKNRICYLQEIFSNEMAKVDDSFFHRLEESFLVEEDKKHERHPIFGNIVDEVAYHEKYPTIYHLRKKLVDSTDKADLRLIYLALAHMIKFRGHFLIEGDLNPDNSDVDKLFIQLVQTYNQLFEENPINASGVDAKAILSARLSKSRRLENLIAQLPGEKKNGLFGNLIALSLGLTPNFKSNFDLAEDAKLQLSKDTYDDDLDNLLAQIGDQYADLFLAAKNLSDAILLSDILRVNTEITKAPLSASMIKRYDEHHQDLTLLKALVRQQLPEKYKEIFFDQSKNGYAGYIDGGASQEEFYKFIKPILEKMDGTEELLVKLNREDLLRKQRTFDNGSIPHQIHLGELHAILRRQEDFYPFLKDNREKIEKILTFRIPYYVGPLARGNSRFAWMTRKSEETITPWNFEEVVDKGASAQSFIERMTNFDKNLPNEKVLPKHSLLYEYFTVYNELTKVKYVTEGMRKPAFLSGEQKKAIVDLLFKTNRKVTVKQLKEDYFKKIECFDSVEISGVEDRFNASLGTYHDLLKIIKDKDFLDNEENEDILEDIVLTLTLFEDREMIEERLKTYAHLFDDKVMKQLKRRRYTGWGRLSRKLINGIRDKQSGKTILDFLKSDGFANRNFMQLIHDDSLTFKEDIQKAQVSGQGDSLHEHIANLAGSPAIKKGILQTVKVVDELVKVMGRHKPENIVIEMARENQTTQKGQKNSRERMKRIEEGIKELGSQILKEHPVENTQLQNEKLYLYYLQNGRDMYVDQELDINRLSDYDVDHIVPQSFLKDDSIDNKVLTRSDKARGKSDNVPSEEVVKKMKNYWRQLLNAKLITQRKFDNLTKAERGGLSELDKAGFIKRQLVETRQITKHVAQILDSRMNTKYDENDKLIREVKVITLKSKLVSDFRKDFQFYKVREINNYHHAHDAYLNAVVGTALIKKYPKLESEFVYGDYKVYDVRKMIAKSEQEIGKATAKYFFYSNIMNFFKTEITLANGEIRKRPLIETNGETGEIVWDKGRDFATVRKVLSMPQVNIVKKTEVQTGGFSKESILPKRNSDKLIARKKDWDPKKYGGFDSPTVAYSVLVVAKVEKGKSKKLKSVKELLGITIMERSSFEKNPIDFLEAKGYKEVKKDLIIKLPKYSLFELENGRKRMLASAGELQKGNELALPSKYVNFLYLASHYEKLKGSPEDNEQKQLFVEQHKHYLDEIIEQISEFSKRVILADANLDKVLSAYNKHRDKPIREQAENIIHLFTLTNLGAPAAFKYFDTTIDRKRYTSTKEVLDATLIHQSITGLYETRIDLSQLGGDGGSGSETPGTSESATPESGGTLNIEDEYRLHETSKGPDVPLGSTWLSDFPQAWAETGGMGLAVRQAPLIIPLKATSTPVSIKQYPMSQEARLGIKPHIQRLLDQGILVPCQSPWNTPLLPVKKPGTNDYRPVQDLREVNKRVEDIHPTVPNPYNLLSGLPPSHQWYTVLDLKDAFFCLRLHPTSQSLFAFEWRDPEMGISGQLTWTRLPQGFKNSPTLFNEALHRDLADFRIQHPDLILLQYVDDLLLAATSELDCQQGTRALLQTLGDLGYRASAKKAQICQKQVKYLGYLLKEGQRWLTEARKETVMGQPTPKTPRQLREFLGKAGFCRLFIPGFAEMAAPLYPLTKPGTLFEWGPDQQKAYQEIKQALLTAPALGLPDLTKPFELFVDEKQGYAKGVLTQKLGPWRRPVAYLSKKLDPVAAGWPPCLRMVAAIAVLTKDAGKLTMGQPLVILAPHAVEALVKQPPDRWLSNARMTHYQALLLDTDRVQFGPIVALNPATLLPLPEEGLQHDCLDILAEAHGTRPDLTDQPLPDADHTWYTDGSSFLQEGQRKAGAAVTTETEVVWAKALPAGTSAQRAELIALTQALKMAEGKKLNVYTDSRYAFATAHIHGEIYRRRGWLTSEGKEIKNKDEILALLKALFLPKRLSIIHCPGHQKGNRAEARGNRMADQAAREVATRETPETSTLLAGKRTADGSEFEKRTADGSEFESPKKKAKVE

SEQ ID NO: 2519 - protein, 2096 aa, synthetic construct
MPAAKRVKLDGGDKKYSIGLDIGTNSVGWAVITDEYKVPSKKFKVLGNTDRHSIKKNLIGALLFDSGETAEATRLKRTARRRYTRRKNRICYLQEIFSNEMAKVDDSFFHRLEESFLVEEDKKHERHPIFGNIVDEVAYHEKYPTIYHLRKKLVDSTDKADLRLIYLALAHMIKFRGHFLIEGDLNPDNSDVDKLFIQLVQTYNQLFEENPINASGVDAKAILSARLSKSRRLENLIAQLPGEKKNGLFGNLIALSLGLTPNFKSNFDLAEDAKLQLSKDTYDDDLDNLLAQIGDQYADLFLAAKNLSDAILLSDILRVNTEITKAPLSASMIKRYDEHHQDLTLLKALVRQQLPEKYKEIFFDQSKNGYAGYIDGGASQEEFYKFIKPILEKMDGTEELLVKLNREDLLRKQRTFDNGSIPHQIHLGELHAILRRQEDFYPFLKDNREKIEKILTFRIPYYVGPLARGNSRFAWMTRKSEETITPWNFEEVVDKGASAQSFIERMTNFDKNLPNEKVLPKHSLLYEYFTVYNELTKVKYVTEGMRKPAFLSGEQKKAIVDLLFKTNRKVTVKQLKEDYFKKIECFDSVEISGVEDRFNASLGTYHDLLKIIKDKDFLDNEENEDILEDIVLTLTLFEDREMIEERLKTYAHLFDDKVMKQLKRRRYTGWGRLSRKLINGIRDKQSGKTILDFLKSDGFANRNFMQLIHDDSLTFKEDIQKAQVSGQGDSLHEHIANLAGSPAIKKGILQTVKVVDELVKVMGRHKPENIVIEMARENQTTQKGQKNSRERMKRIEEGIKELGSQILKEHPVENTQLQNEKLYLYYLQNGRDMYVDQELDINRLSDYDVDHIVPQSFLKDDSIDNKVLTRSDKARGKSDNVPSEEVVKKMKNYWRQLLNAKLITQRKFDNLTKAERGGLSELDKAGFIKRQLVETRQITKHVAQILDSRMNTKYDENDKLIREVKVITLKSKLVSDFRKDFQFYKVREINNYHHAHDAYLNAVVGTALIKKYPKLESEFVYGDYKVYDVRKMIAKSEQEIGKATAKYFFYSNIMNFFKTEITLANGEIRKRPLIETNGETGEIVWDKGRDFATVRKVLSMPQVNIVKKTEVQTGGFSKESILPKRNSDKLIARKKDWDPKKYGGFDSPTVAYSVLVVAKVEKGKSKKLKSVKELLGITIMERSSFEKNPIDFLEAKGYKEVKKDLIIKLPKYSLFELENGRKRMLASAGELQKGNELALPSKYVNFLYLASHYEKLKGSPEDNEQKQLFVEQHKHYLDEIIEQISEFSKRVILADANLDKVLSAYNKHRDKPIREQAENIIHLFTLTNLGAPAAFKYFDTTIDRKRYTSTKEVLDATLIHQSITGLYETRIDLSQLGGDGGEAAAKPAPGSSGGTLNIEDEYRLHETSKGPDVPLGSTWLSDFPQAWAETGGMGLAVRQAPLIIPLKATSTPVSIKQYPMSQEARLGIKPHIQRLLDQGILVPCQSPWNTPLLPVKKPGTNDYRPVQDLREVNKRVEDIHPTVPNPYNLLSGLPPSHQWYTVLDLKDAFFCLRLHPTSQSLFAFEWRDPEMGISGQLTWTRLPQGFKNSPTLFNEALHRDLADFRIQHPDLILLQYVDDLLLAATSELDCQQGTRALLQTLGDLGYRASAKKAQICQKQVKYLGYLLKEGQRWLTEARKETVMGQPTPKTPRQLREFLGKAGFCRLFIPGFAEMAAPLYPLTKPGTLFEWGPDQQKAYQEIKQALLTAPALGLPDLTKPFELFVDEKQGYAKGVLTQKLGPWRRPVAYLSKKLDPVAAGWPPCLRMVAAIAVLTKDAGKLTMGQPLVILAPHAVEALVKQPPDRWLSNARMTHYQALLLDTDRVQFGPIVALNPATLLPLPEEGLQHDCLDILAEAHGTRPDLTDQPLPDADHTWYTDGSSFLQEGQRKAGAAVTTETEVVWAKALPAGTSAQRAELIALTQALKMAEGKKLNVYTDSRYAFATAHIHGEIYRRRGWLTSEGKEIKNKDEILALLKALFLPKRLSIIHCPGHQKGNRAEARGNRMADQAAREVATRETPETSTLLAGKRTADGSEFEKRTADGSEFESPKKKAKVE

SEQ ID NO: 2520 - skipped

SEQ ID NO: 2521 - protein, 2096 aa, synthetic construct
MPAAKRVKLDGGDKKYSIGLDIGTNSVGWAVITDEYKVPSKKFKVLGNTDRHSIKKNLIGALLFDSGETAEATRLKRTARRRYTRRKNRICYLQEIFSNEMAKVDDSFFHRLEESFLVEEDKKHERHPIFGNIVDEVAYHEKYPTIYHLRKKLVDSTDKADLRLIYLALAHMIKFRGHFLIEGDLNPDNSDVDKLFIQLVQTYNQLFEENPINASGVDAKAILSARLSKSRRLENLIAQLPGEKKNGLFGNLIALSLGLTPNFKSNFDLAEDAKLQLSKDTYDDDLDNLLAQIGDQYADLFLAAKNLSDAILLSDILRVNTEITKAPLSASMIKRYDEHHQDLTLLKALVRQQLPEKYKEIFFDQSKNGYAGYIDGGASQEEFYKFIKPILEKMDGTEELLVKLNREDLLRKQRTFDNGSIPHQIHLGELHAILRRQEDFYPFLKDNREKIEKILTFRIPYYVGPLARGNSRFAWMTRKSEETITPWNFEEVVDKGASAQSFIERMTNFDKNLPNEKVLPKHSLLYEYFTVYNELTKVKYVTEGMRKPAFLSGEQKKAIVDLLFKTNRKVTVKQLKEDYFKKIECFDSVEISGVEDRFNASLGTYHDLLKIIKDKDFLDNEENEDILEDIVLTLTLFEDREMIEERLKTYAHLFDDKVMKQLKRRRYTGWGRLSRKLINGIRDKQSGKTILDFLKSDGFANRNFMQLIHDDSLTFKEDIQKAQVSGQGDSLHEHIANLAGSPAIKKGILQTVKVVDELVKVMGRHKPENIVIEMARENQTTQKGQKNSRERMKRIEEGIKELGSQILKEHPVENTQLQNEKLYLYYLQNGRDMYVDQELDINRLSDYDVDHIVPQSFLKDDSIDNKVLTRSDKARGKSDNVPSEEVVKKMKNYWRQLLNAKLITQRKFDNLTKAERGGLSELDKAGFIKRQLVETRQITKHVAQILDSRMNTKYDENDKLIREVKVITLKSKLVSDFRKDFQFYKVREINNYHHAHDAYLNAVVGTALIKKYPKLESEFVYGDYKVYDVRKMIAKSEQEIGKATAKYFFYSNIMNFFKTEITLANGEIRKRPLIETNGETGEIVWDKGRDFATVRKVLSMPQVNIVKKTEVQTGGFSKESILPKRNSDKLIARKKDWDPKKYGGFDSPTVAYSVLVVAKVEKGKSKKLKSVKELLGITIMERSSFEKNPIDFLEAKGYKEVKKDLIIKLPKYSLFELENGRKRMLASAGELQKGNELALPSKYVNFLYLASHYEKLKGSPEDNEQKQLFVEQHKHYLDEIIEQISEFSKRVILADANLDKVLSAYNKHRDKPIREQAENIIHLFTLTNLGAPAAFKYFDTTIDRKRYTSTKEVLDATLIHQSITGLYETRIDLSQLGGDGGGGGEAAAKGGSGGTLNIEDEYRLHETSKGPDVPLGSTWLSDFPQAWAETGGMGLAVRQAPLIIPLKATSTPVSIKQYPMSQEARLGIKPHIQRLLDQGILVPCQSPWNTPLLPVKKPGTNDYRPVQDLREVNKRVEDIHPTVPNPYNLLSGLPPSHQWYTVLDLKDAFFCLRLHPTSQSLFAFEWRDPEMGISGQLTWTRLPQGFKNSPTLFNEALHRDLADFRIQHPDLILLQYVDDLLLAATSELDCQQGTRALLQTLGDLGYRASAKKAQICQKQVKYLGYLLKEGQRWLTEARKETVMGQPTPKTPRQLREFLGKAGFCRLFIPGFAEMAAPLYPLTKPGTLFEWGPDQQKAYQEIKQALLTAPALGLPDLTKPFELFVDEKQGYAKGVLTQKLGPWRRPVAYLSKKLDPVAAGWPPCLRMVAAIAVLTKDAGKLTMGQPLVILAPHAVEALVKQPPDRWLSNARMTHYQALLLDTDRVQFGPIVALNPATLLPLPEEGLQHDCLDILAEAHGTRPDLTDQPLPDADHTWYTDGSSFLQEGQRKAGAAVTTETEVVWAKALPAGTSAQRAELIALTQALKMAEGKKLNVYTDSRYAFATAHIHGEIYRRRGWLTSEGKEIKNKDEILALLKALFLPKRLSIIHCPGHQKGNRAEARGNRMADQAAREVATRETPETSTLLAGKRTADGSEFEKRTADGSEFESPKKKAKVE

SEQ ID NO: 2522-2524 - skipped (3 entries)

SEQ ID NO: 2525 - protein, 2094 aa, synthetic construct
MPAAKRVKLDGGDKKYSIGLDIGTNSVGWAVITDEYKVPSKKFKVLGNTDRHSIKKNLIGALLFDSGETAEATRLKRTARRRYTRRKNRICYLQEIFSNEMAKVDDSFFHRLEESFLVEEDKKHERHPIFGNIVDEVAYHEKYPTIYHLRKKLVDSTDKADLRLIYLALAHMIKFRGHFLIEGDLNPDNSDVDKLFIQLVQTYNQLFEENPINASGVDAKAILSARLSKSRRLENLIAQLPGEKKNGLFGNLIALSLGLTPNFKSNFDLAEDAKLQLSKDTYDDDLDNLLAQIGDQYADLFLAAKNLSDAILLSDILRVNTEITKAPLSASMIKRYDEHHQDLTLLKALVRQQLPEKYKEIFFDQSKNGYAGYIDGGASQEEFYKFIKPILEKMDGTEELLVKLNREDLLRKQRTFDNGSIPHQIHLGELHAILRRQEDFYPFLKDNREKIEKILTFRIPYYVGPLARGNSRFAWMTRKSEETITPWNFEEVVDKGASAQSFIERMTNFDKNLPNEKVLPKHSLLYEYFTVYNELTKVKYVTEGMRKPAFLSGEQKKAIVDLLFKTNRKVTVKQLKEDYFKKIECFDSVEISGVEDRFNASLGTYHDLLKIIKDKDFLDNEENEDILEDIVLTLTLFEDREMIEERLKTYAHLFDDKVMKQLKRRRYTGWGRLSRKLINGIRDKQSGKTILDFLKSDGFANRNFMQLIHDDSLTFKEDIQKAQVSGQGDSLHEHIANLAGSPAIKKGILQTVKVVDELVKVMGRHKPENIVIEMARENQTTQKGQKNSRERMKRIEEGIKELGSQILKEHPVENTQLQNEKLYLYYLQNGRDMYVDQELDINRLSDYDVDHIVPQSFLKDDSIDNKVLTRSDKARGKSDNVPSEEVVKKMKNYWRQLLNAKLITQRKFDNLTKAERGGLSELDKAGFIKRQLVETRQITKHVAQILDSRMNTKYDENDKLIREVKVITLKSKLVSDFRKDFQFYKVREINNYHHAHDAYLNAVVGTALIKKYPKLESEFVYGDYKVYDVRKMIAKSEQEIGKATAKYFFYSNIMNFFKTEITLANGEIRKRPLIETNGETGEIVWDKGRDFATVRKVLSMPQVNIVKKTEVQTGGFSKESILPKRNSDKLIARKKDWDPKKYGGFDSPTVAYSVLVVAKVEKGKSKKLKSVKELLGITIMERSSFEKNPIDFLEAKGYKEVKKDLIIKLPKYSLFELENGRKRMLASAGELQKGNELALPSKYVNFLYLASHYEKLKGSPEDNEQKQLFVEQHKHYLDEIIEQISEFSKRVILADANLDKVLSAYNKHRDKPIREQAENIIHLFTLTNLGAPAAFKYFDTTIDRKRYTSTKEVLDATLIHQSITGLYETRIDLSQLGGDGGPAPAPAPAPGGTLNIEDEYRLHETSKGPDVPLGSTWLSDFPQAWAETGGMGLAVRQAPLIIPLKATSTPVSIKQYPMSQEARLGIKPHIQRLLDQGILVPCQSPWNTPLLPVKKPGTNDYRPVQDLREVNKRVEDIHPTVPNPYNLLSGLPPSHQWYTVLDLKDAFFCLRLHPTSQSLFAFEWRDPEMGISGQLTWTRLPQGFKNSPTLFNEALHRDLADFRIQHPDLILLQYVDDLLLAATSELDCQQGTRALLQTLGDLGYRASAKKAQICQKQVKYLGYLLKEGQRWLTEARKETVMGQPTPKTPRQLREFLGKAGFCRLFIPGFAEMAAPLYPLTKPGTLFEWGPDQQKAYQEIKQALLTAPALGLPDLTKPFELFVDEKQGYAKGVLTQKLGPWRRPVAYLSKKLDPVAAGWPPCLRMVAAIAVLTKDAGKLTMGQPLVILAPHAVEALVKQPPDRWLSNARMTHYQALLLDTDRVQFGPIVALNPATLLPLPEEGLQHDCLDILAEAHGTRPDLTDQPLPDADHTWYTDGSSFLQEGQRKAGAAVTTETEVVWAKALPAGTSAQRAELIALTQALKMAEGKKLNVYTDSRYAFATAHIHGEIYRRRGWLTSEGKEIKNKDEILALLKALFLPKRLSIIHCPGHQKGNRAEARGNRMADQAAREVATRETPETSTLLAGKRTADGSEFEKRTADGSEFESPKKKAKVE

SEQ ID NO: 2526 - protein, 2096 aa, synthetic construct
MPAAKRVKLDGGDKKYSIGLDIGTNSVGWAVITDEYKVPSKKFKVLGNTDRHSIKKNLIGALLFDSGETAEATRLKRTARRRYTRRKNRICYLQEIFSNEMAKVDDSFFHRLEESFLVEEDKKHERHPIFGNIVDEVAYHEKYPTIYHLRKKLVDSTDKADLRLIYLALAHMIKFRGHFLIEGDLNPDNSDVDKLFIQLVQTYNQLFEENPINASGVDAKAILSARLSKSRRLENLIAQLPGEKKNGLFGNLIALSLGLTPNFKSNFDLAEDAKLQLSKDTYDDDLDNLLAQIGDQYADLFLAAKNLSDAILLSDILRVNTEITKAPLSASMIKRYDEHHQDLTLLKALVRQQLPEKYKEIFFDQSKNGYAGYIDGGASQEEFYKFIKPILEKMDGTEELLVKLNREDLLRKQRTFDNGSIPHQIHLGELHAILRRQEDFYPFLKDNREKIEKILTFRIPYYVGPLARGNSRFAWMTRKSEETITPWNFEEVVDKGASAQSFIERMTNFDKNLPNEKVLPKHSLLYEYFTVYNELTKVKYVTEGMRKPAFLSGEQKKAIVDLLFKTNRKVTVKQLKEDYFKKIECFDSVEISGVEDRFNASLGTYHDLLKIIKDKDFLDNEENEDILEDIVLTLTLFEDREMIEERLKTYAHLFDDKVMKQLKRRRYTGWGRLSRKLINGIRDKQSGKTILDFLKSDGFANRNFMQLIHDDSLTFKEDIQKAQVSGQGDSLHEHIANLAGSPAIKKGILQTVKVVDELVKVMGRHKPENIVIEMARENQTTQKGQKNSRERMKRIEEGIKELGSQILKEHPVENTQLQNEKLYLYYLQNGRDMYVDQELDINRLSDYDVDHIVPQSFLKDDSIDNKVLTRSDKARGKSDNVPSEEVVKKMKNYWRQLLNAKLITQRKFDNLTKAERGGLSELDKAGFIKRQLVETRQITKHVAQILDSRMNTKYDENDKLIREVKVITLKSKLVSDFRKDFQFYKVREINNYHHAHDAYLNAVVGTALIKKYPKLESEFVYGDYKVYDVRKMIAKSEQEIGKATAKYFFYSNIMNFFKTEITLANGEIRKRPLIETNGETGEIVWDKGRDFATVRKVLSMPQVNIVKKTEVQTGGFSKESILPKRNSDKLIARKKDWDPKKYGGFDSPTVAYSVLVVAKVEKGKSKKLKSVKELLGITIMERSSFEKNPIDFLEAKGYKEVKKDLIIKLPKYSLFELENGRKRMLASAGELQKGNELALPSKYVNFLYLASHYEKLKGSPEDNEQKQLFVEQHKHYLDEIIEQISEFSKRVILADANLDKVLSAYNKHRDKPIREQAENIIHLFTLTNLGAPAAFKYFDTTIDRKRYTSTKEVLDATLIHQSITGLYETRIDLSQLGGDGGGGGEAAAKPAPGGTLNIEDEYRLHETSKGPDVPLGSTWLSDFPQAWAETGGMGLAVRQAPLIIPLKATSTPVSIKQYPMSQEARLGIKPHIQRLLDQGILVPCQSPWNTPLLPVKKPGTNDYRPVQDLREVNKRVEDIHPTVPNPYNLLSGLPPSHQWYTVLDLKDAFFCLRLHPTSQSLFAFEWRDPEMGISGQLTWTRLPQGFKNSPTLFNEALHRDLADFRIQHPDLILLQYVDDLLLAATSELDCQQGTRALLQTLGDLGYRASAKKAQICQKQVKYLGYLLKEGQRWLTEARKETVMGQPTPKTPRQLREFLGKAGFCRLFIPGFAEMAAPLYPLTKPGTLFEWGPDQQKAYQEIKQALLTAPALGLPDLTKPFELFVDEKQGYAKGVLTQKLGPWRRPVAYLSKKLDPVAAGWPPCLRMVAAIAVLTKDAGKLTMGQPLVILAPHAVEALVKQPPDRWLSNARMTHYQALLLDTDRVQFGPIVALNPATLLPLPEEGLQHDCLDILAEAHGTRPDLTDQPLPDADHTWYTDGSSFLQEGQRKAGAAVTTETEVVWAKALPAGTSAQRAELIALTQALKMAEGKKLNVYTDSRYAFATAHIHGEIYRRRGWLTSEGKEIKNKDEILALLKALFLPKRLSIIHCPGHQKGNRAEARGNRMADQAAREVATRETPETSTLLAGKRTADGSEFEKRTADGSEFESPKKKAKVE

SEQ ID NO: 2527 - protein, 2096 aa, synthetic construct
MPAAKRVKLDGGDKKYSIGLDIGTNSVGWAVITDEYKVPSKKFKVLGNTDRHSIKKNLIGALLFDSGETAEATRLKRTARRRYTRRKNRICYLQEIFSNEMAKVDDSFFHRLEESFLVEEDKKHERHPIFGNIVDEVAYHEKYPTIYHLRKKLVDSTDKADLRLIYLALAHMIKFRGHFLIEGDLNPDNSDVDKLFIQLVQTYNQLFEENPINASGVDAKAILSARLSKSRRLENLIAQLPGEKKNGLFGNLIALSLGLTPNFKSNFDLAEDAKLQLSKDTYDDDLDNLLAQIGDQYADLFLAAKNLSDAILLSDILRVNTEITKAPLSASMIKRYDEHHQDLTLLKALVRQQLPEKYKEIFFDQSKNGYAGYIDGGASQEEFYKFIKPILEKMDGTEELLVKLNREDLLRKQRTFDNGSIPHQIHLGELHAILRRQEDFYPFLKDNREKIEKILTFRIPYYVGPLARGNSRFAWMTRKSEETITPWNFEEVVDKGASAQSFIERMTNFDKNLPNEKVLPKHSLLYEYFTVYNELTKVKYVTEGMRKPAFLSGEQKKAIVDLLFKTNRKVTVKQLKEDYFKKIECFDSVEISGVEDRFNASLGTYHDLLKIIKDKDFLDNEENEDILEDIVLTLTLFEDREMIEERLKTYAHLFDDKVMKQLKRRRYTGWGRLSRKLINGIRDKQSGKTILDFLKSDGFANRNFMQLIHDDSLTFKEDIQKAQVSGQGDSLHEHIANLAGSPAIKKGILQTVKVVDELVKVMGRHKPENIVIEMARENQTTQKGQKNSRERMKRIEEGIKELGSQILKEHPVENTQLQNEKLYLYYLQNGRDMYVDQELDINRLSDYDVDHIVPQSFLKDDSIDNKVLTRSDKARGKSDNVPSEEVVKKMKNYWRQLLNAKLITQRKFDNLTKAERGGLSELDKAGFIKRQLVETRQITKHVAQILDSRMNTKYDENDKLIREVKVITLKSKLVSDFRKDFQFYKVREINNYHHAHDAYLNAVVGTALIKKYPKLESEFVYGDYKVYDVRKMIAKSEQEIGKATAKYFFYSNIMNFFKTEITLANGEIRKRPLIETNGETGEIVWDKGRDFATVRKVLSMPQVNIVKKTEVQTGGFSKESILPKRNSDKLIARKKDWDPKKYGGFDSPTVAYSVLVVAKVEKGKSKKLKSVKELLGITIMERSSFEKNPIDFLEAKGYKEVKKDLIIKLPKYSLFELENGRKRMLASAGELQKGNELALPSKYVNFLYLASHYEKLKGSPEDNEQKQLFVEQHKHYLDEIIEQISEFSKRVILADANLDKVLSAYNKHRDKPIREQAENIIHLFTLTNLGAPAAFKYFDTTIDRKRYTSTKEVLDATLIHQSITGLYETRIDLSQLGGDGGGGSPAPEAAAKGGTLNIEDEYRLHETSKGPDVPLGSTWLSDFPQAWAETGGMGLAVRQAPLIIPLKATSTPVSIKQYPMSQEARLGIKPHIQRLLDQGILVPCQSPWNTPLLPVKKPGTNDYRPVQDLREVNKRVEDIHPTVPNPYNLLSGLPPSHQWYTVLDLKDAFFCLRLHPTSQSLFAFEWRDPEMGISGQLTWTRLPQGFKNSPTLFNEALHRDLADFRIQHPDLILLQYVDDLLLAATSELDCQQGTRALLQTLGDLGYRASAKKAQICQKQVKYLGYLLKEGQRWLTEARKETVMGQPTPKTPRQLREFLGKAGFCRLFIPGFAEMAAPLYPLTKPGTLFEWGPDQQKAYQEIKQALLTAPALGLPDLTKPFELFVDEKQGYAKGVLTQKLGPWRRPVAYLSKKLDPVAAGWPPCLRMVAAIAVLTKDAGKLTMGQPLVILAPHAVEALVKQPPDRWLSNARMTHYQALLLDTDRVQFGPIVALNPATLLPLPEEGLQHDCLDILAEAHGTRPDLTDQPLPDADHTWYTDGSSFLQEGQRKAGAAVTTETEVVWAKALPAGTSAQRAELIALTQALKMAEGKKLNVYTDSRYAFATAHIHGEIYRRRGWLTSEGKEIKNKDEILALLKALFLPKRLSIIHCPGHQKGNRAEARGNRMADQAAREVATRETPETSTLLAGKRTADGSEFEKRTADGSEFESPKKKAKVE

SEQ ID NO: 2528 - protein, 2100 aa, synthetic construct
MPAAKRVKLDGGDKKYSIGLDIGTNSVGWAVITDEYKVPSKKFKVLGNTDRHSIKKNLIGALLFDSGETAEATRLKRTARRRYTRRKNRICYLQEIFSNEMAKVDDSFFHRLEESFLVEEDKKHERHPIFGNIVDEVAYHEKYPTIYHLRKKLVDSTDKADLRLIYLALAHMIKFRGHFLIEGDLNPDNSDVDKLFIQLVQTYNQLFEENPINASGVDAKAILSARLSKSRRLENLIAQLPGEKKNGLFGNLIALSLGLTPNFKSNFDLAEDAKLQLSKDTYDDDLDNLLAQIGDQYADLFLAAKNLSDAILLSDILRVNTEITKAPLSASMIKRYDEHHQDLTLLKALVRQQLPEKYKEIFFDQSKNGYAGYIDGGASQEEFYKFIKPILEKMDGTEELLVKLNREDLLRKQRTFDNGSIPHQIHLGELHAILRRQEDFYPFLKDNREKIEKILTFRIPYYVGPLARGNSRFAWMTRKSEETITPWNFEEVVDKGASAQSFIERMTNFDKNLPNEKVLPKHSLLYEYFTVYNELTKVKYVTEGMRKPAFLSGEQKKAIVDLLFKTNRKVTVKQLKEDYFKKIECFDSVEISGVEDRFNASLGTYHDLLKIIKDKDFLDNEENEDILEDIVLTLTLFEDREMIEERLKTYAHLFDDKVMKQLKRRRYTGWGRLSRKLINGIRDKQSGKTILDFLKSDGFANRNFMQLIHDDSLTFKEDIQKAQVSGQGDSLHEHIANLAGSPAIKKGILQTVKVVDELVKVMGRHKPENIVIEMARENQTTQKGQKNSRERMKRIEEGIKELGSQILKEHPVENTQLQNEKLYLYYLQNGRDMYVDQELDINRLSDYDVDHIVPQSFLKDDSIDNKVLTRSDKARGKSDNVPSEEVVKKMKNYWRQLLNAKLITQRKFDNLTKAERGGLSELDKAGFIKRQLVETRQITKHVAQILDSRMNTKYDENDKLIREVKVITLKSKLVSDFRKDFQFYKVREINNYHHAHDAYLNAVVGTALIKKYPKLESEFVYGDYKVYDVRKMIAKSEQEIGKATAKYFFYSNIMNFFKTEITLANGEIRKRPLIETNGETGEIVWDKGRDFATVRKVLSMPQVNIVKKTEVQTGGFSKESILPKRNSDKLIARKKDWDPKKYGGFDSPTVAYSVLVVAKVEKGKSKKLKSVKELLGITIMERSSFEKNPIDFLEAKGYKEVKKDLIIKLPKYSLFELENGRKRMLASAGELQKGNELALPSKYVNFLYLASHYEKLKGSPEDNEQKQLFVEQHKHYLDEIIEQISEFSKRVILADANLDKVLSAYNKHRDKPIREQAENIIHLFTLTNLGAPAAFKYFDTTIDRKRYTSTKEVLDATLIHQSITGLYETRIDLSQLGGDGGGGGGSEAAAKGGGGSGGTLNIEDEYRLHETSKGPDVPLGSTWLSDFPQAWAETGGMGLAVRQAPLIIPLKATSTPVSIKQYPMSQEARLGIKPHIQRLLDQGILVPCQSPWNTPLLPVKKPGTNDYRPVQDLREVNKRVEDIHPTVPNPYNLLSGLPPSHQWYTVLDLKDAFFCLRLHPTSQSLFAFEWRDPEMGISGQLTWTRLPQGFKNSPTLFNEALHRDLADFRIQHPDLILLQYVDDLLLAATSELDCQQGTRALLQTLGDLGYRASAKKAQICQKQVKYLGYLLKEGQRWLTEARKETVMGQPTPKTPRQLREFLGKAGFCRLFIPGFAEMAAPLYPLTKPGTLFEWGPDQQKAYQEIKQALLTAPALGLPDLTKPFELFVDEKQGYAKGVLTQKLGPWRRPVAYLSKKLDPVAAGWPPCLRMVAAIAVLTKDAGKLTMGQPLVILAPHAVEALVKQPPDRWLSNARMTHYQALLLDTDRVQFGPIVALNPATLLPLPEEGLQHDCLDILAEAHGTRPDLTDQPLPDADHTWYTDGSSFLQEGQRKAGAAVTTETEVVWAKALPAGTSAQRAELIALTQALKMAEGKKLNVYTDSRYAFATAHIHGEIYRRRGWLTSEGKEIKNKDEILALLKALFLPKRLSIIHCPGHQKGNRAEARGNRMADQAAREVATRETPETSTLLAGKRTADGSEFEKRTADGSEFESPKKKAKVE

SEQ ID NO: 2529 - protein, 2131 aa, synthetic construct
MPAAKRVKLDGGDKKYSIGLDIGTNSVGWAVITDEYKVPSKKFKVLGNTDRHSIKKNLIGALLFDSGETAEATRLKRTARRRYTRRKNRICYLQEIFSNEMAKVDDSFFHRLEESFLVEEDKKHERHPIFGNIVDEVAYHEKYPTIYHLRKKLVDSTDKADLRLIYLALAHMIKFRGHFLIEGDLNPDNSDVDKLFIQLVQTYNQLFEENPINASGVDAKAILSARLSKSRRLENLIAQLPGEKKNGLFGNLIALSLGLTPNFKSNFDLAEDAKLQLSKDTYDDDLDNLLAQIGDQYADLFLAAKNLSDAILLSDILRVNTEITKAPLSASMIKRYDEHHQDLTLLKALVRQQLPEKYKEIFFDQSKNGYAGYIDGGASQEEFYKFIKPILEKMDGTEELLVKLNREDLLRKQRTFDNGSIPHQIHLGELHAILRRQEDFYPFLKDNREKIEKILTFRIPYYVGPLARGNSRFAWMTRKSEETITPWNFEEVVDKGASAQSFIERMTNFDKNLPNEKVLPKHSLLYEYFTVYNELTKVKYVTEGMRKPAFLSGEQKKAIVDLLFKTNRKVTVKQLKEDYFKKIECFDSVEISGVEDRFNASLGTYHDLLKIIKDKDFLDNEENEDILEDIVLTLTLFEDREMIEERLKTYAHLFDDKVMKQLKRRRYTGWGRLSRKLINGIRDKQSGKTILDFLKSDGFANRNFMQLIHDDSLTFKEDIQKAQVSGQGDSLHEHIANLAGSPAIKKGILQTVKVVDELVKVMGRHKPENIVIEMARENQTTQKGQKNSRERMKRIEEGIKELGSQILKEHPVENTQLQNEKLYLYYLQNGRDMYVDQELDINRLSDYDVDHIVPQSFLKDDSIDNKVLTRSDKARGKSDNVPSEEVVKKMKNYWRQLLNAKLITQRKFDNLTKAERGGLSELDKAGFIKRQLVETRQITKHVAQILDSRMNTKYDENDKLIREVKVITLKSKLVSDFRKDFQFYKVREINNYHHAHDAYLNAVVGTALIKKYPKLESEFVYGDYKVYDVRKMIAKSEQEIGKATAKYFFYSNIMNFFKTEITLANGEIRKRPLIETNGETGEIVWDKGRDFATVRKVLSMPQVNIVKKTEVQTGGFSKESILPKRNSDKLIARKKDWDPKKYGGFDSPTVAYSVLVVAKVEKGKSKKLKSVKELLGITIMERSSFEKNPIDFLEAKGYKEVKKDLIIKLPKYSLFELENGRKRMLASAGELQKGNELALPSKYVNFLYLASHYEKLKGSPEDNEQKQLFVEQHKHYLDEIIEQISEFSKRVILADANLDKVLSAYNKHRDKPIREQAENIIHLFTLTNLGAPAAFKYFDTTIDRKRYTSTKEVLDATLIHQSITGLYETRIDLSQLGGDGGAEAAAKEAAAKEAAAKEAAAKALEAEAAAKEAAAKEAAAKEAAAKAGGTLNIEDEYRLHETSKGPDVPLGSTWLSDFPQAWAETGGMGLAVRQAPLIIPLKATSTPVSIKQYPMSQEARLGIKPHIQRLLDQGILVPCQSPWNTPLLPVKKPGTNDYRPVQDLREVNKRVEDIHPTVPNPYNLLSGLPPSHQWYTVLDLKDAFFCLRLHPTSQSLFAFEWRDPEMGISGQLTWTRLPQGFKNSPTLFNEALHRDLADFRIQHPDLILLQYVDDLLLAATSELDCQQGTRALLQTLGDLGYRASAKKAQICQKQVKYLGYLLKEGQRWLTEARKETVMGQPTPKTPRQLREFLGKAGFCRLFIPGFAEMAAPLYPLTKPGTLFEWGPDQQKAYQEIKQALLTAPALGLPDLTKPFELFVDEKQGYAKGVLTQKLGPWRRPVAYLSKKLDPVAAGWPPCLRMVAAIAVLTKDAGKLTMGQPLVILAPHAVEALVKQPPDRWLSNARMTHYQALLLDTDRVQFGPIVALNPATLLPLPEEGLQHDCLDILAEAHGTRPDLTDQPLPDADHTWYTDGSSFLQEGQRKAGAAVTTETEVVWAKALPAGTSAQRAELIALTQALKMAEGKKLNVYTDSRYAFATAHIHGEIYRRRGWLTSEGKEIKNKDEILALLKALFLPKRLSIIHCPGHQKGNRAEARGNRMADQAAREVATRETPETSTLLAGKRTADGSEFEKRTADGSEFESPKKKAKVE

SEQ ID NO: 2530 - protein, 2096 aa, synthetic construct
MPAAKRVKLDGGDKKYSIGLDIGTNSVGWAVITDEYKVPSKKFKVLGNTDRHSIKKNLIGALLFDSGETAEATRLKRTARRRYTRRKNRICYLQEIFSNEMAKVDDSFFHRLEESFLVEEDKKHERHPIFGNIVDEVAYHEKYPTIYHLRKKLVDSTDKADLRLIYLALAHMIKFRGHFLIEGDLNPDNSDVDKLFIQLVQTYNQLFEENPINASGVDAKAILSARLSKSRRLENLIAQLPGEKKNGLFGNLIALSLGLTPNFKSNFDLAEDAKLQLSKDTYDDDLDNLLAQIGDQYADLFLAAKNLSDAILLSDILRVNTEITKAPLSASMIKRYDEHHQDLTLLKALVRQQLPEKYKEIFFDQSKNGYAGYIDGGASQEEFYKFIKPILEKMDGTEELLVKLNREDLLRKQRTFDNGSIPHQIHLGELHAILRRQEDFYPFLKDNREKIEKILTFRIPYYVGPLARGNSRFAWMTRKSEETITPWNFEEVVDKGASAQSFIERMTNFDKNLPNEKVLPKHSLLYEYFTVYNELTKVKYVTEGMRKPAFLSGEQKKAIVDLLFKTNRKVTVKQLKEDYFKKIECFDSVEISGVEDRFNASLGTYHDLLKIIKDKDFLDNEENEDILEDIVLTLTLFEDREMIEERLKTYAHLFDDKVMKQLKRRRYTGWGRLSRKLINGIRDKQSGKTILDFLKSDGFANRNFMQLIHDDSLTFKEDIQKAQVSGQGDSLHEHIANLAGSPAIKKGILQTVKVVDELVKVMGRHKPENIVIEMARENQTTQKGQKNSRERMKRIEEGIKELGSQILKEHPVENTQLQNEKLYLYYLQNGRDMYVDQELDINRLSDYDVDHIVPQSFLKDDSIDNKVLTRSDKARGKSDNVPSEEVVKKMKNYWRQLLNAKLITQRKFDNLTKAERGGLSELDKAGFIKRQLVETRQITKHVAQILDSRMNTKYDENDKLIREVKVITLKSKLVSDFRKDFQFYKVREINNYHHAHDAYLNAVVGTALIKKYPKLESEFVYGDYKVYDVRKMIAKSEQEIGKATAKYFFYSNIMNFFKTEITLANGEIRKRPLIETNGETGEIVWDKGRDFATVRKVLSMPQVNIVKKTEVQTGGFSKESILPKRNSDKLIARKKDWDPKKYGGFDSPTVAYSVLVVAKVEKGKSKKLKSVKELLGITIMERSSFEKNPIDFLEAKGYKEVKKDLIIKLPKYSLFELENGRKRMLASAGELQKGNELALPSKYVNFLYLASHYEKLKGSPEDNEQKQLFVEQHKHYLDEIIEQISEFSKRVILADANLDKVLSAYNKHRDKPIREQAENIIHLFTLTNLGAPAAFKYFDTTIDRKRYTSTKEVLDATLIHQSITGLYETRIDLSQLGGDGGGGSEAAAKPAPGGTLNIEDEYRLHETSKGPDVPLGSTWLSDFPQAWAETGGMGLAVRQAPLIIPLKATSTPVSIKQYPMSQEARLGIKPHIQRLLDQGILVPCQSPWNTPLLPVKKPGTNDYRPVQDLREVNKRVEDIHPTVPNPYNLLSGLPPSHQWYTVLDLKDAFFCLRLHPTSQSLFAFEWRDPEMGISGQLTWTRLPQGFKNSPTLFNEALHRDLADFRIQHPDLILLQYVDDLLLAATSELDCQQGTRALLQTLGDLGYRASAKKAQICQKQVKYLGYLLKEGQRWLTEARKETVMGQPTPKTPRQLREFLGKAGFCRLFIPGFAEMAAPLYPLTKPGTLFEWGPDQQKAYQEIKQALLTAPALGLPDLTKPFELFVDEKQGYAKGVLTQKLGPWRRPVAYLSKKLDPVAAGWPPCLRMVAAIAVLTKDAGKLTMGQPLVILAPHAVEALVKQPPDRWLSNARMTHYQALLLDTDRVQFGPIVALNPATLLPLPEEGLQHDCLDILAEAHGTRPDLTDQPLPDADHTWYTDGSSFLQEGQRKAGAAVTTETEVVWAKALPAGTSAQRAELIALTQALKMAEGKKLNVYTDSRYAFATAHIHGEIYRRRGWLTSEGKEIKNKDEILALLKALFLPKRLSIIHCPGHQKGNRAEARGNRMADQAAREVATRETPETSTLLAGKRTADGSEFEKRTADGSEFESPKKKAKVE

SEQ ID NO: 2531 - protein, 2094 aa, synthetic construct
MPAAKRVKLDGGDKKYSIGLDIGTNSVGWAVITDEYKVPSKKFKVLGNTDRHSIKKNLIGALLFDSGETAEATRLKRTARRRYTRRKNRICYLQEIFSNEMAKVDDSFFHRLEESFLVEEDKKHERHPIFGNIVDEVAYHEKYPTIYHLRKKLVDSTDKADLRLIYLALAHMIKFRGHFLIEGDLNPDNSDVDKLFIQLVQTYNQLFEENPINASGVDAKAILSARLSKSRRLENLIAQLPGEKKNGLFGNLIALSLGLTPNFKSNFDLAEDAKLQLSKDTYDDDLDNLLAQIGDQYADLFLAAKNLSDAILLSDILRVNTEITKAPLSASMIKRYDEHHQDLTLLKALVRQQLPEKYKEIFFDQSKNGYAGYIDGGASQEEFYKFIKPILEKMDGTEELLVKLNREDLLRKQRTFDNGSIPHQIHLGELHAILRRQEDFYPFLKDNREKIEKILTFRIPYYVGPLARGNSRFAWMTRKSEETITPWNFEEVVDKGASAQSFIERMTNFDKNLPNEKVLPKHSLLYEYFTVYNELTKVKYVTEGMRKPAFLSGEQKKAIVDLLFKTNRKVTVKQLKEDYFKKIECFDSVEISGVEDRFNASLGTYHDLLKIIKDKDFLDNEENEDILEDIVLTLTLFEDREMIEERLKTYAHLFDDKVMKQLKRRRYTGWGRLSRKLINGIRDKQSGKTILDFLKSDGFANRNFMQLIHDDSLTFKEDIQKAQVSGQGDSLHEHIANLAGSPAIKKGILQTVKVVDELVKVMGRHKPENIVIEMARENQTTQKGQKNSRERMKRIEEGIKELGSQILKEHPVENTQLQNEKLYLYYLQNGRDMYVDQELDINRLSDYDVDHIVPQSFLKDDSIDNKVLTRSDKARGKSDNVPSEEVVKKMKNYWRQLLNAKLITQRKFDNLTKAERGGLSELDKAGFIKRQLVETRQITKHVAQILDSRMNTKYDENDKLIREVKVITLKSKLVSDFRKDFQFYKVREINNYHHAHDAYLNAVVGTALIKKYPKLESEFVYGDYKVYDVRKMIAKSEQEIGKATAKYFFYSNIMNFFKTEITLANGEIRKRPLIETNGETGEIVWDKGRDFATVRKVLSMPQVNIVKKTEVQTGGFSKESILPKRNSDKLIARKKDWDPKKYGGFDSPTVAYSVLVVAKVEKGKSKKLKSVKELLGITIMERSSFEKNPIDFLEAKGYKEVKKDLIIKLPKYSLFELENGRKRMLASAGELQKGNELALPSKYVNFLYLASHYEKLKGSPEDNEQKQLFVEQHKHYLDEIIEQISEFSKRVILADANLDKVLSAYNKHRDKPIREQAENIIHLFTLTNLGAPAAFKYFDTTIDRKRYTSTKEVLDATLIHQSITGLYETRIDLSQLGGDGGPAPGSSGGGGGTLNIEDEYRLHETSKGPDVPLGSTWLSDFPQAWAETGGMGLAVRQAPLIIPLKATSTPVSIKQYPMSQEARLGIKPHIQRLLDQGILVPCQSPWNTPLLPVKKPGTNDYRPVQDLREVNKRVEDIHPTVPNPYNLLSGLPPSHQWYTVLDLKDAFFCLRLHPTSQSLFAFEWRDPEMGISGQLTWTRLPQGFKNSPTLFNEALHRDLADFRIQHPDLILLQYVDDLLLAATSELDCQQGTRALLQTLGDLGYRASAKKAQICQKQVKYLGYLLKEGQRWLTEARKETVMGQPTPKTPRQLREFLGKAGFCRLFIPGFAEMAAPLYPLTKPGTLFEWGPDQQKAYQEIKQALLTAPALGLPDLTKPFELFVDEKQGYAKGVLTQKLGPWRRPVAYLSKKLDPVAAGWPPCLRMVAAIAVLTKDAGKLTMGQPLVILAPHAVEALVKQPPDRWLSNARMTHYQALLLDTDRVQFGPIVALNPATLLPLPEEGLQHDCLDILAEAHGTRPDLTDQPLPDADHTWYTDGSSFLQEGQRKAGAAVTTETEVVWAKALPAGTSAQRAELIALTQALKMAEGKKLNVYTDSRYAFATAHIHGEIYRRRGWLTSEGKEIKNKDEILALLKALFLPKRLSIIHCPGHQKGNRAEARGNRMADQAAREVATRETPETSTLLAGKRTADGSEFEKRTADGSEFESPKKKAKVE

SEQ ID NO: 2532-2533 - skipped (2 entries)

SEQ ID NO: 2534 - protein, 2098 aa, synthetic construct
MPAAKRVKLDGGDKKYSIGLDIGTNSVGWAVITDEYKVPSKKFKVLGNTDRHSIKKNLIGALLFDSGETAEATRLKRTARRRYTRRKNRICYLQEIFSNEMAKVDDSFFHRLEESFLVEEDKKHERHPIFGNIVDEVAYHEKYPTIYHLRKKLVDSTDKADLRLIYLALAHMIKFRGHFLIEGDLNPDNSDVDKLFIQLVQTYNQLFEENPINASGVDAKAILSARLSKSRRLENLIAQLPGEKKNGLFGNLIALSLGLTPNFKSNFDLAEDAKLQLSKDTYDDDLDNLLAQIGDQYADLFLAAKNLSDAILLSDILRVNTEITKAPLSASMIKRYDEHHQDLTLLKALVRQQLPEKYKEIFFDQSKNGYAGYIDGGASQEEFYKFIKPILEKMDGTEELLVKLNREDLLRKQRTFDNGSIPHQIHLGELHAILRRQEDFYPFLKDNREKIEKILTFRIPYYVGPLARGNSRFAWMTRKSEETITPWNFEEVVDKGASAQSFIERMTNFDKNLPNEKVLPKHSLLYEYFTVYNELTKVKYVTEGMRKPAFLSGEQKKAIVDLLFKTNRKVTVKQLKEDYFKKIECFDSVEISGVEDRFNASLGTYHDLLKIIKDKDFLDNEENEDILEDIVLTLTLFEDREMIEERLKTYAHLFDDKVMKQLKRRRYTGWGRLSRKLINGIRDKQSGKTILDFLKSDGFANRNFMQLIHDDSLTFKEDIQKAQVSGQGDSLHEHIANLAGSPAIKKGILQTVKVVDELVKVMGRHKPENIVIEMARENQTTQKGQKNSRERMKRIEEGIKELGSQILKEHPVENTQLQNEKLYLYYLQNGRDMYVDQELDINRLSDYDVDHIVPQSFLKDDSIDNKVLTRSDKARGKSDNVPSEEVVKKMKNYWRQLLNAKLITQRKFDNLTKAERGGLSELDKAGFIKRQLVETRQITKHVAQILDSRMNTKYDENDKLIREVKVITLKSKLVSDFRKDFQFYKVREINNYHHAHDAYLNAVVGTALIKKYPKLESEFVYGDYKVYDVRKMIAKSEQEIGKATAKYFFYSNIMNFFKTEITLANGEIRKRPLIETNGETGEIVWDKGRDFATVRKVLSMPQVNIVKKTEVQTGGFSKESILPKRNSDKLIARKKDWDPKKYGGFDSPTVAYSVLVVAKVEKGKSKKLKSVKELLGITIMERSSFEKNPIDFLEAKGYKEVKKDLIIKLPKYSLFELENGRKRMLASAGELQKGNELALPSKYVNFLYLASHYEKLKGSPEDNEQKQLFVEQHKHYLDEIIEQISEFSKRVILADANLDKVLSAYNKHRDKPIREQAENIIHLFTLTNLGAPAAFKYFDTTIDRKRYTSTKEVLDATLIHQSITGLYETRIDLSQLGGDGGPAPAPAPAPAPAPGGTLNIEDEYRLHETSKGPDVPLGSTWLSDFPQAWAETGGMGLAVRQAPLIIPLKATSTPVSIKQYPMSQEARLGIKPHIQRLLDQGILVPCQSPWNTPLLPVKKPGTNDYRPVQDLREVNKRVEDIHPTVPNPYNLLSGLPPSHQWYTVLDLKDAFFCLRLHPTSQSLFAFEWRDPEMGISGQLTWTRLPQGFKNSPTLFNEALHRDLADFRIQHPDLILLQYVDDLLLAATSELDCQQGTRALLQTLGDLGYRASAKKAQICQKQVKYLGYLLKEGQRWLTEARKETVMGQPTPKTPRQLREFLGKAGFCRLFIPGFAEMAAPLYPLTKPGTLFEWGPDQQKAYQEIKQALLTAPALGLPDLTKPFELFVDEKQGYAKGVLTQKLGPWRRPVAYLSKKLDPVAAGWPPCLRMVAAIAVLTKDAGKLTMGQPLVILAPHAVEALVKQPPDRWLSNARMTHYQALLLDTDRVQFGPIVALNPATLLPLPEEGLQHDCLDILAEAHGTRPDLTDQPLPDADHTWYTDGSSFLQEGQRKAGAAVTTETEVVWAKALPAGTSAQRAELIALTQALKMAEGKKLNVYTDSRYAFATAHIHGEIYRRRGWLTSEGKEIKNKDEILALLKALFLPKRLSIIHCPGHQKGNRAEARGNRMADQAAREVATRETPETSTLLAGKRTADGSEFEKRTADGSEFESPKKKAKVE

SEQ ID NO: 2535 - protein, 2096 aa, synthetic construct
MPAAKRVKLDGGDKKYSIGLDIGTNSVGWAVITDEYKVPSKKFKVLGNTDRHSIKKNLIGALLFDSGETAEATRLKRTARRRYTRRKNRICYLQEIFSNEMAKVDDSFFHRLEESFLVEEDKKHERHPIFGNIVDEVAYHEKYPTIYHLRKKLVDSTDKADLRLIYLALAHMIKFRGHFLIEGDLNPDNSDVDKLFIQLVQTYNQLFEENPINASGVDAKAILSARLSKSRRLENLIAQLPGEKKNGLFGNLIALSLGLTPNFKSNFDLAEDAKLQLSKDTYDDDLDNLLAQIGDQYADLFLAAKNLSDAILLSDILRVNTEITKAPLSASMIKRYDEHHQDLTLLKALVRQQLPEKYKEIFFDQSKNGYAGYIDGGASQEEFYKFIKPILEKMDGTEELLVKLNREDLLRKQRTFDNGSIPHQIHLGELHAILRRQEDFYPFLKDNREKIEKILTFRIPYYVGPLARGNSRFAWMTRKSEETITPWNFEEVVDKGASAQSFIERMTNFDKNLPNEKVLPKHSLLYEYFTVYNELTKVKYVTEGMRKPAFLSGEQKKAIVDLLFKTNRKVTVKQLKEDYFKKIECFDSVEISGVEDRFNASLGTYHDLLKIIKDKDFLDNEENEDILEDIVLTLTLFEDREMIEERLKTYAHLFDDKVMKQLKRRRYTGWGRLSRKLINGIRDKQSGKTILDFLKSDGFANRNFMQLIHDDSLTFKEDIQKAQVSGQGDSLHEHIANLAGSPAIKKGILQTVKVVDELVKVMGRHKPENIVIEMARENQTTQKGQKNSRERMKRIEEGIKELGSQILKEHPVENTQLQNEKLYLYYLQNGRDMYVDQELDINRLSDYDVDHIVPQSFLKDDSIDNKVLTRSDKARGKSDNVPSEEVVKKMKNYWRQLLNAKLITQRKFDNLTKAERGGLSELDKAGFIKRQLVETRQITKHVAQILDSRMNTKYDENDKLIREVKVITLKSKLVSDFRKDFQFYKVREINNYHHAHDAYLNAVVGTALIKKYPKLESEFVYGDYKVYDVRKMIAKSEQEIGKATAKYFFYSNIMNFFKTEITLANGEIRKRPLIETNGETGEIVWDKGRDFATVRKVLSMPQVNIVKKTEVQTGGFSKESILPKRNSDKLIARKKDWDPKKYGGFDSPTVAYSVLVVAKVEKGKSKKLKSVKELLGITIMERSSFEKNPIDFLEAKGYKEVKKDLIIKLPKYSLFELENGRKRMLASAGELQKGNELALPSKYVNFLYLASHYEKLKGSPEDNEQKQLFVEQHKHYLDEIIEQISEFSKRVILADANLDKVLSAYNKHRDKPIREQAENIIHLFTLTNLGAPAAFKYFDTTIDRKRYTSTKEVLDATLIHQSITGLYETRIDLSQLGGDGGGSSEAAAKPAPGGTLNIEDEYRLHETSKGPDVPLGSTWLSDFPQAWAETGGMGLAVRQAPLIIPLKATSTPVSIKQYPMSQEARLGIKPHIQRLLDQGILVPCQSPWNTPLLPVKKPGTNDYRPVQDLREVNKRVEDIHPTVPNPYNLLSGLPPSHQWYTVLDLKDAFFCLRLHPTSQSLFAFEWRDPEMGISGQLTWTRLPQGFKNSPTLFNEALHRDLADFRIQHPDLILLQYVDDLLLAATSELDCQQGTRALLQTLGDLGYRASAKKAQICQKQVKYLGYLLKEGQRWLTEARKETVMGQPTPKTPRQLREFLGKAGFCRLFIPGFAEMAAPLYPLTKPGTLFEWGPDQQKAYQEIKQALLTAPALGLPDLTKPFELFVDEKQGYAKGVLTQKLGPWRRPVAYLSKKLDPVAAGWPPCLRMVAAIAVLTKDAGKLTMGQPLVILAPHAVEALVKQPPDRWLSNARMTHYQALLLDTDRVQFGPIVALNPATLLPLPEEGLQHDCLDILAEAHGTRPDLTDQPLPDADHTWYTDGSSFLQEGQRKAGAAVTTETEVVWAKALPAGTSAQRAELIALTQALKMAEGKKLNVYTDSRYAFATAHIHGEIYRRRGWLTSEGKEIKNKDEILALLKALFLPKRLSIIHCPGHQKGNRAEARGNRMADQAAREVATRETPETSTLLAGKRTADGSEFEKRTADGSEFESPKKKAKVE

SEQ ID NO: 2536 - protein, 2110 aa, synthetic construct
MPAAKRVKLDGGDKKYSIGLDIGTNSVGWAVITDEYKVPSKKFKVLGNTDRHSIKKNLIGALLFDSGETAEATRLKRTARRRYTRRKNRICYLQEIFSNEMAKVDDSFFHRLEESFLVEEDKKHERHPIFGNIVDEVAYHEKYPTIYHLRKKLVDSTDKADLRLIYLALAHMIKFRGHFLIEGDLNPDNSDVDKLFIQLVQTYNQLFEENPINASGVDAKAILSARLSKSRRLENLIAQLPGEKKNGLFGNLIALSLGLTPNFKSNFDLAEDAKLQLSKDTYDDDLDNLLAQIGDQYADLFLAAKNLSDAILLSDILRVNTEITKAPLSASMIKRYDEHHQDLTLLKALVRQQLPEKYKEIFFDQSKNGYAGYIDGGASQEEFYKFIKPILEKMDGTEELLVKLNREDLLRKQRTFDNGSIPHQIHLGELHAILRRQEDFYPFLKDNREKIEKILTFRIPYYVGPLARGNSRFAWMTRKSEETITPWNFEEVVDKGASAQSFIERMTNFDKNLPNEKVLPKHSLLYEYFTVYNELTKVKYVTEGMRKPAFLSGEQKKAIVDLLFKTNRKVTVKQLKEDYFKKIECFDSVEISGVEDRFNASLGTYHDLLKIIKDKDFLDNEENEDILEDIVLTLTLFEDREMIEERLKTYAHLFDDKVMKQLKRRRYTGWGRLSRKLINGIRDKQSGKTILDFLKSDGFANRNFMQLIHDDSLTFKEDIQKAQVSGQGDSLHEHIANLAGSPAIKKGILQTVKVVDELVKVMGRHKPENIVIEMARENQTTQKGQKNSRERMKRIEEGIKELGSQILKEHPVENTQLQNEKLYLYYLQNGRDMYVDQELDINRLSDYDVDHIVPQSFLKDDSIDNKVLTRSDKARGKSDNVPSEEVVKKMKNYWRQLLNAKLITQRKFDNLTKAERGGLSELDKAGFIKRQLVETRQITKHVAQILDSRMNTKYDENDKLIREVKVITLKSKLVSDFRKDFQFYKVREINNYHHAHDAYLNAVVGTALIKKYPKLESEFVYGDYKVYDVRKMIAKSEQEIGKATAKYFFYSNIMNFFKTEITLANGEIRKRPLIETNGETGEIVWDKGRDFATVRKVLSMPQVNIVKKTEVQTGGFSKESILPKRNSDKLIARKKDWDPKKYGGFDSPTVAYSVLVVAKVEKGKSKKLKSVKELLGITIMERSSFEKNPIDFLEAKGYKEVKKDLIIKLPKYSLFELENGRKRMLASAGELQKGNELALPSKYVNFLYLASHYEKLKGSPEDNEQKQLFVEQHKHYLDEIIEQISEFSKRVILADANLDKVLSAYNKHRDKPIREQAENIIHLFTLTNLGAPAAFKYFDTTIDRKRYTSTKEVLDATLIHQSITGLYETRIDLSQLGGDGGEAAAKEAAAKEAAAKEAAAKEAAAKGGTLNIEDEYRLHETSKGPDVPLGSTWLSDFPQAWAETGGMGLAVRQAPLIIPLKATSTPVSIKQYPMSQEARLGIKPHIQRLLDQGILVPCQSPWNTPLLPVKKPGTNDYRPVQDLREVNKRVEDIHPTVPNPYNLLSGLPPSHQWYTVLDLKDAFFCLRLHPTSQSLFAFEWRDPEMGISGQLTWTRLPQGFKNSPTLFNEALHRDLADFRIQHPDLILLQYVDDLLLAATSELDCQQGTRALLQTLGDLGYRASAKKAQICQKQVKYLGYLLKEGQRWLTEARKETVMGQPTPKTPRQLREFLGKAGFCRLFIPGFAEMAAPLYPLTKPGTLFEWGPDQQKAYQEIKQALLTAPALGLPDLTKPFELFVDEKQGYAKGVLTQKLGPWRRPVAYLSKKLDPVAAGWPPCLRMVAAIAVLTKDAGKLTMGQPLVILAPHAVEALVKQPPDRWLSNARMTHYQALLLDTDRVQFGPIVALNPATLLPLPEEGLQHDCLDILAEAHGTRPDLTDQPLPDADHTWYTDGSSFLQEGQRKAGAAVTTETEVVWAKALPAGTSAQRAELIALTQALKMAEGKKLNVYTDSRYAFATAHIHGEIYRRRGWLTSEGKEIKNKDEILALLKALFLPKRLSIIHCPGHQKGNRAEARGNRMADQAAREVATRETPETSTLLAGKRTADGSEFEKRTADGSEFESPKKKAKVE

SEQ ID NO: 2537-2538 - skipped (2 entries)

SEQ ID NO: 2539 - protein, 2090 aa, synthetic construct
MPAAKRVKLDGGDKKYSIGLDIGTNSVGWAVITDEYKVPSKKFKVLGNTDRHSIKKNLIGALLFDSGETAEATRLKRTARRRYTRRKNRICYLQEIFSNEMAKVDDSFFHRLEESFLVEEDKKHERHPIFGNIVDEVAYHEKYPTIYHLRKKLVDSTDKADLRLIYLALAHMIKFRGHFLIEGDLNPDNSDVDKLFIQLVQTYNQLFEENPINASGVDAKAILSARLSKSRRLENLIAQLPGEKKNGLFGNLIALSLGLTPNFKSNFDLAEDAKLQLSKDTYDDDLDNLLAQIGDQYADLFLAAKNLSDAILLSDILRVNTEITKAPLSASMIKRYDEHHQDLTLLKALVRQQLPEKYKEIFFDQSKNGYAGYIDGGASQEEFYKFIKPILEKMDGTEELLVKLNREDLLRKQRTFDNGSIPHQIHLGELHAILRRQEDFYPFLKDNREKIEKILTFRIPYYVGPLARGNSRFAWMTRKSEETITPWNFEEVVDKGASAQSFIERMTNFDKNLPNEKVLPKHSLLYEYFTVYNELTKVKYVTEGMRKPAFLSGEQKKAIVDLLFKTNRKVTVKQLKEDYFKKIECFDSVEISGVEDRFNASLGTYHDLLKIIKDKDFLDNEENEDILEDIVLTLTLFEDREMIEERLKTYAHLFDDKVMKQLKRRRYTGWGRLSRKLINGIRDKQSGKTILDFLKSDGFANRNFMQLIHDDSLTFKEDIQKAQVSGQGDSLHEHIANLAGSPAIKKGILQTVKVVDELVKVMGRHKPENIVIEMARENQTTQKGQKNSRERMKRIEEGIKELGSQILKEHPVENTQLQNEKLYLYYLQNGRDMYVDQELDINRLSDYDVDHIVPQSFLKDDSIDNKVLTRSDKARGKSDNVPSEEVVKKMKNYWRQLLNAKLITQRKFDNLTKAERGGLSELDKAGFIKRQLVETRQITKHVAQILDSRMNTKYDENDKLIREVKVITLKSKLVSDFRKDFQFYKVREINNYHHAHDAYLNAVVGTALIKKYPKLESEFVYGDYKVYDVRKMIAKSEQEIGKATAKYFFYSNIMNFFKTEITLANGEIRKRPLIETNGETGEIVWDKGRDFATVRKVLSMPQVNIVKKTEVQTGGFSKESILPKRNSDKLIARKKDWDPKKYGGFDSPTVAYSVLVVAKVEKGKSKKLKSVKELLGITIMERSSFEKNPIDFLEAKGYKEVKKDLIIKLPKYSLFELENGRKRMLASAGELQKGNELALPSKYVNFLYLASHYEKLKGSPEDNEQKQLFVEQHKHYLDEIIEQISEFSKRVILADANLDKVLSAYNKHRDKPIREQAENIIHLFTLTNLGAPAAFKYFDTTIDRKRYTSTKEVLDATLIHQSITGLYETRIDLSQLGGDGGEAAAKGGTLNIEDEYRLHETSKGPDVPLGSTWLSDFPQAWAETGGMGLAVRQAPLIIPLKATSTPVSIKQYPMSQEARLGIKPHIQRLLDQGILVPCQSPWNTPLLPVKKPGTNDYRPVQDLREVNKRVEDIHPTVPNPYNLLSGLPPSHQWYTVLDLKDAFFCLRLHPTSQSLFAFEWRDPEMGISGQLTWTRLPQGFKNSPTLFNEALHRDLADFRIQHPDLILLQYVDDLLLAATSELDCQQGTRALLQTLGDLGYRASAKKAQICQKQVKYLGYLLKEGQRWLTEARKETVMGQPTPKTPRQLREFLGKAGFCRLFIPGFAEMAAPLYPLTKPGTLFEWGPDQQKAYQEIKQALLTAPALGLPDLTKPFELFVDEKQGYAKGVLTQKLGPWRRPVAYLSKKLDPVAAGWPPCLRMVAAIAVLTKDAGKLTMGQPLVILAPHAVEALVKQPPDRWLSNARMTHYQALLLDTDRVQFGPIVALNPATLLPLPEEGLQHDCLDILAEAHGTRPDLTDQPLPDADHTWYTDGSSFLQEGQRKAGAAVTTETEVVWAKALPAGTSAQRAELIALTQALKMAEGKKLNVYTDSRYAFATAHIHGEIYRRRGWLTSEGKEIKNKDEILALLKALFLPKRLSIIHCPGHQKGNRAEARGNRMADQAAREVATRETPETSTLLAGKRTADGSEFEKRTADGSEFESPKKKAKVE

SEQ ID NO: 2540-2541 - skipped (2 entries)

SEQ ID NO: 2542 - protein, 2096 aa, synthetic construct
MPAAKRVKLDGGDKKYSIGLDIGTNSVGWAVITDEYKVPSKKFKVLGNTDRHSIKKNLIGALLFDSGETAEATRLKRTARRRYTRRKNRICYLQEIFSNEMAKVDDSFFHRLEESFLVEEDKKHERHPIFGNIVDEVAYHEKYPTIYHLRKKLVDSTDKADLRLIYLALAHMIKFRGHFLIEGDLNPDNSDVDKLFIQLVQTYNQLFEENPINASGVDAKAILSARLSKSRRLENLIAQLPGEKKNGLFGNLIALSLGLTPNFKSNFDLAEDAKLQLSKDTYDDDLDNLLAQIGDQYADLFLAAKNLSDAILLSDILRVNTEITKAPLSASMIKRYDEHHQDLTLLKALVRQQLPEKYKEIFFDQSKNGYAGYIDGGASQEEFYKFIKPILEKMDGTEELLVKLNREDLLRKQRTFDNGSIPHQIHLGELHAILRRQEDFYPFLKDNREKIEKILTFRIPYYVGPLARGNSRFAWMTRKSEETITPWNFEEVVDKGASAQSFIERMTNFDKNLPNEKVLPKHSLLYEYFTVYNELTKVKYVTEGMRKPAFLSGEQKKAIVDLLFKTNRKVTVKQLKEDYFKKIECFDSVEISGVEDRFNASLGTYHDLLKIIKDKDFLDNEENEDILEDIVLTLTLFEDREMIEERLKTYAHLFDDKVMKQLKRRRYTGWGRLSRKLINGIRDKQSGKTILDFLKSDGFANRNFMQLIHDDSLTFKEDIQKAQVSGQGDSLHEHIANLAGSPAIKKGILQTVKVVDELVKVMGRHKPENIVIEMARENQTTQKGQKNSRERMKRIEEGIKELGSQILKEHPVENTQLQNEKLYLYYLQNGRDMYVDQELDINRLSDYDVDHIVPQSFLKDDSIDNKVLTRSDKARGKSDNVPSEEVVKKMKNYWRQLLNAKLITQRKFDNLTKAERGGLSELDKAGFIKRQLVETRQITKHVAQILDSRMNTKYDENDKLIREVKVITLKSKLVSDFRKDFQFYKVREINNYHHAHDAYLNAVVGTALIKKYPKLESEFVYGDYKVYDVRKMIAKSEQEIGKATAKYFFYSNIMNFFKTEITLANGEIRKRPLIETNGETGEIVWDKGRDFATVRKVLSMPQVNIVKKTEVQTGGFSKESILPKRNSDKLIARKKDWDPKKYGGFDSPTVAYSVLVVAKVEKGKSKKLKSVKELLGITIMERSSFEKNPIDFLEAKGYKEVKKDLIIKLPKYSLFELENGRKRMLASAGELQKGNELALPSKYVNFLYLASHYEKLKGSPEDNEQKQLFVEQHKHYLDEIIEQISEFSKRVILADANLDKVLSAYNKHRDKPIREQAENIIHLFTLTNLGAPAAFKYFDTTIDRKRYTSTKEVLDATLIHQSITGLYETRIDLSQLGGDGGPAPGSSEAAAKGGTLNIEDEYRLHETSKGPDVPLGSTWLSDFPQAWAETGGMGLAVRQAPLIIPLKATSTPVSIKQYPMSQEARLGIKPHIQRLLDQGILVPCQSPWNTPLLPVKKPGTNDYRPVQDLREVNKRVEDIHPTVPNPYNLLSGLPPSHQWYTVLDLKDAFFCLRLHPTSQSLFAFEWRDPEMGISGQLTWTRLPQGFKNSPTLFNEALHRDLADFRIQHPDLILLQYVDDLLLAATSELDCQQGTRALLQTLGDLGYRASAKKAQICQKQVKYLGYLLKEGQRWLTEARKETVMGQPTPKTPRQLREFLGKAGFCRLFIPGFAEMAAPLYPLTKPGTLFEWGPDQQKAYQEIKQALLTAPALGLPDLTKPFELFVDEKQGYAKGVLTQKLGPWRRPVAYLSKKLDPVAAGWPPCLRMVAAIAVLTKDAGKLTMGQPLVILAPHAVEALVKQPPDRWLSNARMTHYQALLLDTDRVQFGPIVALNPATLLPLPEEGLQHDCLDILAEAHGTRPDLTDQPLPDADHTWYTDGSSFLQEGQRKAGAAVTTETEVVWAKALPAGTSAQRAELIALTQALKMAEGKKLNVYTDSRYAFATAHIHGEIYRRRGWLTSEGKEIKNKDEILALLKALFLPKRLSIIHCPGHQKGNRAEARGNRMADQAAREVATRETPETSTLLAGKRTADGSEFEKRTADGSEFESPKKKAKVE

SEQ ID NO: 2543 - skipped

SEQ ID NO: 2544 - protein, 2097 aa, synthetic construct
MPAAKRVKLDGGDKKYSIGLDIGTNSVGWAVITDEYKVPSKKFKVLGNTDRHSIKKNLIGALLFDSGETAEATRLKRTARRRYTRRKNRICYLQEIFSNEMAKVDDSFFHRLEESFLVEEDKKHERHPIFGNIVDEVAYHEKYPTIYHLRKKLVDSTDKADLRLIYLALAHMIKFRGHFLIEGDLNPDNSDVDKLFIQLVQTYNQLFEENPINASGVDAKAILSARLSKSRRLENLIAQLPGEKKNGLFGNLIALSLGLTPNFKSNFDLAEDAKLQLSKDTYDDDLDNLLAQIGDQYADLFLAAKNLSDAILLSDILRVNTEITKAPLSASMIKRYDEHHQDLTLLKALVRQQLPEKYKEIFFDQSKNGYAGYIDGGASQEEFYKFIKPILEKMDGTEELLVKLNREDLLRKQRTFDNGSIPHQIHLGELHAILRRQEDFYPFLKDNREKIEKILTFRIPYYVGPLARGNSRFAWMTRKSEETITPWNFEEVVDKGASAQSFIERMTNFDKNLPNEKVLPKHSLLYEYFTVYNELTKVKYVTEGMRKPAFLSGEQKKAIVDLLFKTNRKVTVKQLKEDYFKKIECFDSVEISGVEDRFNASLGTYHDLLKIIKDKDFLDNEENEDILEDIVLTLTLFEDREMIEERLKTYAHLFDDKVMKQLKRRRYTGWGRLSRKLINGIRDKQSGKTILDFLKSDGFANRNFMQLIHDDSLTFKEDIQKAQVSGQGDSLHEHIANLAGSPAIKKGILQTVKVVDELVKVMGRHKPENIVIEMARENQTTQKGQKNSRERMKRIEEGIKELGSQILKEHPVENTQLQNEKLYLYYLQNGRDMYVDQELDINRLSDYDVDHIVPQSFLKDDSIDNKVLTRSDKARGKSDNVPSEEVVKKMKNYWRQLLNAKLITQRKFDNLTKAERGGLSELDKAGFIKRQLVETRQITKHVAQILDSRMNTKYDENDKLIREVKVITLKSKLVSDFRKDFQFYKVREINNYHHAHDAYLNAVVGTALIKKYPKLESEFVYGDYKVYDVRKMIAKSEQEIGKATAKYFFYSNIMNFFKTEITLANGEIRKRPLIETNGETGEIVWDKGRDFATVRKVLSMPQVNIVKKTEVQTGGFSKESILPKRNSDKLIARKKDWDPKKYGGFDSPTVAYSVLVVAKVEKGKSKKLKSVKELLGITIMERSSFEKNPIDFLEAKGYKEVKKDLIIKLPKYSLFELENGRKRMLASAGELQKGNELALPSKYVNFLYLASHYEKLKGSPEDNEQKQLFVEQHKHYLDEIIEQISEFSKRVILADANLDKVLSAYNKHRDKPIREQAENIIHLFTLTNLGAPAAFKYFDTTIDRKRYTSTKEVLDATLIHQSITGLYETRIDLSQLGGDGGGGSGGSGGSGGSGGTLNIEDEYRLHETSKGPDVPLGSTWLSDFPQAWAETGGMGLAVRQAPLIIPLKATSTPVSIKQYPMSQEARLGIKPHIQRLLDQGILVPCQSPWNTPLLPVKKPGTNDYRPVQDLREVNKRVEDIHPTVPNPYNLLSGLPPSHQWYTVLDLKDAFFCLRLHPTSQSLFAFEWRDPEMGISGQLTWTRLPQGFKNSPTLFNEALHRDLADFRIQHPDLILLQYVDDLLLAATSELDCQQGTRALLQTLGDLGYRASAKKAQICQKQVKYLGYLLKEGQRWLTEARKETVMGQPTPKTPRQLREFLGKAGFCRLFIPGFAEMAAPLYPLTKPGTLFEWGPDQQKAYQEIKQALLTAPALGLPDLTKPFELFVDEKQGYAKGVLTQKLGPWRRPVAYLSKKLDPVAAGWPPCLRMVAAIAVLTKDAGKLTMGQPLVILAPHAVEALVKQPPDRWLSNARMTHYQALLLDTDRVQFGPIVALNPATLLPLPEEGLQHDCLDILAEAHGTRPDLTDQPLPDADHTWYTDGSSFLQEGQRKAGAAVTTETEVVWAKALPAGTSAQRAELIALTQALKMAEGKKLNVYTDSRYAFATAHIHGEIYRRRGWLTSEGKEIKNKDEILALLKALFLPKRLSIIHCPGHQKGNRAEARGNRMADQAAREVATRETPETSTLLAGKRTADGSEFEKRTADGSEFESPKKKAKVE

SEQ ID NO: 2545-2546 - skipped (2 entries)

SEQ ID NO: 2547 - protein, 2091 aa, synthetic construct
MPAAKRVKLDGGDKKYSIGLDIGTNSVGWAVITDEYKVPSKKFKVLGNTDRHSIKKNLIGALLFDSGETAEATRLKRTARRRYTRRKNRICYLQEIFSNEMAKVDDSFFHRLEESFLVEEDKKHERHPIFGNIVDEVAYHEKYPTIYHLRKKLVDSTDKADLRLIYLALAHMIKFRGHFLIEGDLNPDNSDVDKLFIQLVQTYNQLFEENPINASGVDAKAILSARLSKSRRLENLIAQLPGEKKNGLFGNLIALSLGLTPNFKSNFDLAEDAKLQLSKDTYDDDLDNLLAQIGDQYADLFLAAKNLSDAILLSDILRVNTEITKAPLSASMIKRYDEHHQDLTLLKALVRQQLPEKYKEIFFDQSKNGYAGYIDGGASQEEFYKFIKPILEKMDGTEELLVKLNREDLLRKQRTFDNGSIPHQIHLGELHAILRRQEDFYPFLKDNREKIEKILTFRIPYYVGPLARGNSRFAWMTRKSEETITPWNFEEVVDKGASAQSFIERMTNFDKNLPNEKVLPKHSLLYEYFTVYNELTKVKYVTEGMRKPAFLSGEQKKAIVDLLFKTNRKVTVKQLKEDYFKKIECFDSVEISGVEDRFNASLGTYHDLLKIIKDKDFLDNEENEDILEDIVLTLTLFEDREMIEERLKTYAHLFDDKVMKQLKRRRYTGWGRLSRKLINGIRDKQSGKTILDFLKSDGFANRNFMQLIHDDSLTFKEDIQKAQVSGQGDSLHEHIANLAGSPAIKKGILQTVKVVDELVKVMGRHKPENIVIEMARENQTTQKGQKNSRERMKRIEEGIKELGSQILKEHPVENTQLQNEKLYLYYLQNGRDMYVDQELDINRLSDYDVDHIVPQSFLKDDSIDNKVLTRSDKARGKSDNVPSEEVVKKMKNYWRQLLNAKLITQRKFDNLTKAERGGLSELDKAGFIKRQLVETRQITKHVAQILDSRMNTKYDENDKLIREVKVITLKSKLVSDFRKDFQFYKVREINNYHHAHDAYLNAVVGTALIKKYPKLESEFVYGDYKVYDVRKMIAKSEQEIGKATAKYFFYSNIMNFFKTEITLANGEIRKRPLIETNGETGEIVWDKGRDFATVRKVLSMPQVNIVKKTEVQTGGFSKESILPKRNSDKLIARKKDWDPKKYGGFDSPTVAYSVLVVAKVEKGKSKKLKSVKELLGITIMERSSFEKNPIDFLEAKGYKEVKKDLIIKLPKYSLFELENGRKRMLASAGELQKGNELALPSKYVNFLYLASHYEKLKGSPEDNEQKQLFVEQHKHYLDEIIEQISEFSKRVILADANLDKVLSAYNKHRDKPIREQAENIIHLFTLTNLGAPAAFKYFDTTIDRKRYTSTKEVLDATLIHQSITGLYETRIDLSQLGGDGGGGGPAPGGTLNIEDEYRLHETSKGPDVPLGSTWLSDFPQAWAETGGMGLAVRQAPLIIPLKATSTPVSIKQYPMSQEARLGIKPHIQRLLDQGILVPCQSPWNTPLLPVKKPGTNDYRPVQDLREVNKRVEDIHPTVPNPYNLLSGLPPSHQWYTVLDLKDAFFCLRLHPTSQSLFAFEWRDPEMGISGQLTWTRLPQGFKNSPTLFNEALHRDLADFRIQHPDLILLQYVDDLLLAATSELDCQQGTRALLQTLGDLGYRASAKKAQICQKQVKYLGYLLKEGQRWLTEARKETVMGQPTPKTPRQLREFLGKAGFCRLFIPGFAEMAAPLYPLTKPGTLFEWGPDQQKAYQEIKQALLTAPALGLPDLTKPFELFVDEKQGYAKGVLTQKLGPWRRPVAYLSKKLDPVAAGWPPCLRMVAAIAVLTKDAGKLTMGQPLVILAPHAVEALVKQPPDRWLSNARMTHYQALLLDTDRVQFGPIVALNPATLLPLPEEGLQHDCLDILAEAHGTRPDLTDQPLPDADHTWYTDGSSFLQEGQRKAGAAVTTETEVVWAKALPAGTSAQRAELIALTQALKMAEGKKLNVYTDSRYAFATAHIHGEIYRRRGWLTSEGKEIKNKDEILALLKALFLPKRLSIIHCPGHQKGNRAEARGNRMADQAAREVATRETPETSTLLAGKRTADGSEFEKRTADGSEFESPKKKAKVE

SEQ ID NO: 2548 - protein, 2096 aa, synthetic construct
MPAAKRVKLDGGDKKYSIGLDIGTNSVGWAVITDEYKVPSKKFKVLGNTDRHSIKKNLIGALLFDSGETAEATRLKRTARRRYTRRKNRICYLQEIFSNEMAKVDDSFFHRLEESFLVEEDKKHERHPIFGNIVDEVAYHEKYPTIYHLRKKLVDSTDKADLRLIYLALAHMIKFRGHFLIEGDLNPDNSDVDKLFIQLVQTYNQLFEENPINASGVDAKAILSARLSKSRRLENLIAQLPGEKKNGLFGNLIALSLGLTPNFKSNFDLAEDAKLQLSKDTYDDDLDNLLAQIGDQYADLFLAAKNLSDAILLSDILRVNTEITKAPLSASMIKRYDEHHQDLTLLKALVRQQLPEKYKEIFFDQSKNGYAGYIDGGASQEEFYKFIKPILEKMDGTEELLVKLNREDLLRKQRTFDNGSIPHQIHLGELHAILRRQEDFYPFLKDNREKIEKILTFRIPYYVGPLARGNSRFAWMTRKSEETITPWNFEEVVDKGASAQSFIERMTNFDKNLPNEKVLPKHSLLYEYFTVYNELTKVKYVTEGMRKPAFLSGEQKKAIVDLLFKTNRKVTVKQLKEDYFKKIECFDSVEISGVEDRFNASLGTYHDLLKIIKDKDFLDNEENEDILEDIVLTLTLFEDREMIEERLKTYAHLFDDKVMKQLKRRRYTGWGRLSRKLINGIRDKQSGKTILDFLKSDGFANRNFMQLIHDDSLTFKEDIQKAQVSGQGDSLHEHIANLAGSPAIKKGILQTVKVVDELVKVMGRHKPENIVIEMARENQTTQKGQKNSRERMKRIEEGIKELGSQILKEHPVENTQLQNEKLYLYYLQNGRDMYVDQELDINRLSDYDVDHIVPQSFLKDDSIDNKVLTRSDKARGKSDNVPSEEVVKKMKNYWRQLLNAKLITQRKFDNLTKAERGGLSELDKAGFIKRQLVETRQITKHVAQILDSRMNTKYDENDKLIREVKVITLKSKLVSDFRKDFQFYKVREINNYHHAHDAYLNAVVGTALIKKYPKLESEFVYGDYKVYDVRKMIAKSEQEIGKATAKYFFYSNIMNFFKTEITLANGEIRKRPLIETNGETGEIVWDKGRDFATVRKVLSMPQVNIVKKTEVQTGGFSKESILPKRNSDKLIARKKDWDPKKYGGFDSPTVAYSVLVVAKVEKGKSKKLKSVKELLGITIMERSSFEKNPIDFLEAKGYKEVKKDLIIKLPKYSLFELENGRKRMLASAGELQKGNELALPSKYVNFLYLASHYEKLKGSPEDNEQKQLFVEQHKHYLDEIIEQISEFSKRVILADANLDKVLSAYNKHRDKPIREQAENIIHLFTLTNLGAPAAFKYFDTTIDRKRYTSTKEVLDATLIHQSITGLYETRIDLSQLGGDGGEAAAKGGSGSSGGTLNIEDEYRLHETSKGPDVPLGSTWLSDFPQAWAETGGMGLAVRQAPLIIPLKATSTPVSIKQYPMSQEARLGIKPHIQRLLDQGILVPCQSPWNTPLLPVKKPGTNDYRPVQDLREVNKRVEDIHPTVPNPYNLLSGLPPSHQWYTVLDLKDAFFCLRLHPTSQSLFAFEWRDPEMGISGQLTWTRLPQGFKNSPTLFNEALHRDLADFRIQHPDLILLQYVDDLLLAATSELDCQQGTRALLQTLGDLGYRASAKKAQICQKQVKYLGYLLKEGQRWLTEARKETVMGQPTPKTPRQLREFLGKAGFCRLFIPGFAEMAAPLYPLTKPGTLFEWGPDQQKAYQEIKQALLTAPALGLPDLTKPFELFVDEKQGYAKGVLTQKLGPWRRPVAYLSKKLDPVAAGWPPCLRMVAAIAVLTKDAGKLTMGQPLVILAPHAVEALVKQPPDRWLSNARMTHYQALLLDTDRVQFGPIVALNPATLLPLPEEGLQHDCLDILAEAHGTRPDLTDQPLPDADHTWYTDGSSFLQEGQRKAGAAVTTETEVVWAKALPAGTSAQRAELIALTQALKMAEGKKLNVYTDSRYAFATAHIHGEIYRRRGWLTSEGKEIKNKDEILALLKALFLPKRLSIIHCPGHQKGNRAEARGNRMADQAAREVATRETPETSTLLAGKRTADGSEFEKRTADGSEFESPKKKAKVE

SEQ ID NO: 2549 - skipped

SEQ ID NO: 2550 - protein, 2096 aa, synthetic construct
MPAAKRVKLDGGDKKYSIGLDIGTNSVGWAVITDEYKVPSKKFKVLGNTDRHSIKKNLIGALLFDSGETAEATRLKRTARRRYTRRKNRICYLQEIFSNEMAKVDDSFFHRLEESFLVEEDKKHERHPIFGNIVDEVAYHEKYPTIYHLRKKLVDSTDKADLRLIYLALAHMIKFRGHFLIEGDLNPDNSDVDKLFIQLVQTYNQLFEENPINASGVDAKAILSARLSKSRRLENLIAQLPGEKKNGLFGNLIALSLGLTPNFKSNFDLAEDAKLQLSKDTYDDDLDNLLAQIGDQYADLFLAAKNLSDAILLSDILRVNTEITKAPLSASMIKRYDEHHQDLTLLKALVRQQLPEKYKEIFFDQSKNGYAGYIDGGASQEEFYKFIKPILEKMDGTEELLVKLNREDLLRKQRTFDNGSIPHQIHLGELHAILRRQEDFYPFLKDNREKIEKILTFRIPYYVGPLARGNSRFAWMTRKSEETITPWNFEEVVDKGASAQSFIERMTNFDKNLPNEKVLPKHSLLYEYFTVYNELTKVKYVTEGMRKPAFLSGEQKKAIVDLLFKTNRKVTVKQLKEDYFKKIECFDSVEISGVEDRFNASLGTYHDLLKIIKDKDFLDNEENEDILEDIVLTLTLFEDREMIEERLKTYAHLFDDKVMKQLKRRRYTGWGRLSRKLINGIRDKQSGKTILDFLKSDGFANRNFMQLIHDDSLTFKEDIQKAQVSGQGDSLHEHIANLAGSPAIKKGILQTVKVVDELVKVMGRHKPENIVIEMARENQTTQKGQKNSRERMKRIEEGIKELGSQILKEHPVENTQLQNEKLYLYYLQNGRDMYVDQELDINRLSDYDVDHIVPQSFLKDDSIDNKVLTRSDKARGKSDNVPSEEVVKKMKNYWRQLLNAKLITQRKFDNLTKAERGGLSELDKAGFIKRQLVETRQITKHVAQILDSRMNTKYDENDKLIREVKVITLKSKLVSDFRKDFQFYKVREINNYHHAHDAYLNAVVGTALIKKYPKLESEFVYGDYKVYDVRKMIAKSEQEIGKATAKYFFYSNIMNFFKTEITLANGEIRKRPLIETNGETGEIVWDKGRDFATVRKVLSMPQVNIVKKTEVQTGGFSKESILPKRNSDKLIARKKDWDPKKYGGFDSPTVAYSVLVVAKVEKGKSKKLKSVKELLGITIMERSSFEKNPIDFLEAKGYKEVKKDLIIKLPKYSLFELENGRKRMLASAGELQKGNELALPSKYVNFLYLASHYEKLKGSPEDNEQKQLFVEQHKHYLDEIIEQISEFSKRVILADANLDKVLSAYNKHRDKPIREQAENIIHLFTLTNLGAPAAFKYFDTTIDRKRYTSTKEVLDATLIHQSITGLYETRIDLSQLGGDGGGSSEAAAKGGGGGTLNIEDEYRLHETSKGPDVPLGSTWLSDFPQAWAETGGMGLAVRQAPLIIPLKATSTPVSIKQYPMSQEARLGIKPHIQRLLDQGILVPCQSPWNTPLLPVKKPGTNDYRPVQDLREVNKRVEDIHPTVPNPYNLLSGLPPSHQWYTVLDLKDAFFCLRLHPTSQSLFAFEWRDPEMGISGQLTWTRLPQGFKNSPTLFNEALHRDLADFRIQHPDLILLQYVDDLLLAATSELDCQQGTRALLQTLGDLGYRASAKKAQICQKQVKYLGYLLKEGQRWLTEARKETVMGQPTPKTPRQLREFLGKAGFCRLFIPGFAEMAAPLYPLTKPGTLFEWGPDQQKAYQEIKQALLTAPALGLPDLTKPFELFVDEKQGYAKGVLTQKLGPWRRPVAYLSKKLDPVAAGWPPCLRMVAAIAVLTKDAGKLTMGQPLVILAPHAVEALVKQPPDRWLSNARMTHYQALLLDTDRVQFGPIVALNPATLLPLPEEGLQHDCLDILAEAHGTRPDLTDQPLPDADHTWYTDGSSFLQEGQRKAGAAVTTETEVVWAKALPAGTSAQRAELIALTQALKMAEGKKLNVYTDSRYAFATAHIHGEIYRRRGWLTSEGKEIKNKDEILALLKALFLPKRLSIIHCPGHQKGNRAEARGNRMADQAAREVATRETPETSTLLAGKRTADGSEFEKRTADGSEFESPKKKAKVE

SEQ ID NO: 2551 - protein, 2096 aa, synthetic construct
MPAAKRVKLDGGDKKYSIGLDIGTNSVGWAVITDEYKVPSKKFKVLGNTDRHSIKKNLIGALLFDSGETAEATRLKRTARRRYTRRKNRICYLQEIFSNEMAKVDDSFFHRLEESFLVEEDKKHERHPIFGNIVDEVAYHEKYPTIYHLRKKLVDSTDKADLRLIYLALAHMIKFRGHFLIEGDLNPDNSDVDKLFIQLVQTYNQLFEENPINASGVDAKAILSARLSKSRRLENLIAQLPGEKKNGLFGNLIALSLGLTPNFKSNFDLAEDAKLQLSKDTYDDDLDNLLAQIGDQYADLFLAAKNLSDAILLSDILRVNTEITKAPLSASMIKRYDEHHQDLTLLKALVRQQLPEKYKEIFFDQSKNGYAGYIDGGASQEEFYKFIKPILEKMDGTEELLVKLNREDLLRKQRTFDNGSIPHQIHLGELHAILRRQEDFYPFLKDNREKIEKILTFRIPYYVGPLARGNSRFAWMTRKSEETITPWNFEEVVDKGASAQSFIERMTNFDKNLPNEKVLPKHSLLYEYFTVYNELTKVKYVTEGMRKPAFLSGEQKKAIVDLLFKTNRKVTVKQLKEDYFKKIECFDSVEISGVEDRFNASLGTYHDLLKIIKDKDFLDNEENEDILEDIVLTLTLFEDREMIEERLKTYAHLFDDKVMKQLKRRRYTGWGRLSRKLINGIRDKQSGKTILDFLKSDGFANRNFMQLIHDDSLTFKEDIQKAQVSGQGDSLHEHIANLAGSPAIKKGILQTVKVVDELVKVMGRHKPENIVIEMARENQTTQKGQKNSRERMKRIEEGIKELGSQILKEHPVENTQLQNEKLYLYYLQNGRDMYVDQELDINRLSDYDVDHIVPQSFLKDDSIDNKVLTRSDKARGKSDNVPSEEVVKKMKNYWRQLLNAKLITQRKFDNLTKAERGGLSELDKAGFIKRQLVETRQITKHVAQILDSRMNTKYDENDKLIREVKVITLKSKLVSDFRKDFQFYKVREINNYHHAHDAYLNAVVGTALIKKYPKLESEFVYGDYKVYDVRKMIAKSEQEIGKATAKYFFYSNIMNFFKTEITLANGEIRKRPLIETNGETGEIVWDKGRDFATVRKVLSMPQVNIVKKTEVQTGGFSKESILPKRNSDKLIARKKDWDPKKYGGFDSPTVAYSVLVVAKVEKGKSKKLKSVKELLGITIMERSSFEKNPIDFLEAKGYKEVKKDLIIKLPKYSLFELENGRKRMLASAGELQKGNELALPSKYVNFLYLASHYEKLKGSPEDNEQKQLFVEQHKHYLDEIIEQISEFSKRVILADANLDKVLSAYNKHRDKPIREQAENIIHLFTLTNLGAPAAFKYFDTTIDRKRYTSTKEVLDATLIHQSITGLYETRIDLSQLGGDGGEAAAKGGSGGGGGTLNIEDEYRLHETSKGPDVPLGSTWLSDFPQAWAETGGMGLAVRQAPLIIPLKATSTPVSIKQYPMSQEARLGIKPHIQRLLDQGILVPCQSPWNTPLLPVKKPGTNDYRPVQDLREVNKRVEDIHPTVPNPYNLLSGLPPSHQWYTVLDLKDAFFCLRLHPTSQSLFAFEWRDPEMGISGQLTWTRLPQGFKNSPTLFNEALHRDLADFRIQHPDLILLQYVDDLLLAATSELDCQQGTRALLQTLGDLGYRASAKKAQICQKQVKYLGYLLKEGQRWLTEARKETVMGQPTPKTPRQLREFLGKAGFCRLFIPGFAEMAAPLYPLTKPGTLFEWGPDQQKAYQEIKQALLTAPALGLPDLTKPFELFVDEKQGYAKGVLTQKLGPWRRPVAYLSKKLDPVAAGWPPCLRMVAAIAVLTKDAGKLTMGQPLVILAPHAVEALVKQPPDRWLSNARMTHYQALLLDTDRVQFGPIVALNPATLLPLPEEGLQHDCLDILAEAHGTRPDLTDQPLPDADHTWYTDGSSFLQEGQRKAGAAVTTETEVVWAKALPAGTSAQRAELIALTQALKMAEGKKLNVYTDSRYAFATAHIHGEIYRRRGWLTSEGKEIKNKDEILALLKALFLPKRLSIIHCPGHQKGNRAEARGNRMADQAAREVATRETPETSTLLAGKRTADGSEFEKRTADGSEFESPKKKAKVE

SEQ ID NO: 2552 - skipped

SEQ ID NO: 2553 - protein, 2096 aa, synthetic construct
MPAAKRVKLDGGDKKYSIGLDIGTNSVGWAVITDEYKVPSKKFKVLGNTDRHSIKKNLIGALLFDSGETAEATRLKRTARRRYTRRKNRICYLQEIFSNEMAKVDDSFFHRLEESFLVEEDKKHERHPIFGNIVDEVAYHEKYPTIYHLRKKLVDSTDKADLRLIYLALAHMIKFRGHFLIEGDLNPDNSDVDKLFIQLVQTYNQLFEENPINASGVDAKAILSARLSKSRRLENLIAQLPGEKKNGLFGNLIALSLGLTPNFKSNFDLAEDAKLQLSKDTYDDDLDNLLAQIGDQYADLFLAAKNLSDAILLSDILRVNTEITKAPLSASMIKRYDEHHQDLTLLKALVRQQLPEKYKEIFFDQSKNGYAGYIDGGASQEEFYKFIKPILEKMDGTEELLVKLNREDLLRKQRTFDNGSIPHQIHLGELHAILRRQEDFYPFLKDNREKIEKILTFRIPYYVGPLARGNSRFAWMTRKSEETITPWNFEEVVDKGASAQSFIERMTNFDKNLPNEKVLPKHSLLYEYFTVYNELTKVKYVTEGMRKPAFLSGEQKKAIVDLLFKTNRKVTVKQLKEDYFKKIECFDSVEISGVEDRFNASLGTYHDLLKIIKDKDFLDNEENEDILEDIVLTLTLFEDREMIEERLKTYAHLFDDKVMKQLKRRRYTGWGRLSRKLINGIRDKQSGKTILDFLKSDGFANRNFMQLIHDDSLTFKEDIQKAQVSGQGDSLHEHIANLAGSPAIKKGILQTVKVVDELVKVMGRHKPENIVIEMARENQTTQKGQKNSRERMKRIEEGIKELGSQILKEHPVENTQLQNEKLYLYYLQNGRDMYVDQELDINRLSDYDVDHIVPQSFLKDDSIDNKVLTRSDKARGKSDNVPSEEVVKKMKNYWRQLLNAKLITQRKFDNLTKAERGGLSELDKAGFIKRQLVETRQITKHVAQILDSRMNTKYDENDKLIREVKVITLKSKLVSDFRKDFQFYKVREINNYHHAHDAYLNAVVGTALIKKYPKLESEFVYGDYKVYDVRKMIAKSEQEIGKATAKYFFYSNIMNFFKTEITLANGEIRKRPLIETNGETGEIVWDKGRDFATVRKVLSMPQVNIVKKTEVQTGGFSKESILPKRNSDKLIARKKDWDPKKYGGFDSPTVAYSVLVVAKVEKGKSKKLKSVKELLGITIMERSSFEKNPIDFLEAKGYKEVKKDLIIKLPKYSLFELENGRKRMLASAGELQKGNELALPSKYVNFLYLASHYEKLKGSPEDNEQKQLFVEQHKHYLDEIIEQISEFSKRVILADANLDKVLSAYNKHRDKPIREQAENIIHLFTLTNLGAPAAFKYFDTTIDRKRYTSTKEVLDATLIHQSITGLYETRIDLSQLGGDGGGSSEAAAKGGSGGTLNIEDEYRLHETSKGPDVPLGSTWLSDFPQAWAETGGMGLAVRQAPLIIPLKATSTPVSIKQYPMSQEARLGIKPHIQRLLDQGILVPCQSPWNTPLLPVKKPGTNDYRPVQDLREVNKRVEDIHPTVPNPYNLLSGLPPSHQWYTVLDLKDAFFCLRLHPTSQSLFAFEWRDPEMGISGQLTWTRLPQGFKNSPTLFNEALHRDLADFRIQHPDLILLQYVDDLLLAATSELDCQQGTRALLQTLGDLGYRASAKKAQICQKQVKYLGYLLKEGQRWLTEARKETVMGQPTPKTPRQLREFLGKAGFCRLFIPGFAEMAAPLYPLTKPGTLFEWGPDQQKAYQEIKQALLTAPALGLPDLTKPFELFVDEKQGYAKGVLTQKLGPWRRPVAYLSKKLDPVAAGWPPCLRMVAAIAVLTKDAGKLTMGQPLVILAPHAVEALVKQPPDRWLSNARMTHYQALLLDTDRVQFGPIVALNPATLLPLPEEGLQHDCLDILAEAHGTRPDLTDQPLPDADHTWYTDGSSFLQEGQRKAGAAVTTETEVVWAKALPAGTSAQRAELIALTQALKMAEGKKLNVYTDSRYAFATAHIHGEIYRRRGWLTSEGKEIKNKDEILALLKALFLPKRLSIIHCPGHQKGNRAEARGNRMADQAAREVATRETPETSTLLAGKRTADGSEFEKRTADGSEFESPKKKAKVE

SEQ ID NO: 2554-2555 - skipped (2 entries)

SEQ ID NO: 2556 - protein, 2096 aa, synthetic construct
MPAAKRVKLDGGDKKYSIGLDIGTNSVGWAVITDEYKVPSKKFKVLGNTDRHSIKKNLIGALLFDSGETAEATRLKRTARRRYTRRKNRICYLQEIFSNEMAKVDDSFFHRLEESFLVEEDKKHERHPIFGNIVDEVAYHEKYPTIYHLRKKLVDSTDKADLRLIYLALAHMIKFRGHFLIEGDLNPDNSDVDKLFIQLVQTYNQLFEENPINASGVDAKAILSARLSKSRRLENLIAQLPGEKKNGLFGNLIALSLGLTPNFKSNFDLAEDAKLQLSKDTYDDDLDNLLAQIGDQYADLFLAAKNLSDAILLSDILRVNTEITKAPLSASMIKRYDEHHQDLTLLKALVRQQLPEKYKEIFFDQSKNGYAGYIDGGASQEEFYKFIKPILEKMDGTEELLVKLNREDLLRKQRTFDNGSIPHQIHLGELHAILRRQEDFYPFLKDNREKIEKILTFRIPYYVGPLARGNSRFAWMTRKSEETITPWNFEEVVDKGASAQSFIERMTNFDKNLPNEKVLPKHSLLYEYFTVYNELTKVKYVTEGMRKPAFLSGEQKKAIVDLLFKTNRKVTVKQLKEDYFKKIECFDSVEISGVEDRFNASLGTYHDLLKIIKDKDFLDNEENEDILEDIVLTLTLFEDREMIEERLKTYAHLFDDKVMKQLKRRRYTGWGRLSRKLINGIRDKQSGKTILDFLKSDGFANRNFMQLIHDDSLTFKEDIQKAQVSGQGDSLHEHIANLAGSPAIKKGILQTVKVVDELVKVMGRHKPENIVIEMARENQTTQKGQKNSRERMKRIEEGIKELGSQILKEHPVENTQLQNEKLYLYYLQNGRDMYVDQELDINRLSDYDVDHIVPQSFLKDDSIDNKVLTRSDKARGKSDNVPSEEVVKKMKNYWRQLLNAKLITQRKFDNLTKAERGGLSELDKAGFIKRQLVETRQITKHVAQILDSRMNTKYDENDKLIREVKVITLKSKLVSDFRKDFQFYKVREINNYHHAHDAYLNAVVGTALIKKYPKLESEFVYGDYKVYDVRKMIAKSEQEIGKATAKYFFYSNIMNFFKTEITLANGEIRKRPLIETNGETGEIVWDKGRDFATVRKVLSMPQVNIVKKTEVQTGGFSKESILPKRNSDKLIARKKDWDPKKYGGFDSPTVAYSVLVVAKVEKGKSKKLKSVKELLGITIMERSSFEKNPIDFLEAKGYKEVKKDLIIKLPKYSLFELENGRKRMLASAGELQKGNELALPSKYVNFLYLASHYEKLKGSPEDNEQKQLFVEQHKHYLDEIIEQISEFSKRVILADANLDKVLSAYNKHRDKPIREQAENIIHLFTLTNLGAPAAFKYFDTTIDRKRYTSTKEVLDATLIHQSITGLYETRIDLSQLGGDGGEAAAKGGGPAPGGTLNIEDEYRLHETSKGPDVPLGSTWLSDFPQAWAETGGMGLAVRQAPLIIPLKATSTPVSIKQYPMSQEARLGIKPHIQRLLDQGILVPCQSPWNTPLLPVKKPGTNDYRPVQDLREVNKRVEDIHPTVPNPYNLLSGLPPSHQWYTVLDLKDAFFCLRLHPTSQSLFAFEWRDPEMGISGQLTWTRLPQGFKNSPTLFNEALHRDLADFRIQHPDLILLQYVDDLLLAATSELDCQQGTRALLQTLGDLGYRASAKKAQICQKQVKYLGYLLKEGQRWLTEARKETVMGQPTPKTPRQLREFLGKAGFCRLFIPGFAEMAAPLYPLTKPGTLFEWGPDQQKAYQEIKQALLTAPALGLPDLTKPFELFVDEKQGYAKGVLTQKLGPWRRPVAYLSKKLDPVAAGWPPCLRMVAAIAVLTKDAGKLTMGQPLVILAPHAVEALVKQPPDRWLSNARMTHYQALLLDTDRVQFGPIVALNPATLLPLPEEGLQHDCLDILAEAHGTRPDLTDQPLPDADHTWYTDGSSFLQEGQRKAGAAVTTETEVVWAKALPAGTSAQRAELIALTQALKMAEGKKLNVYTDSRYAFATAHIHGEIYRRRGWLTSEGKEIKNKDEILALLKALFLPKRLSIIHCPGHQKGNRAEARGNRMADQAAREVATRETPETSTLLAGKRTADGSEFEKRTADGSEFESPKKKAKVE

SEQ ID NO: 2557-2558 - skipped (2 entries)

SEQ ID NO: 2559 - protein, 2091 aa, synthetic construct
MPAAKRVKLDGGDKKYSIGLDIGTNSVGWAVITDEYKVPSKKFKVLGNTDRHSIKKNLIGALLFDSGETAEATRLKRTARRRYTRRKNRICYLQEIFSNEMAKVDDSFFHRLEESFLVEEDKKHERHPIFGNIVDEVAYHEKYPTIYHLRKKLVDSTDKADLRLIYLALAHMIKFRGHFLIEGDLNPDNSDVDKLFIQLVQTYNQLFEENPINASGVDAKAILSARLSKSRRLENLIAQLPGEKKNGLFGNLIALSLGLTPNFKSNFDLAEDAKLQLSKDTYDDDLDNLLAQIGDQYADLFLAAKNLSDAILLSDILRVNTEITKAPLSASMIKRYDEHHQDLTLLKALVRQQLPEKYKEIFFDQSKNGYAGYIDGGASQEEFYKFIKPILEKMDGTEELLVKLNREDLLRKQRTFDNGSIPHQIHLGELHAILRRQEDFYPFLKDNREKIEKILTFRIPYYVGPLARGNSRFAWMTRKSEETITPWNFEEVVDKGASAQSFIERMTNFDKNLPNEKVLPKHSLLYEYFTVYNELTKVKYVTEGMRKPAFLSGEQKKAIVDLLFKTNRKVTVKQLKEDYFKKIECFDSVEISGVEDRFNASLGTYHDLLKIIKDKDFLDNEENEDILEDIVLTLTLFEDREMIEERLKTYAHLFDDKVMKQLKRRRYTGWGRLSRKLINGIRDKQSGKTILDFLKSDGFANRNFMQLIHDDSLTFKEDIQKAQVSGQGDSLHEHIANLAGSPAIKKGILQTVKVVDELVKVMGRHKPENIVIEMARENQTTQKGQKNSRERMKRIEEGIKELGSQILKEHPVENTQLQNEKLYLYYLQNGRDMYVDQELDINRLSDYDVDHIVPQSFLKDDSIDNKVLTRSDKARGKSDNVPSEEVVKKMKNYWRQLLNAKLITQRKFDNLTKAERGGLSELDKAGFIKRQLVETRQITKHVAQILDSRMNTKYDENDKLIREVKVITLKSKLVSDFRKDFQFYKVREINNYHHAHDAYLNAVVGTALIKKYPKLESEFVYGDYKVYDVRKMIAKSEQEIGKATAKYFFYSNIMNFFKTEITLANGEIRKRPLIETNGETGEIVWDKGRDFATVRKVLSMPQVNIVKKTEVQTGGFSKESILPKRNSDKLIARKKDWDPKKYGGFDSPTVAYSVLVVAKVEKGKSKKLKSVKELLGITIMERSSFEKNPIDFLEAKGYKEVKKDLIIKLPKYSLFELENGRKRMLASAGELQKGNELALPSKYVNFLYLASHYEKLKGSPEDNEQKQLFVEQHKHYLDEIIEQISEFSKRVILADANLDKVLSAYNKHRDKPIREQAENIIHLFTLTNLGAPAAFKYFDTTIDRKRYTSTKEVLDATLIHQSITGLYETRIDLSQLGGDGGGGSGGGGGTLNIEDEYRLHETSKGPDVPLGSTWLSDFPQAWAETGGMGLAVRQAPLIIPLKATSTPVSIKQYPMSQEARLGIKPHIQRLLDQGILVPCQSPWNTPLLPVKKPGTNDYRPVQDLREVNKRVEDIHPTVPNPYNLLSGLPPSHQWYTVLDLKDAFFCLRLHPTSQSLFAFEWRDPEMGISGQLTWTRLPQGFKNSPTLFNEALHRDLADFRIQHPDLILLQYVDDLLLAATSELDCQQGTRALLQTLGDLGYRASAKKAQICQKQVKYLGYLLKEGQRWLTEARKETVMGQPTPKTPRQLREFLGKAGFCRLFIPGFAEMAAPLYPLTKPGTLFEWGPDQQKAYQEIKQALLTAPALGLPDLTKPFELFVDEKQGYAKGVLTQKLGPWRRPVAYLSKKLDPVAAGWPPCLRMVAAIAVLTKDAGKLTMGQPLVILAPHAVEALVKQPPDRWLSNARMTHYQALLLDTDRVQFGPIVALNPATLLPLPEEGLQHDCLDILAEAHGTRPDLTDQPLPDADHTWYTDGSSFLQEGQRKAGAAVTTETEVVWAKALPAGTSAQRAELIALTQALKMAEGKKLNVYTDSRYAFATAHIHGEIYRRRGWLTSEGKEIKNKDEILALLKALFLPKRLSIIHCPGHQKGNRAEARGNRMADQAAREVATRETPETSTLLAGKRTADGSEFEKRTADGSEFESPKKKAKVE

SEQ ID NO: 2560 - skipped

SEQ ID NO: 2561 - protein, 2100 aa, synthetic construct
MPAAKRVKLDGGDKKYSIGLDIGTNSVGWAVITDEYKVPSKKFKVLGNTDRHSIKKNLIGALLFDSGETAEATRLKRTARRRYTRRKNRICYLQEIFSNEMAKVDDSFFHRLEESFLVEEDKKHERHPIFGNIVDEVAYHEKYPTIYHLRKKLVDSTDKADLRLIYLALAHMIKFRGHFLIEGDLNPDNSDVDKLFIQLVQTYNQLFEENPINASGVDAKAILSARLSKSRRLENLIAQLPGEKKNGLFGNLIALSLGLTPNFKSNFDLAEDAKLQLSKDTYDDDLDNLLAQIGDQYADLFLAAKNLSDAILLSDILRVNTEITKAPLSASMIKRYDEHHQDLTLLKALVRQQLPEKYKEIFFDQSKNGYAGYIDGGASQEEFYKFIKPILEKMDGTEELLVKLNREDLLRKQRTFDNGSIPHQIHLGELHAILRRQEDFYPFLKDNREKIEKILTFRIPYYVGPLARGNSRFAWMTRKSEETITPWNFEEVVDKGASAQSFIERMTNFDKNLPNEKVLPKHSLLYEYFTVYNELTKVKYVTEGMRKPAFLSGEQKKAIVDLLFKTNRKVTVKQLKEDYFKKIECFDSVEISGVEDRFNASLGTYHDLLKIIKDKDFLDNEENEDILEDIVLTLTLFEDREMIEERLKTYAHLFDDKVMKQLKRRRYTGWGRLSRKLINGIRDKQSGKTILDFLKSDGFANRNFMQLIHDDSLTFKEDIQKAQVSGQGDSLHEHIANLAGSPAIKKGILQTVKVVDELVKVMGRHKPENIVIEMARENQTTQKGQKNSRERMKRIEEGIKELGSQILKEHPVENTQLQNEKLYLYYLQNGRDMYVDQELDINRLSDYDVDHIVPQSFLKDDSIDNKVLTRSDKARGKSDNVPSEEVVKKMKNYWRQLLNAKLITQRKFDNLTKAERGGLSELDKAGFIKRQLVETRQITKHVAQILDSRMNTKYDENDKLIREVKVITLKSKLVSDFRKDFQFYKVREINNYHHAHDAYLNAVVGTALIKKYPKLESEFVYGDYKVYDVRKMIAKSEQEIGKATAKYFFYSNIMNFFKTEITLANGEIRKRPLIETNGETGEIVWDKGRDFATVRKVLSMPQVNIVKKTEVQTGGFSKESILPKRNSDKLIARKKDWDPKKYGGFDSPTVAYSVLVVAKVEKGKSKKLKSVKELLGITIMERSSFEKNPIDFLEAKGYKEVKKDLIIKLPKYSLFELENGRKRMLASAGELQKGNELALPSKYVNFLYLASHYEKLKGSPEDNEQKQLFVEQHKHYLDEIIEQISEFSKRVILADANLDKVLSAYNKHRDKPIREQAENIIHLFTLTNLGAPAAFKYFDTTIDRKRYTSTKEVLDATLIHQSITGLYETRIDLSQLGGDGGEAAAKGGGGSEAAAKGGTLNIEDEYRLHETSKGPDVPLGSTWLSDFPQAWAETGGMGLAVRQAPLIIPLKATSTPVSIKQYPMSQEARLGIKPHIQRLLDQGILVPCQSPWNTPLLPVKKPGTNDYRPVQDLREVNKRVEDIHPTVPNPYNLLSGLPPSHQWYTVLDLKDAFFCLRLHPTSQSLFAFEWRDPEMGISGQLTWTRLPQGFKNSPTLFNEALHRDLADFRIQHPDLILLQYVDDLLLAATSELDCQQGTRALLQTLGDLGYRASAKKAQICQKQVKYLGYLLKEGQRWLTEARKETVMGQPTPKTPRQLREFLGKAGFCRLFIPGFAEMAAPLYPLTKPGTLFEWGPDQQKAYQEIKQALLTAPALGLPDLTKPFELFVDEKQGYAKGVLTQKLGPWRRPVAYLSKKLDPVAAGWPPCLRMVAAIAVLTKDAGKLTMGQPLVILAPHAVEALVKQPPDRWLSNARMTHYQALLLDTDRVQFGPIVALNPATLLPLPEEGLQHDCLDILAEAHGTRPDLTDQPLPDADHTWYTDGSSFLQEGQRKAGAAVTTETEVVWAKALPAGTSAQRAELIALTQALKMAEGKKLNVYTDSRYAFATAHIHGEIYRRRGWLTSEGKEIKNKDEILALLKALFLPKRLSIIHCPGHQKGNRAEARGNRMADQAAREVATRETPETSTLLAGKRTADGSEFEKRTADGSEFESPKKKAKVE

SEQ ID NO: 2562 - protein, 2091 aa, synthetic construct
MPAAKRVKLDGGDKKYSIGLDIGTNSVGWAVITDEYKVPSKKFKVLGNTDRHSIKKNLIGALLFDSGETAEATRLKRTARRRYTRRKNRICYLQEIFSNEMAKVDDSFFHRLEESFLVEEDKKHERHPIFGNIVDEVAYHEKYPTIYHLRKKLVDSTDKADLRLIYLALAHMIKFRGHFLIEGDLNPDNSDVDKLFIQLVQTYNQLFEENPINASGVDAKAILSARLSKSRRLENLIAQLPGEKKNGLFGNLIALSLGLTPNFKSNFDLAEDAKLQLSKDTYDDDLDNLLAQIGDQYADLFLAAKNLSDAILLSDILRVNTEITKAPLSASMIKRYDEHHQDLTLLKALVRQQLPEKYKEIFFDQSKNGYAGYIDGGASQEEFYKFIKPILEKMDGTEELLVKLNREDLLRKQRTFDNGSIPHQIHLGELHAILRRQEDFYPFLKDNREKIEKILTFRIPYYVGPLARGNSRFAWMTRKSEETITPWNFEEVVDKGASAQSFIERMTNFDKNLPNEKVLPKHSLLYEYFTVYNELTKVKYVTEGMRKPAFLSGEQKKAIVDLLFKTNRKVTVKQLKEDYFKKIECFDSVEISGVEDRFNASLGTYHDLLKIIKDKDFLDNEENEDILEDIVLTLTLFEDREMIEERLKTYAHLFDDKVMKQLKRRRYTGWGRLSRKLINGIRDKQSGKTILDFLKSDGFANRNFMQLIHDDSLTFKEDIQKAQVSGQGDSLHEHIANLAGSPAIKKGILQTVKVVDELVKVMGRHKPENIVIEMARENQTTQKGQKNSRERMKRIEEGIKELGSQILKEHPVENTQLQNEKLYLYYLQNGRDMYVDQELDINRLSDYDVDHIVPQSFLKDDSIDNKVLTRSDKARGKSDNVPSEEVVKKMKNYWRQLLNAKLITQRKFDNLTKAERGGLSELDKAGFIKRQLVETRQITKHVAQILDSRMNTKYDENDKLIREVKVITLKSKLVSDFRKDFQFYKVREINNYHHAHDAYLNAVVGTALIKKYPKLESEFVYGDYKVYDVRKMIAKSEQEIGKATAKYFFYSNIMNFFKTEITLANGEIRKRPLIETNGETGEIVWDKGRDFATVRKVLSMPQVNIVKKTEVQTGGFSKESILPKRNSDKLIARKKDWDPKKYGGFDSPTVAYSVLVVAKVEKGKSKKLKSVKELLGITIMERSSFEKNPIDFLEAKGYKEVKKDLIIKLPKYSLFELENGRKRMLASAGELQKGNELALPSKYVNFLYLASHYEKLKGSPEDNEQKQLFVEQHKHYLDEIIEQISEFSKRVILADANLDKVLSAYNKHRDKPIREQAENIIHLFTLTNLGAPAAFKYFDTTIDRKRYTSTKEVLDATLIHQSITGLYETRIDLSQLGGDGGGGGGGGGGTLNIEDEYRLHETSKGPDVPLGSTWLSDFPQAWAETGGMGLAVRQAPLIIPLKATSTPVSIKQYPMSQEARLGIKPHIQRLLDQGILVPCQSPWNTPLLPVKKPGTNDYRPVQDLREVNKRVEDIHPTVPNPYNLLSGLPPSHQWYTVLDLKDAFFCLRLHPTSQSLFAFEWRDPEMGISGQLTWTRLPQGFKNSPTLFNEALHRDLADFRIQHPDLILLQYVDDLLLAATSELDCQQGTRALLQTLGDLGYRASAKKAQICQKQVKYLGYLLKEGQRWLTEARKETVMGQPTPKTPRQLREFLGKAGFCRLFIPGFAEMAAPLYPLTKPGTLFEWGPDQQKAYQEIKQALLTAPALGLPDLTKPFELFVDEKQGYAKGVLTQKLGPWRRPVAYLSKKLDPVAAGWPPCLRMVAAIAVLTKDAGKLTMGQPLVILAPHAVEALVKQPPDRWLSNARMTHYQALLLDTDRVQFGPIVALNPATLLPLPEEGLQHDCLDILAEAHGTRPDLTDQPLPDADHTWYTDGSSFLQEGQRKAGAAVTTETEVVWAKALPAGTSAQRAELIALTQALKMAEGKKLNVYTDSRYAFATAHIHGEIYRRRGWLTSEGKEIKNKDEILALLKALFLPKRLSIIHCPGHQKGNRAEARGNRMADQAAREVATRETPETSTLLAGKRTADGSEFEKRTADGSEFESPKKKAKVE

SEQ ID NO: 2563-2565 - skipped (3 entries)

SEQ ID NO: 2566 - protein, 2115 aa, synthetic construct
MPAAKRVKLDGGDKKYSIGLDIGTNSVGWAVITDEYKVPSKKFKVLGNTDRHSIKKNLIGALLFDSGETAEATRLKRTARRRYTRRKNRICYLQEIFSNEMAKVDDSFFHRLEESFLVEEDKKHERHPIFGNIVDEVAYHEKYPTIYHLRKKLVDSTDKADLRLIYLALAHMIKFRGHFLIEGDLNPDNSDVDKLFIQLVQTYNQLFEENPINASGVDAKAILSARLSKSRRLENLIAQLPGEKKNGLFGNLIALSLGLTPNFKSNFDLAEDAKLQLSKDTYDDDLDNLLAQIGDQYADLFLAAKNLSDAILLSDILRVNTEITKAPLSASMIKRYDEHHQDLTLLKALVRQQLPEKYKEIFFDQSKNGYAGYIDGGASQEEFYKFIKPILEKMDGTEELLVKLNREDLLRKQRTFDNGSIPHQIHLGELHAILRRQEDFYPFLKDNREKIEKILTFRIPYYVGPLARGNSRFAWMTRKSEETITPWNFEEVVDKGASAQSFIERMTNFDKNLPNEKVLPKHSLLYEYFTVYNELTKVKYVTEGMRKPAFLSGEQKKAIVDLLFKTNRKVTVKQLKEDYFKKIECFDSVEISGVEDRFNASLGTYHDLLKIIKDKDFLDNEENEDILEDIVLTLTLFEDREMIEERLKTYAHLFDDKVMKQLKRRRYTGWGRLSRKLINGIRDKQSGKTILDFLKSDGFANRNFMQLIHDDSLTFKEDIQKAQVSGQGDSLHEHIANLAGSPAIKKGILQTVKVVDELVKVMGRHKPENIVIEMARENQTTQKGQKNSRERMKRIEEGIKELGSQILKEHPVENTQLQNEKLYLYYLQNGRDMYVDQELDINRLSDYDVDHIVPQSFLKDDSIDNKVLTRSDKARGKSDNVPSEEVVKKMKNYWRQLLNAKLITQRKFDNLTKAERGGLSELDKAGFIKRQLVETRQITKHVAQILDSRMNTKYDENDKLIREVKVITLKSKLVSDFRKDFQFYKVREINNYHHAHDAYLNAVVGTALIKKYPKLESEFVYGDYKVYDVRKMIAKSEQEIGKATAKYFFYSNIMNFFKTEITLANGEIRKRPLIETNGETGEIVWDKGRDFATVRKVLSMPQVNIVKKTEVQTGGFSKESILPKRNSDKLIARKKDWDPKKYGGFDSPTVAYSVLVVAKVEKGKSKKLKSVKELLGITIMERSSFEKNPIDFLEAKGYKEVKKDLIIKLPKYSLFELENGRKRMLASAGELQKGNELALPSKYVNFLYLASHYEKLKGSPEDNEQKQLFVEQHKHYLDEIIEQISEFSKRVILADANLDKVLSAYNKHRDKPIREQAENIIHLFTLTNLGAPAAFKYFDTTIDRKRYTSTKEVLDATLIHQSITGLYETRIDLSQLGGDGGGGGGSGGGGSGGGGSGGGGSGGGGSGGGGSGGTLNIEDEYRLHETSKGPDVPLGSTWLSDFPQAWAETGGMGLAVRQAPLIIPLKATSTPVSIKQYPMSQEARLGIKPHIQRLLDQGILVPCQSPWNTPLLPVKKPGTNDYRPVQDLREVNKRVEDIHPTVPNPYNLLSGLPPSHQWYTVLDLKDAFFCLRLHPTSQSLFAFEWRDPEMGISGQLTWTRLPQGFKNSPTLFNEALHRDLADFRIQHPDLILLQYVDDLLLAATSELDCQQGTRALLQTLGDLGYRASAKKAQICQKQVKYLGYLLKEGQRWLTEARKETVMGQPTPKTPRQLREFLGKAGFCRLFIPGFAEMAAPLYPLTKPGTLFEWGPDQQKAYQEIKQALLTAPALGLPDLTKPFELFVDEKQGYAKGVLTQKLGPWRRPVAYLSKKLDPVAAGWPPCLRMVAAIAVLTKDAGKLTMGQPLVILAPHAVEALVKQPPDRWLSNARMTHYQALLLDTDRVQFGPIVALNPATLLPLPEEGLQHDCLDILAEAHGTRPDLTDQPLPDADHTWYTDGSSFLQEGQRKAGAAVTTETEVVWAKALPAGTSAQRAELIALTQALKMAEGKKLNVYTDSRYAFATAHIHGEIYRRRGWLTSEGKEIKNKDEILALLKALFLPKRLSIIHCPGHQKGNRAEARGNRMADQAAREVATRETPETSTLLAGKRTADGSEFEKRTADGSEFESPKKKAKVE

SEQ ID NO: 2567 - skipped

SEQ ID NO: 2568 - protein, 2090 aa, synthetic construct
MPAAKRVKLDGGDKKYSIGLDIGTNSVGWAVITDEYKVPSKKFKVLGNTDRHSIKKNLIGALLFDSGETAEATRLKRTARRRYTRRKNRICYLQEIFSNEMAKVDDSFFHRLEESFLVEEDKKHERHPIFGNIVDEVAYHEKYPTIYHLRKKLVDSTDKADLRLIYLALAHMIKFRGHFLIEGDLNPDNSDVDKLFIQLVQTYNQLFEENPINASGVDAKAILSARLSKSRRLENLIAQLPGEKKNGLFGNLIALSLGLTPNFKSNFDLAEDAKLQLSKDTYDDDLDNLLAQIGDQYADLFLAAKNLSDAILLSDILRVNTEITKAPLSASMIKRYDEHHQDLTLLKALVRQQLPEKYKEIFFDQSKNGYAGYIDGGASQEEFYKFIKPILEKMDGTEELLVKLNREDLLRKQRTFDNGSIPHQIHLGELHAILRRQEDFYPFLKDNREKIEKILTFRIPYYVGPLARGNSRFAWMTRKSEETITPWNFEEVVDKGASAQSFIERMTNFDKNLPNEKVLPKHSLLYEYFTVYNELTKVKYVTEGMRKPAFLSGEQKKAIVDLLFKTNRKVTVKQLKEDYFKKIECFDSVEISGVEDRFNASLGTYHDLLKIIKDKDFLDNEENEDILEDIVLTLTLFEDREMIEERLKTYAHLFDDKVMKQLKRRRYTGWGRLSRKLINGIRDKQSGKTILDFLKSDGFANRNFMQLIHDDSLTFKEDIQKAQVSGQGDSLHEHIANLAGSPAIKKGILQTVKVVDELVKVMGRHKPENIVIEMARENQTTQKGQKNSRERMKRIEEGIKELGSQILKEHPVENTQLQNEKLYLYYLQNGRDMYVDQELDINRLSDYDVDHIVPQSFLKDDSIDNKVLTRSDKARGKSDNVPSEEVVKKMKNYWRQLLNAKLITQRKFDNLTKAERGGLSELDKAGFIKRQLVETRQITKHVAQILDSRMNTKYDENDKLIREVKVITLKSKLVSDFRKDFQFYKVREINNYHHAHDAYLNAVVGTALIKKYPKLESEFVYGDYKVYDVRKMIAKSEQEIGKATAKYFFYSNIMNFFKTEITLANGEIRKRPLIETNGETGEIVWDKGRDFATVRKVLSMPQVNIVKKTEVQTGGFSKESILPKRNSDKLIARKKDWDPKKYGGFDSPTVAYSVLVVAKVEKGKSKKLKSVKELLGITIMERSSFEKNPIDFLEAKGYKEVKKDLIIKLPKYSLFELENGRKRMLASAGELQKGNELALPSKYVNFLYLASHYEKLKGSPEDNEQKQLFVEQHKHYLDEIIEQISEFSKRVILADANLDKVLSAYNKHRDKPIREQAENIIHLFTLTNLGAPAAFKYFDTTIDRKRYTSTKEVLDATLIHQSITGLYETRIDLSQLGGDGGPAPAPGGTLNIEDEYRLHETSKGPDVPLGSTWLSDFPQAWAETGGMGLAVRQAPLIIPLKATSTPVSIKQYPMSQEARLGIKPHIQRLLDQGILVPCQSPWNTPLLPVKKPGTNDYRPVQDLREVNKRVEDIHPTVPNPYNLLSGLPPSHQWYTVLDLKDAFFCLRLHPTSQSLFAFEWRDPEMGISGQLTWTRLPQGFKNSPTLFNEALHRDLADFRIQHPDLILLQYVDDLLLAATSELDCQQGTRALLQTLGDLGYRASAKKAQICQKQVKYLGYLLKEGQRWLTEARKETVMGQPTPKTPRQLREFLGKAGFCRLFIPGFAEMAAPLYPLTKPGTLFEWGPDQQKAYQEIKQALLTAPALGLPDLTKPFELFVDEKQGYAKGVLTQKLGPWRRPVAYLSKKLDPVAAGWPPCLRMVAAIAVLTKDAGKLTMGQPLVILAPHAVEALVKQPPDRWLSNARMTHYQALLLDTDRVQFGPIVALNPATLLPLPEEGLQHDCLDILAEAHGTRPDLTDQPLPDADHTWYTDGSSFLQEGQRKAGAAVTTETEVVWAKALPAGTSAQRAELIALTQALKMAEGKKLNVYTDSRYAFATAHIHGEIYRRRGWLTSEGKEIKNKDEILALLKALFLPKRLSIIHCPGHQKGNRAEARGNRMADQAAREVATRETPETSTLLAGKRTADGSEFEKRTADGSEFESPKKKAKVE

SEQ ID NO: 2569-2572 - skipped (4 entries)

SEQ ID NO: 2573 - protein, 2094 aa, synthetic construct
MPAAKRVKLDGGDKKYSIGLDIGTNSVGWAVITDEYKVPSKKFKVLGNTDRHSIKKNLIGALLFDSGETAEATRLKRTARRRYTRRKNRICYLQEIFSNEMAKVDDSFFHRLEESFLVEEDKKHERHPIFGNIVDEVAYHEKYPTIYHLRKKLVDSTDKADLRLIYLALAHMIKFRGHFLIEGDLNPDNSDVDKLFIQLVQTYNQLFEENPINASGVDAKAILSARLSKSRRLENLIAQLPGEKKNGLFGNLIALSLGLTPNFKSNFDLAEDAKLQLSKDTYDDDLDNLLAQIGDQYADLFLAAKNLSDAILLSDILRVNTEITKAPLSASMIKRYDEHHQDLTLLKALVRQQLPEKYKEIFFDQSKNGYAGYIDGGASQEEFYKFIKPILEKMDGTEELLVKLNREDLLRKQRTFDNGSIPHQIHLGELHAILRRQEDFYPFLKDNREKIEKILTFRIPYYVGPLARGNSRFAWMTRKSEETITPWNFEEVVDKGASAQSFIERMTNFDKNLPNEKVLPKHSLLYEYFTVYNELTKVKYVTEGMRKPAFLSGEQKKAIVDLLFKTNRKVTVKQLKEDYFKKIECFDSVEISGVEDRFNASLGTYHDLLKIIKDKDFLDNEENEDILEDIVLTLTLFEDREMIEERLKTYAHLFDDKVMKQLKRRRYTGWGRLSRKLINGIRDKQSGKTILDFLKSDGFANRNFMQLIHDDSLTFKEDIQKAQVSGQGDSLHEHIANLAGSPAIKKGILQTVKVVDELVKVMGRHKPENIVIEMARENQTTQKGQKNSRERMKRIEEGIKELGSQILKEHPVENTQLQNEKLYLYYLQNGRDMYVDQELDINRLSDYDVDHIVPQSFLKDDSIDNKVLTRSDKARGKSDNVPSEEVVKKMKNYWRQLLNAKLITQRKFDNLTKAERGGLSELDKAGFIKRQLVETRQITKHVAQILDSRMNTKYDENDKLIREVKVITLKSKLVSDFRKDFQFYKVREINNYHHAHDAYLNAVVGTALIKKYPKLESEFVYGDYKVYDVRKMIAKSEQEIGKATAKYFFYSNIMNFFKTEITLANGEIRKRPLIETNGETGEIVWDKGRDFATVRKVLSMPQVNIVKKTEVQTGGFSKESILPKRNSDKLIARKKDWDPKKYGGFDSPTVAYSVLVVAKVEKGKSKKLKSVKELLGITIMERSSFEKNPIDFLEAKGYKEVKKDLIIKLPKYSLFELENGRKRMLASAGELQKGNELALPSKYVNFLYLASHYEKLKGSPEDNEQKQLFVEQHKHYLDEIIEQISEFSKRVILADANLDKVLSAYNKHRDKPIREQAENIIHLFTLTNLGAPAAFKYFDTTIDRKRYTSTKEVLDATLIHQSITGLYETRIDLSQLGGDGGGGSPAPGGGGGTLNIEDEYRLHETSKGPDVPLGSTWLSDFPQAWAETGGMGLAVRQAPLIIPLKATSTPVSIKQYPMSQEARLGIKPHIQRLLDQGILVPCQSPWNTPLLPVKKPGTNDYRPVQDLREVNKRVEDIHPTVPNPYNLLSGLPPSHQWYTVLDLKDAFFCLRLHPTSQSLFAFEWRDPEMGISGQLTWTRLPQGFKNSPTLFNEALHRDLADFRIQHPDLILLQYVDDLLLAATSELDCQQGTRALLQTLGDLGYRASAKKAQICQKQVKYLGYLLKEGQRWLTEARKETVMGQPTPKTPRQLREFLGKAGFCRLFIPGFAEMAAPLYPLTKPGTLFEWGPDQQKAYQEIKQALLTAPALGLPDLTKPFELFVDEKQGYAKGVLTQKLGPWRRPVAYLSKKLDPVAAGWPPCLRMVAAIAVLTKDAGKLTMGQPLVILAPHAVEALVKQPPDRWLSNARMTHYQALLLDTDRVQFGPIVALNPATLLPLPEEGLQHDCLDILAEAHGTRPDLTDQPLPDADHTWYTDGSSFLQEGQRKAGAAVTTETEVVWAKALPAGTSAQRAELIALTQALKMAEGKKLNVYTDSRYAFATAHIHGEIYRRRGWLTSEGKEIKNKDEILALLKALFLPKRLSIIHCPGHQKGNRAEARGNRMADQAAREVATRETPETSTLLAGKRTADGSEFEKRTADGSEFESPKKKAKVE

SEQ ID NO: 2574-2577 - skipped (4 entries)

SEQ ID NO: 2578 - protein, 2096 aa, synthetic construct
MPAAKRVKLDGGDKKYSIGLDIGTNSVGWAVITDEYKVPSKKFKVLGNTDRHSIKKNLIGALLFDSGETAEATRLKRTARRRYTRRKNRICYLQEIFSNEMAKVDDSFFHRLEESFLVEEDKKHERHPIFGNIVDEVAYHEKYPTIYHLRKKLVDSTDKADLRLIYLALAHMIKFRGHFLIEGDLNPDNSDVDKLFIQLVQTYNQLFEENPINASGVDAKAILSARLSKSRRLENLIAQLPGEKKNGLFGNLIALSLGLTPNFKSNFDLAEDAKLQLSKDTYDDDLDNLLAQIGDQYADLFLAAKNLSDAILLSDILRVNTEITKAPLSASMIKRYDEHHQDLTLLKALVRQQLPEKYKEIFFDQSKNGYAGYIDGGASQEEFYKFIKPILEKMDGTEELLVKLNREDLLRKQRTFDNGSIPHQIHLGELHAILRRQEDFYPFLKDNREKIEKILTFRIPYYVGPLARGNSRFAWMTRKSEETITPWNFEEVVDKGASAQSFIERMTNFDKNLPNEKVLPKHSLLYEYFTVYNELTKVKYVTEGMRKPAFLSGEQKKAIVDLLFKTNRKVTVKQLKEDYFKKIECFDSVEISGVEDRFNASLGTYHDLLKIIKDKDFLDNEENEDILEDIVLTLTLFEDREMIEERLKTYAHLFDDKVMKQLKRRRYTGWGRLSRKLINGIRDKQSGKTILDFLKSDGFANRNFMQLIHDDSLTFKEDIQKAQVSGQGDSLHEHIANLAGSPAIKKGILQTVKVVDELVKVMGRHKPENIVIEMARENQTTQKGQKNSRERMKRIEEGIKELGSQILKEHPVENTQLQNEKLYLYYLQNGRDMYVDQELDINRLSDYDVDHIVPQSFLKDDSIDNKVLTRSDKARGKSDNVPSEEVVKKMKNYWRQLLNAKLITQRKFDNLTKAERGGLSELDKAGFIKRQLVETRQITKHVAQILDSRMNTKYDENDKLIREVKVITLKSKLVSDFRKDFQFYKVREINNYHHAHDAYLNAVVGTALIKKYPKLESEFVYGDYKVYDVRKMIAKSEQEIGKATAKYFFYSNIMNFFKTEITLANGEIRKRPLIETNGETGEIVWDKGRDFATVRKVLSMPQVNIVKKTEVQTGGFSKESILPKRNSDKLIARKKDWDPKKYGGFDSPTVAYSVLVVAKVEKGKSKKLKSVKELLGITIMERSSFEKNPIDFLEAKGYKEVKKDLIIKLPKYSLFELENGRKRMLASAGELQKGNELALPSKYVNFLYLASHYEKLKGSPEDNEQKQLFVEQHKHYLDEIIEQISEFSKRVILADANLDKVLSAYNKHRDKPIREQAENIIHLFTLTNLGAPAAFKYFDTTIDRKRYTSTKEVLDATLIHQSITGLYETRIDLSQLGGDGGGGSEAAAKGGGGGTLNIEDEYRLHETSKGPDVPLGSTWLSDFPQAWAETGGMGLAVRQAPLIIPLKATSTPVSIKQYPMSQEARLGIKPHIQRLLDQGILVPCQSPWNTPLLPVKKPGTNDYRPVQDLREVNKRVEDIHPTVPNPYNLLSGLPPSHQWYTVLDLKDAFFCLRLHPTSQSLFAFEWRDPEMGISGQLTWTRLPQGFKNSPTLFNEALHRDLADFRIQHPDLILLQYVDDLLLAATSELDCQQGTRALLQTLGDLGYRASAKKAQICQKQVKYLGYLLKEGQRWLTEARKETVMGQPTPKTPRQLREFLGKAGFCRLFIPGFAEMAAPLYPLTKPGTLFEWGPDQQKAYQEIKQALLTAPALGLPDLTKPFELFVDEKQGYAKGVLTQKLGPWRRPVAYLSKKLDPVAAGWPPCLRMVAAIAVLTKDAGKLTMGQPLVILAPHAVEALVKQPPDRWLSNARMTHYQALLLDTDRVQFGPIVALNPATLLPLPEEGLQHDCLDILAEAHGTRPDLTDQPLPDADHTWYTDGSSFLQEGQRKAGAAVTTETEVVWAKALPAGTSAQRAELIALTQALKMAEGKKLNVYTDSRYAFATAHIHGEIYRRRGWLTSEGKEIKNKDEILALLKALFLPKRLSIIHCPGHQKGNRAEARGNRMADQAAREVATRETPETSTLLAGKRTADGSEFEKRTADGSEFESPKKKAKVE

SEQ ID NO: 2579-2582 - skipped (4 entries)

SEQ ID NO: 2583 - protein, 2097 aa, synthetic construct
MPAAKRVKLDGGDKKYSIGLDIGTNSVGWAVITDEYKVPSKKFKVLGNTDRHSIKKNLIGALLFDSGETAEATRLKRTARRRYTRRKNRICYLQEIFSNEMAKVDDSFFHRLEESFLVEEDKKHERHPIFGNIVDEVAYHEKYPTIYHLRKKLVDSTDKADLRLIYLALAHMIKFRGHFLIEGDLNPDNSDVDKLFIQLVQTYNQLFEENPINASGVDAKAILSARLSKSRRLENLIAQLPGEKKNGLFGNLIALSLGLTPNFKSNFDLAEDAKLQLSKDTYDDDLDNLLAQIGDQYADLFLAAKNLSDAILLSDILRVNTEITKAPLSASMIKRYDEHHQDLTLLKALVRQQLPEKYKEIFFDQSKNGYAGYIDGGASQEEFYKFIKPILEKMDGTEELLVKLNREDLLRKQRTFDNGSIPHQIHLGELHAILRRQEDFYPFLKDNREKIEKILTFRIPYYVGPLARGNSRFAWMTRKSEETITPWNFEEVVDKGASAQSFIERMTNFDKNLPNEKVLPKHSLLYEYFTVYNELTKVKYVTEGMRKPAFLSGEQKKAIVDLLFKTNRKVTVKQLKEDYFKKIECFDSVEISGVEDRFNASLGTYHDLLKIIKDKDFLDNEENEDILEDIVLTLTLFEDREMIEERLKTYAHLFDDKVMKQLKRRRYTGWGRLSRKLINGIRDKQSGKTILDFLKSDGFANRNFMQLIHDDSLTFKEDIQKAQVSGQGDSLHEHIANLAGSPAIKKGILQTVKVVDELVKVMGRHKPENIVIEMARENQTTQKGQKNSRERMKRIEEGIKELGSQILKEHPVENTQLQNEKLYLYYLQNGRDMYVDQELDINRLSDYDVDHIVPQSFLKDDSIDNKVLTRSDKARGKSDNVPSEEVVKKMKNYWRQLLNAKLITQRKFDNLTKAERGGLSELDKAGFIKRQLVETRQITKHVAQILDSRMNTKYDENDKLIREVKVITLKSKLVSDFRKDFQFYKVREINNYHHAHDAYLNAVVGTALIKKYPKLESEFVYGDYKVYDVRKMIAKSEQEIGKATAKYFFYSNIMNFFKTEITLANGEIRKRPLIETNGETGEIVWDKGRDFATVRKVLSMPQVNIVKKTEVQTGGFSKESILPKRNSDKLIARKKDWDPKKYGGFDSPTVAYSVLVVAKVEKGKSKKLKSVKELLGITIMERSSFEKNPIDFLEAKGYKEVKKDLIIKLPKYSLFELENGRKRMLASAGELQKGNELALPSKYVNFLYLASHYEKLKGSPEDNEQKQLFVEQHKHYLDEIIEQISEFSKRVILADANLDKVLSAYNKHRDKPIREQAENIIHLFTLTNLGAPAAFKYFDTTIDRKRYTSTKEVLDATLIHQSITGLYETRIDLSQLGGDGGGSAGSAAGSGEFGGTLNIEDEYRLHETSKGPDVPLGSTWLSDFPQAWAETGGMGLAVRQAPLIIPLKATSTPVSIKQYPMSQEARLGIKPHIQRLLDQGILVPCQSPWNTPLLPVKKPGTNDYRPVQDLREVNKRVEDIHPTVPNPYNLLSGLPPSHQWYTVLDLKDAFFCLRLHPTSQSLFAFEWRDPEMGISGQLTWTRLPQGFKNSPTLFNEALHRDLADFRIQHPDLILLQYVDDLLLAATSELDCQQGTRALLQTLGDLGYRASAKKAQICQKQVKYLGYLLKEGQRWLTEARKETVMGQPTPKTPRQLREFLGKAGFCRLFIPGFAEMAAPLYPLTKPGTLFEWGPDQQKAYQEIKQALLTAPALGLPDLTKPFELFVDEKQGYAKGVLTQKLGPWRRPVAYLSKKLDPVAAGWPPCLRMVAAIAVLTKDAGKLTMGQPLVILAPHAVEALVKQPPDRWLSNARMTHYQALLLDTDRVQFGPIVALNPATLLPLPEEGLQHDCLDILAEAHGTRPDLTDQPLPDADHTWYTDGSSFLQEGQRKAGAAVTTETEVVWAKALPAGTSAQRAELIALTQALKMAEGKKLNVYTDSRYAFATAHIHGEIYRRRGWLTSEGKEIKNKDEILALLKALFLPKRLSIIHCPGHQKGNRAEARGNRMADQAAREVATRETPETSTLLAGKRTADGSEFEKRTADGSEFESPKKKAKVE

SEQ ID NO: 2584 - skipped

SEQ ID NO: 2585 - protein, 2093 aa, synthetic construct
MPAAKRVKLDGGDKKYSIGLDIGTNSVGWAVITDEYKVPSKKFKVLGNTDRHSIKKNLIGALLFDSGETAEATRLKRTARRRYTRRKNRICYLQEIFSNEMAKVDDSFFHRLEESFLVEEDKKHERHPIFGNIVDEVAYHEKYPTIYHLRKKLVDSTDKADLRLIYLALAHMIKFRGHFLIEGDLNPDNSDVDKLFIQLVQTYNQLFEENPINASGVDAKAILSARLSKSRRLENLIAQLPGEKKNGLFGNLIALSLGLTPNFKSNFDLAEDAKLQLSKDTYDDDLDNLLAQIGDQYADLFLAAKNLSDAILLSDILRVNTEITKAPLSASMIKRYDEHHQDLTLLKALVRQQLPEKYKEIFFDQSKNGYAGYIDGGASQEEFYKFIKPILEKMDGTEELLVKLNREDLLRKQRTFDNGSIPHQIHLGELHAILRRQEDFYPFLKDNREKIEKILTFRIPYYVGPLARGNSRFAWMTRKSEETITPWNFEEVVDKGASAQSFIERMTNFDKNLPNEKVLPKHSLLYEYFTVYNELTKVKYVTEGMRKPAFLSGEQKKAIVDLLFKTNRKVTVKQLKEDYFKKIECFDSVEISGVEDRFNASLGTYHDLLKIIKDKDFLDNEENEDILEDIVLTLTLFEDREMIEERLKTYAHLFDDKVMKQLKRRRYTGWGRLSRKLINGIRDKQSGKTILDFLKSDGFANRNFMQLIHDDSLTFKEDIQKAQVSGQGDSLHEHIANLAGSPAIKKGILQTVKVVDELVKVMGRHKPENIVIEMARENQTTQKGQKNSRERMKRIEEGIKELGSQILKEHPVENTQLQNEKLYLYYLQNGRDMYVDQELDINRLSDYDVDHIVPQSFLKDDSIDNKVLTRSDKARGKSDNVPSEEVVKKMKNYWRQLLNAKLITQRKFDNLTKAERGGLSELDKAGFIKRQLVETRQITKHVAQILDSRMNTKYDENDKLIREVKVITLKSKLVSDFRKDFQFYKVREINNYHHAHDAYLNAVVGTALIKKYPKLESEFVYGDYKVYDVRKMIAKSEQEIGKATAKYFFYSNIMNFFKTEITLANGEIRKRPLIETNGETGEIVWDKGRDFATVRKVLSMPQVNIVKKTEVQTGGFSKESILPKRNSDKLIARKKDWDPKKYGGFDSPTVAYSVLVVAKVEKGKSKKLKSVKELLGITIMERSSFEKNPIDFLEAKGYKEVKKDLIIKLPKYSLFELENGRKRMLASAGELQKGNELALPSKYVNFLYLASHYEKLKGSPEDNEQKQLFVEQHKHYLDEIIEQISEFSKRVILADANLDKVLSAYNKHRDKPIREQAENIIHLFTLTNLGAPAAFKYFDTTIDRKRYTSTKEVLDATLIHQSITGLYETRIDLSQLGGDGGEAAAKGSSGGTLNIEDEYRLHETSKGPDVPLGSTWLSDFPQAWAETGGMGLAVRQAPLIIPLKATSTPVSIKQYPMSQEARLGIKPHIQRLLDQGILVPCQSPWNTPLLPVKKPGTNDYRPVQDLREVNKRVEDIHPTVPNPYNLLSGLPPSHQWYTVLDLKDAFFCLRLHPTSQSLFAFEWRDPEMGISGQLTWTRLPQGFKNSPTLFNEALHRDLADFRIQHPDLILLQYVDDLLLAATSELDCQQGTRALLQTLGDLGYRASAKKAQICQKQVKYLGYLLKEGQRWLTEARKETVMGQPTPKTPRQLREFLGKAGFCRLFIPGFAEMAAPLYPLTKPGTLFEWGPDQQKAYQEIKQALLTAPALGLPDLTKPFELFVDEKQGYAKGVLTQKLGPWRRPVAYLSKKLDPVAAGWPPCLRMVAAIAVLTKDAGKLTMGQPLVILAPHAVEALVKQPPDRWLSNARMTHYQALLLDTDRVQFGPIVALNPATLLPLPEEGLQHDCLDILAEAHGTRPDLTDQPLPDADHTWYTDGSSFLQEGQRKAGAAVTTETEVVWAKALPAGTSAQRAELIALTQALKMAEGKKLNVYTDSRYAFATAHIHGEIYRRRGWLTSEGKEIKNKDEILALLKALFLPKRLSIIHCPGHQKGNRAEARGNRMADQAAREVATRETPETSTLLAGKRTADGSEFEKRTADGSEFESPKKKAKVE

SEQ ID NO: 2586-2591 - skipped (6 entries)

SEQ ID NO: 2592 - protein, 2096 aa, synthetic construct
MPAAKRVKLDGGDKKYSIGLDIGTNSVGWAVITDEYKVPSKKFKVLGNTDRHSIKKNLIGALLFDSGETAEATRLKRTARRRYTRRKNRICYLQEIFSNEMAKVDDSFFHRLEESFLVEEDKKHERHPIFGNIVDEVAYHEKYPTIYHLRKKLVDSTDKADLRLIYLALAHMIKFRGHFLIEGDLNPDNSDVDKLFIQLVQTYNQLFEENPINASGVDAKAILSARLSKSRRLENLIAQLPGEKKNGLFGNLIALSLGLTPNFKSNFDLAEDAKLQLSKDTYDDDLDNLLAQIGDQYADLFLAAKNLSDAILLSDILRVNTEITKAPLSASMIKRYDEHHQDLTLLKALVRQQLPEKYKEIFFDQSKNGYAGYIDGGASQEEFYKFIKPILEKMDGTEELLVKLNREDLLRKQRTFDNGSIPHQIHLGELHAILRRQEDFYPFLKDNREKIEKILTFRIPYYVGPLARGNSRFAWMTRKSEETITPWNFEEVVDKGASAQSFIERMTNFDKNLPNEKVLPKHSLLYEYFTVYNELTKVKYVTEGMRKPAFLSGEQKKAIVDLLFKTNRKVTVKQLKEDYFKKIECFDSVEISGVEDRFNASLGTYHDLLKIIKDKDFLDNEENEDILEDIVLTLTLFEDREMIEERLKTYAHLFDDKVMKQLKRRRYTGWGRLSRKLINGIRDKQSGKTILDFLKSDGFANRNFMQLIHDDSLTFKEDIQKAQVSGQGDSLHEHIANLAGSPAIKKGILQTVKVVDELVKVMGRHKPENIVIEMARENQTTQKGQKNSRERMKRIEEGIKELGSQILKEHPVENTQLQNEKLYLYYLQNGRDMYVDQELDINRLSDYDVDHIVPQSFLKDDSIDNKVLTRSDKARGKSDNVPSEEVVKKMKNYWRQLLNAKLITQRKFDNLTKAERGGLSELDKAGFIKRQLVETRQITKHVAQILDSRMNTKYDENDKLIREVKVITLKSKLVSDFRKDFQFYKVREINNYHHAHDAYLNAVVGTALIKKYPKLESEFVYGDYKVYDVRKMIAKSEQEIGKATAKYFFYSNIMNFFKTEITLANGEIRKRPLIETNGETGEIVWDKGRDFATVRKVLSMPQVNIVKKTEVQTGGFSKESILPKRNSDKLIARKKDWDPKKYGGFDSPTVAYSVLVVAKVEKGKSKKLKSVKELLGITIMERSSFEKNPIDFLEAKGYKEVKKDLIIKLPKYSLFELENGRKRMLASAGELQKGNELALPSKYVNFLYLASHYEKLKGSPEDNEQKQLFVEQHKHYLDEIIEQISEFSKRVILADANLDKVLSAYNKHRDKPIREQAENIIHLFTLTNLGAPAAFKYFDTTIDRKRYTSTKEVLDATLIHQSITGLYETRIDLSQLGGDGGGGGPAPEAAAKGGTLNIEDEYRLHETSKGPDVPLGSTWLSDFPQAWAETGGMGLAVRQAPLIIPLKATSTPVSIKQYPMSQEARLGIKPHIQRLLDQGILVPCQSPWNTPLLPVKKPGTNDYRPVQDLREVNKRVEDIHPTVPNPYNLLSGLPPSHQWYTVLDLKDAFFCLRLHPTSQSLFAFEWRDPEMGISGQLTWTRLPQGFKNSPTLFNEALHRDLADFRIQHPDLILLQYVDDLLLAATSELDCQQGTRALLQTLGDLGYRASAKKAQICQKQVKYLGYLLKEGQRWLTEARKETVMGQPTPKTPRQLREFLGKAGFCRLFIPGFAEMAAPLYPLTKPGTLFEWGPDQQKAYQEIKQALLTAPALGLPDLTKPFELFVDEKQGYAKGVLTQKLGPWRRPVAYLSKKLDPVAAGWPPCLRMVAAIAVLTKDAGKLTMGQPLVILAPHAVEALVKQPPDRWLSNARMTHYQALLLDTDRVQFGPIVALNPATLLPLPEEGLQHDCLDILAEAHGTRPDLTDQPLPDADHTWYTDGSSFLQEGQRKAGAAVTTETEVVWAKALPAGTSAQRAELIALTQALKMAEGKKLNVYTDSRYAFATAHIHGEIYRRRGWLTSEGKEIKNKDEILALLKALFLPKRLSIIHCPGHQKGNRAEARGNRMADQAAREVATRETPETSTLLAGKRTADGSEFEKRTADGSEFESPKKKAKVE

SEQ ID NO: 2593-2598 - skipped (6 entries)

SEQ ID NO: 2599 - protein, 2096 aa, synthetic construct
MPAAKRVKLDGGDKKYSIGLDIGTNSVGWAVITDEYKVPSKKFKVLGNTDRHSIKKNLIGALLFDSGETAEATRLKRTARRRYTRRKNRICYLQEIFSNEMAKVDDSFFHRLEESFLVEEDKKHERHPIFGNIVDEVAYHEKYPTIYHLRKKLVDSTDKADLRLIYLALAHMIKFRGHFLIEGDLNPDNSDVDKLFIQLVQTYNQLFEENPINASGVDAKAILSARLSKSRRLENLIAQLPGEKKNGLFGNLIALSLGLTPNFKSNFDLAEDAKLQLSKDTYDDDLDNLLAQIGDQYADLFLAAKNLSDAILLSDILRVNTEITKAPLSASMIKRYDEHHQDLTLLKALVRQQLPEKYKEIFFDQSKNGYAGYIDGGASQEEFYKFIKPILEKMDGTEELLVKLNREDLLRKQRTFDNGSIPHQIHLGELHAILRRQEDFYPFLKDNREKIEKILTFRIPYYVGPLARGNSRFAWMTRKSEETITPWNFEEVVDKGASAQSFIERMTNFDKNLPNEKVLPKHSLLYEYFTVYNELTKVKYVTEGMRKPAFLSGEQKKAIVDLLFKTNRKVTVKQLKEDYFKKIECFDSVEISGVEDRFNASLGTYHDLLKIIKDKDFLDNEENEDILEDIVLTLTLFEDREMIEERLKTYAHLFDDKVMKQLKRRRYTGWGRLSRKLINGIRDKQSGKTILDFLKSDGFANRNFMQLIHDDSLTFKEDIQKAQVSGQGDSLHEHIANLAGSPAIKKGILQTVKVVDELVKVMGRHKPENIVIEMARENQTTQKGQKNSRERMKRIEEGIKELGSQILKEHPVENTQLQNEKLYLYYLQNGRDMYVDQELDINRLSDYDVDHIVPQSFLKDDSIDNKVLTRSDKARGKSDNVPSEEVVKKMKNYWRQLLNAKLITQRKFDNLTKAERGGLSELDKAGFIKRQLVETRQITKHVAQILDSRMNTKYDENDKLIREVKVITLKSKLVSDFRKDFQFYKVREINNYHHAHDAYLNAVVGTALIKKYPKLESEFVYGDYKVYDVRKMIAKSEQEIGKATAKYFFYSNIMNFFKTEITLANGEIRKRPLIETNGETGEIVWDKGRDFATVRKVLSMPQVNIVKKTEVQTGGFSKESILPKRNSDKLIARKKDWDPKKYGGFDSPTVAYSVLVVAKVEKGKSKKLKSVKELLGITIMERSSFEKNPIDFLEAKGYKEVKKDLIIKLPKYSLFELENGRKRMLASAGELQKGNELALPSKYVNFLYLASHYEKLKGSPEDNEQKQLFVEQHKHYLDEIIEQISEFSKRVILADANLDKVLSAYNKHRDKPIREQAENIIHLFTLTNLGAPAAFKYFDTTIDRKRYTSTKEVLDATLIHQSITGLYETRIDLSQLGGDGGGSSPAPEAAAKGGTLNIEDEYRLHETSKGPDVPLGSTWLSDFPQAWAETGGMGLAVRQAPLIIPLKATSTPVSIKQYPMSQEARLGIKPHIQRLLDQGILVPCQSPWNTPLLPVKKPGTNDYRPVQDLREVNKRVEDIHPTVPNPYNLLSGLPPSHQWYTVLDLKDAFFCLRLHPTSQSLFAFEWRDPEMGISGQLTWTRLPQGFKNSPTLFNEALHRDLADFRIQHPDLILLQYVDDLLLAATSELDCQQGTRALLQTLGDLGYRASAKKAQICQKQVKYLGYLLKEGQRWLTEARKETVMGQPTPKTPRQLREFLGKAGFCRLFIPGFAEMAAPLYPLTKPGTLFEWGPDQQKAYQEIKQALLTAPALGLPDLTKPFELFVDEKQGYAKGVLTQKLGPWRRPVAYLSKKLDPVAAGWPPCLRMVAAIAVLTKDAGKLTMGQPLVILAPHAVEALVKQPPDRWLSNARMTHYQALLLDTDRVQFGPIVALNPATLLPLPEEGLQHDCLDILAEAHGTRPDLTDQPLPDADHTWYTDGSSFLQEGQRKAGAAVTTETEVVWAKALPAGTSAQRAELIALTQALKMAEGKKLNVYTDSRYAFATAHIHGEIYRRRGWLTSEGKEIKNKDEILALLKALFLPKRLSIIHCPGHQKGNRAEARGNRMADQAAREVATRETPETSTLLAGKRTADGSEFEKRTADGSEFESPKKKAKVE

SEQ ID NO: 2600-2609 - skipped (10 entries)

SEQ ID NO: 2610 - protein, 2125 aa, synthetic construct
MPAAKRVKLDGGDKKYSIGLDIGTNSVGWAVITDEYKVPSKKFKVLGNTDRHSIKKNLIGALLFDSGETAEATRLKRTARRRYTRRKNRICYLQEIFSNEMAKVDDSFFHRLEESFLVEEDKKHERHPIFGNIVDEVAYHEKYPTIYHLRKKLVDSTDKADLRLIYLALAHMIKFRGHFLIEGDLNPDNSDVDKLFIQLVQTYNQLFEENPINASGVDAKAILSARLSKSRRLENLIAQLPGEKKNGLFGNLIALSLGLTPNFKSNFDLAEDAKLQLSKDTYDDDLDNLLAQIGDQYADLFLAAKNLSDAILLSDILRVNTEITKAPLSASMIKRYDEHHQDLTLLKALVRQQLPEKYKEIFFDQSKNGYAGYIDGGASQEEFYKFIKPILEKMDGTEELLVKLNREDLLRKQRTFDNGSIPHQIHLGELHAILRRQEDFYPFLKDNREKIEKILTFRIPYYVGPLARGNSRFAWMTRKSEETITPWNFEEVVDKGASAQSFIERMTNFDKNLPNEKVLPKHSLLYEYFTVYNELTKVKYVTEGMRKPAFLSGEQKKAIVDLLFKTNRKVTVKQLKEDYFKKIECFDSVEISGVEDRFNASLGTYHDLLKIIKDKDFLDNEENEDILEDIVLTLTLFEDREMIEERLKTYAHLFDDKVMKQLKRRRYTGWGRLSRKLINGIRDKQSGKTILDFLKSDGFANRNFMQLIHDDSLTFKEDIQKAQVSGQGDSLHEHIANLAGSPAIKKGILQTVKVVDELVKVMGRHKPENIVIEMARENQTTQKGQKNSRERMKRIEEGIKELGSQILKEHPVENTQLQNEKLYLYYLQNGRDMYVDQELDINRLSDYDVDHIVPQSFLKDDSIDNKVLTRSDKARGKSDNVPSEEVVKKMKNYWRQLLNAKLITQRKFDNLTKAERGGLSELDKAGFIKRQLVETRQITKHVAQILDSRMNTKYDENDKLIREVKVITLKSKLVSDFRKDFQFYKVREINNYHHAHDAYLNAVVGTALIKKYPKLESEFVYGDYKVYDVRKMIAKSEQEIGKATAKYFFYSNIMNFFKTEITLANGEIRKRPLIETNGETGEIVWDKGRDFATVRKVLSMPQVNIVKKTEVQTGGFSKESILPKRNSDKLIARKKDWDPKKYGGFDSPTVAYSVLVVAKVEKGKSKKLKSVKELLGITIMERSSFEKNPIDFLEAKGYKEVKKDLIIKLPKYSLFELENGRKRMLASAGELQKGNELALPSKYVNFLYLASHYEKLKGSPEDNEQKQLFVEQHKHYLDEIIEQISEFSKRVILADANLDKVLSAYNKHRDKPIREQAENIIHLFTLTNLGAPAAFKYFDTTIDRKRYTSTKEVLDATLIHQSITGLYETRIDLSQLGGDGGEAAAKEAAAKEAAAKEAAAKGGTLNIEDEYRLHETSKEPDVSLGSTWLSDFPQAWAETGGMGLAVRQAPLIIPLKATSTPVSIKQYPMSQEARLGIKPHIQRLLDQGILVPCQSPWNTPLLPVKKPGTNDYRPVQDLREVNKRVEDIHPTVPNPYNLLSGLPPSHQWYTVLDLKDAFFCLRLHPTSQPLFAFEWRDPEMGISGQLTWTRLPQGFKNSPTLFNEALHRDLADFRIQHPDLILLQYVDDLLLAATSELDCQQGTRALLQTLGNLGYRASAKKAQICQKQVKYLGYLLKEGQRWLTEARKETVMGQPTPKTPRQLREFLGKAGFCRLFIPGFAEMAAPLYPLTKPGTLFNWGPDQQKAYQEIKQALLTAPALGLPDLTKPFELFVDEKQGYAKGVLTQKLGPWRRPVAYLSKKLDPVAAGWPPCLRMVAAIAVLTKDAGKLTMGQPLVILAPHAVEALVKQPPDRWLSNARMTHYQALLLDTDRVQFGPVVALNPATLLPLPEEGLQHNCLDILAEAHGTRPDLTDQPLPDADHTWYTDGSSLLQEGQRKAGAAVTTETEVIWAKALPAGTSAQRAELIALTQALKMAEGKKLNVYTDSRYAFATAHIHGEIYRRRGWLTSEGKEIKNKDEILALLKALFLPKRLSIIHCPGHQKGHSAEARGNRMADQAARKAAITETPDTSTLLIENSSPSGGSKRTADGSEFEAGKRTADGSEFEKRTADGSEFESPKKKAKVE

SEQ ID NO: 2611 - protein, 2151 aa, synthetic construct
MPAAKRVKLDGGDKKYSIGLDIGTNSVGWAVITDEYKVPSKKFKVLGNTDRHSIKKNLIGALLFDSGETAEATRLKRTARRRYTRRKNRICYLQEIFSNEMAKVDDSFFHRLEESFLVEEDKKHERHPIFGNIVDEVAYHEKYPTIYHLRKKLVDSTDKADLRLIYLALAHMIKFRGHFLIEGDLNPDNSDVDKLFIQLVQTYNQLFEENPINASGVDAKAILSARLSKSRRLENLIAQLPGEKKNGLFGNLIALSLGLTPNFKSNFDLAEDAKLQLSKDTYDDDLDNLLAQIGDQYADLFLAAKNLSDAILLSDILRVNTEITKAPLSASMIKRYDEHHQDLTLLKALVRQQLPEKYKEIFFDQSKNGYAGYIDGGASQEEFYKFIKPILEKMDGTEELLVKLNREDLLRKQRTFDNGSIPHQIHLGELHAILRRQEDFYPFLKDNREKIEKILTFRIPYYVGPLARGNSRFAWMTRKSEETITPWNFEEVVDKGASAQSFIERMTNFDKNLPNEKVLPKHSLLYEYFTVYNELTKVKYVTEGMRKPAFLSGEQKKAIVDLLFKTNRKVTVKQLKEDYFKKIECFDSVEISGVEDRFNASLGTYHDLLKIIKDKDFLDNEENEDILEDIVLTLTLFEDREMIEERLKTYAHLFDDKVMKQLKRRRYTGWGRLSRKLINGIRDKQSGKTILDFLKSDGFANRNFMQLIHDDSLTFKEDIQKAQVSGQGDSLHEHIANLAGSPAIKKGILQTVKVVDELVKVMGRHKPENIVIEMARENQTTQKGQKNSRERMKRIEEGIKELGSQILKEHPVENTQLQNEKLYLYYLQNGRDMYVDQELDINRLSDYDVDHIVPQSFLKDDSIDNKVLTRSDKARGKSDNVPSEEVVKKMKNYWRQLLNAKLITQRKFDNLTKAERGGLSELDKAGFIKRQLVETRQITKHVAQILDSRMNTKYDENDKLIREVKVITLKSKLVSDFRKDFQFYKVREINNYHHAHDAYLNAVVGTALIKKYPKLESEFVYGDYKVYDVRKMIAKSEQEIGKATAKYFFYSNIMNFFKTEITLANGEIRKRPLIETNGETGEIVWDKGRDFATVRKVLSMPQVNIVKKTEVQTGGFSKESILPKRNSDKLIARKKDWDPKKYGGFDSPTVAYSVLVVAKVEKGKSKKLKSVKELLGITIMERSSFEKNPIDFLEAKGYKEVKKDLIIKLPKYSLFELENGRKRMLASAGELQKGNELALPSKYVNFLYLASHYEKLKGSPEDNEQKQLFVEQHKHYLDEIIEQISEFSKRVILADANLDKVLSAYNKHRDKPIREQAENIIHLFTLTNLGAPAAFKYFDTTIDRKRYTSTKEVLDATLIHQSITGLYETRIDLSQLGGDGGAEAAAKEAAAKEAAAKEAAAKALEAEAAAKEAAAKEAAAKEAAAKAGGTLNIEDEYRLHETSKEPDVSLGSTWLSDFPQAWAETGGMGLAVRQAPLIIPLKATSTPVSIKQYPMSQEARLGIKPHIQRLLDQGILVPCQSPWNTPLLPVKKPGTNDYRPVQDLREVNKRVEDIHPTVPNPYNLLSGLPPSHQWYTVLDLKDAFFCLRLHPTSQPLFAFEWRDPEMGISGQLTWTRLPQGFKNSPTLFNEALHRDLADFRIQHPDLILLQYVDDLLLAATSELDCQQGTRALLQTLGNLGYRASAKKAQICQKQVKYLGYLLKEGQRWLTEARKETVMGQPTPKTPRQLREFLGKAGFCRLFIPGFAEMAAPLYPLTKPGTLFNWGPDQQKAYQEIKQALLTAPALGLPDLTKPFELFVDEKQGYAKGVLTQKLGPWRRPVAYLSKKLDPVAAGWPPCLRMVAAIAVLTKDAGKLTMGQPLVILAPHAVEALVKQPPDRWLSNARMTHYQALLLDTDRVQFGPVVALNPATLLPLPEEGLQHNCLDILAEAHGTRPDLTDQPLPDADHTWYTDGSSLLQEGQRKAGAAVTTETEVIWAKALPAGTSAQRAELIALTQALKMAEGKKLNVYTDSRYAFATAHIHGEIYRRRGWLTSEGKEIKNKDEILALLKALFLPKRLSIIHCPGHQKGHSAEARGNRMADQAARKAAITETPDTSTLLIENSSPSGGSKRTADGSEFEAGKRTADGSEFEKRTADGSEFESPKKKAKVE

SEQ ID NO: 2612 - protein, 2123 aa, synthetic construct
MPAAKRVKLDGGDKKYSIGLDIGTNSVGWAVITDEYKVPSKKFKVLGNTDRHSIKKNLIGALLFDSGETAEATRLKRTARRRYTRRKNRICYLQEIFSNEMAKVDDSFFHRLEESFLVEEDKKHERHPIFGNIVDEVAYHEKYPTIYHLRKKLVDSTDKADLRLIYLALAHMIKFRGHFLIEGDLNPDNSDVDKLFIQLVQTYNQLFEENPINASGVDAKAILSARLSKSRRLENLIAQLPGEKKNGLFGNLIALSLGLTPNFKSNFDLAEDAKLQLSKDTYDDDLDNLLAQIGDQYADLFLAAKNLSDAILLSDILRVNTEITKAPLSASMIKRYDEHHQDLTLLKALVRQQLPEKYKEIFFDQSKNGYAGYIDGGASQEEFYKFIKPILEKMDGTEELLVKLNREDLLRKQRTFDNGSIPHQIHLGELHAILRRQEDFYPFLKDNREKIEKILTFRIPYYVGPLARGNSRFAWMTRKSEETITPWNFEEVVDKGASAQSFIERMTNFDKNLPNEKVLPKHSLLYEYFTVYNELTKVKYVTEGMRKPAFLSGEQKKAIVDLLFKTNRKVTVKQLKEDYFKKIECFDSVEISGVEDRFNASLGTYHDLLKIIKDKDFLDNEENEDILEDIVLTLTLFEDREMIEERLKTYAHLFDDKVMKQLKRRRYTGWGRLSRKLINGIRDKQSGKTILDFLKSDGFANRNFMQLIHDDSLTFKEDIQKAQVSGQGDSLHEHIANLAGSPAIKKGILQTVKVVDELVKVMGRHKPENIVIEMARENQTTQKGQKNSRERMKRIEEGIKELGSQILKEHPVENTQLQNEKLYLYYLQNGRDMYVDQELDINRLSDYDVDHIVPQSFLKDDSIDNKVLTRSDKARGKSDNVPSEEVVKKMKNYWRQLLNAKLITQRKFDNLTKAERGGLSELDKAGFIKRQLVETRQITKHVAQILDSRMNTKYDENDKLIREVKVITLKSKLVSDFRKDFQFYKVREINNYHHAHDAYLNAVVGTALIKKYPKLESEFVYGDYKVYDVRKMIAKSEQEIGKATAKYFFYSNIMNFFKTEITLANGEIRKRPLIETNGETGEIVWDKGRDFATVRKVLSMPQVNIVKKTEVQTGGFSKESILPKRNSDKLIARKKDWDPKKYGGFDSPTVAYSVLVVAKVEKGKSKKLKSVKELLGITIMERSSFEKNPIDFLEAKGYKEVKKDLIIKLPKYSLFELENGRKRMLASAGELQKGNELALPSKYVNFLYLASHYEKLKGSPEDNEQKQLFVEQHKHYLDEIIEQISEFSKRVILADANLDKVLSAYNKHRDKPIREQAENIIHLFTLTNLGAPAAFKYFDTTIDRKRYTSTKEVLDATLIHQSITGLYETRIDLSQLGGDGGGSSGSSGSSGSSGSSGSSGGTLNIEDEYRLHETSKEPDVSLGSTWLSDFPQAWAETGGMGLAVRQAPLIIPLKATSTPVSIKQYPMSQEARLGIKPHIQRLLDQGILVPCQSPWNTPLLPVKKPGTNDYRPVQDLREVNKRVEDIHPTVPNPYNLLSGLPPSHQWYTVLDLKDAFFCLRLHPTSQPLFAFEWRDPEMGISGQLTWTRLPQGFKNSPTLFNEALHRDLADFRIQHPDLILLQYVDDLLLAATSELDCQQGTRALLQTLGNLGYRASAKKAQICQKQVKYLGYLLKEGQRWLTEARKETVMGQPTPKTPRQLREFLGKAGFCRLFIPGFAEMAAPLYPLTKPGTLFNWGPDQQKAYQEIKQALLTAPALGLPDLTKPFELFVDEKQGYAKGVLTQKLGPWRRPVAYLSKKLDPVAAGWPPCLRMVAAIAVLTKDAGKLTMGQPLVILAPHAVEALVKQPPDRWLSNARMTHYQALLLDTDRVQFGPVVALNPATLLPLPEEGLQHNCLDILAEAHGTRPDLTDQPLPDADHTWYTDGSSLLQEGQRKAGAAVTTETEVIWAKALPAGTSAQRAELIALTQALKMAEGKKLNVYTDSRYAFATAHIHGEIYRRRGWLTSEGKEIKNKDEILALLKALFLPKRLSIIHCPGHQKGHSAEARGNRMADQAARKAAITETPDTSTLLIENSSPSGGSKRTADGSEFEAGKRTADGSEFEKRTADGSEFESPKKKAKVE

SEQ ID NO: 2613 - skipped

SEQ ID NO: 2614 - protein, 2116 aa, synthetic construct
MPAAKRVKLDGGDKKYSIGLDIGTNSVGWAVITDEYKVPSKKFKVLGNTDRHSIKKNLIGALLFDSGETAEATRLKRTARRRYTRRKNRICYLQEIFSNEMAKVDDSFFHRLEESFLVEEDKKHERHPIFGNIVDEVAYHEKYPTIYHLRKKLVDSTDKADLRLIYLALAHMIKFRGHFLIEGDLNPDNSDVDKLFIQLVQTYNQLFEENPINASGVDAKAILSARLSKSRRLENLIAQLPGEKKNGLFGNLIALSLGLTPNFKSNFDLAEDAKLQLSKDTYDDDLDNLLAQIGDQYADLFLAAKNLSDAILLSDILRVNTEITKAPLSASMIKRYDEHHQDLTLLKALVRQQLPEKYKEIFFDQSKNGYAGYIDGGASQEEFYKFIKPILEKMDGTEELLVKLNREDLLRKQRTFDNGSIPHQIHLGELHAILRRQEDFYPFLKDNREKIEKILTFRIPYYVGPLARGNSRFAWMTRKSEETITPWNFEEVVDKGASAQSFIERMTNFDKNLPNEKVLPKHSLLYEYFTVYNELTKVKYVTEGMRKPAFLSGEQKKAIVDLLFKTNRKVTVKQLKEDYFKKIECFDSVEISGVEDRFNASLGTYHDLLKIIKDKDFLDNEENEDILEDIVLTLTLFEDREMIEERLKTYAHLFDDKVMKQLKRRRYTGWGRLSRKLINGIRDKQSGKTILDFLKSDGFANRNFMQLIHDDSLTFKEDIQKAQVSGQGDSLHEHIANLAGSPAIKKGILQTVKVVDELVKVMGRHKPENIVIEMARENQTTQKGQKNSRERMKRIEEGIKELGSQILKEHPVENTQLQNEKLYLYYLQNGRDMYVDQELDINRLSDYDVDHIVPQSFLKDDSIDNKVLTRSDKARGKSDNVPSEEVVKKMKNYWRQLLNAKLITQRKFDNLTKAERGGLSELDKAGFIKRQLVETRQITKHVAQILDSRMNTKYDENDKLIREVKVITLKSKLVSDFRKDFQFYKVREINNYHHAHDAYLNAVVGTALIKKYPKLESEFVYGDYKVYDVRKMIAKSEQEIGKATAKYFFYSNIMNFFKTEITLANGEIRKRPLIETNGETGEIVWDKGRDFATVRKVLSMPQVNIVKKTEVQTGGFSKESILPKRNSDKLIARKKDWDPKKYGGFDSPTVAYSVLVVAKVEKGKSKKLKSVKELLGITIMERSSFEKNPIDFLEAKGYKEVKKDLIIKLPKYSLFELENGRKRMLASAGELQKGNELALPSKYVNFLYLASHYEKLKGSPEDNEQKQLFVEQHKHYLDEIIEQISEFSKRVILADANLDKVLSAYNKHRDKPIREQAENIIHLFTLTNLGAPAAFKYFDTTIDRKRYTSTKEVLDATLIHQSITGLYETRIDLSQLGGDGGEAAAKGGGPAPGGTLNIEDEYRLHETSKEPDVSLGSTWLSDFPQAWAETGGMGLAVRQAPLIIPLKATSTPVSIKQYPMSQEARLGIKPHIQRLLDQGILVPCQSPWNTPLLPVKKPGTNDYRPVQDLREVNKRVEDIHPTVPNPYNLLSGLPPSHQWYTVLDLKDAFFCLRLHPTSQPLFAFEWRDPEMGISGQLTWTRLPQGFKNSPTLFNEALHRDLADFRIQHPDLILLQYVDDLLLAATSELDCQQGTRALLQTLGNLGYRASAKKAQICQKQVKYLGYLLKEGQRWLTEARKETVMGQPTPKTPRQLREFLGKAGFCRLFIPGFAEMAAPLYPLTKPGTLFNWGPDQQKAYQEIKQALLTAPALGLPDLTKPFELFVDEKQGYAKGVLTQKLGPWRRPVAYLSKKLDPVAAGWPPCLRMVAAIAVLTKDAGKLTMGQPLVILAPHAVEALVKQPPDRWLSNARMTHYQALLLDTDRVQFGPVVALNPATLLPLPEEGLQHNCLDILAEAHGTRPDLTDQPLPDADHTWYTDGSSLLQEGQRKAGAAVTTETEVIWAKALPAGTSAQRAELIALTQALKMAEGKKLNVYTDSRYAFATAHIHGEIYRRRGWLTSEGKEIKNKDEILALLKALFLPKRLSIIHCPGHQKGHSAEARGNRMADQAARKAAITETPDTSTLLIENSSPSGGSKRTADGSEFEAGKRTADGSEFEKRTADGSEFESPKKKAKVE

SEQ ID NO: 2615 - protein, 2125 aa, synthetic construct
MPAAKRVKLDGGDKKYSIGLDIGTNSVGWAVITDEYKVPSKKFKVLGNTDRHSIKKNLIGALLFDSGETAEATRLKRTARRRYTRRKNRICYLQEIFSNEMAKVDDSFFHRLEESFLVEEDKKHERHPIFGNIVDEVAYHEKYPTIYHLRKKLVDSTDKADLRLIYLALAHMIKFRGHFLIEGDLNPDNSDVDKLFIQLVQTYNQLFEENPINASGVDAKAILSARLSKSRRLENLIAQLPGEKKNGLFGNLIALSLGLTPNFKSNFDLAEDAKLQLSKDTYDDDLDNLLAQIGDQYADLFLAAKNLSDAILLSDILRVNTEITKAPLSASMIKRYDEHHQDLTLLKALVRQQLPEKYKEIFFDQSKNGYAGYIDGGASQEEFYKFIKPILEKMDGTEELLVKLNREDLLRKQRTFDNGSIPHQIHLGELHAILRRQEDFYPFLKDNREKIEKILTFRIPYYVGPLARGNSRFAWMTRKSEETITPWNFEEVVDKGASAQSFIERMTNFDKNLPNEKVLPKHSLLYEYFTVYNELTKVKYVTEGMRKPAFLSGEQKKAIVDLLFKTNRKVTVKQLKEDYFKKIECFDSVEISGVEDRFNASLGTYHDLLKIIKDKDFLDNEENEDILEDIVLTLTLFEDREMIEERLKTYAHLFDDKVMKQLKRRRYTGWGRLSRKLINGIRDKQSGKTILDFLKSDGFANRNFMQLIHDDSLTFKEDIQKAQVSGQGDSLHEHIANLAGSPAIKKGILQTVKVVDELVKVMGRHKPENIVIEMARENQTTQKGQKNSRERMKRIEEGIKELGSQILKEHPVENTQLQNEKLYLYYLQNGRDMYVDQELDINRLSDYDVDHIVPQSFLKDDSIDNKVLTRSDKARGKSDNVPSEEVVKKMKNYWRQLLNAKLITQRKFDNLTKAERGGLSELDKAGFIKRQLVETRQITKHVAQILDSRMNTKYDENDKLIREVKVITLKSKLVSDFRKDFQFYKVREINNYHHAHDAYLNAVVGTALIKKYPKLESEFVYGDYKVYDVRKMIAKSEQEIGKATAKYFFYSNIMNFFKTEITLANGEIRKRPLIETNGETGEIVWDKGRDFATVRKVLSMPQVNIVKKTEVQTGGFSKESILPKRNSDKLIARKKDWDPKKYGGFDSPTVAYSVLVVAKVEKGKSKKLKSVKELLGITIMERSSFEKNPIDFLEAKGYKEVKKDLIIKLPKYSLFELENGRKRMLASAGELQKGNELALPSKYVNFLYLASHYEKLKGSPEDNEQKQLFVEQHKHYLDEIIEQISEFSKRVILADANLDKVLSAYNKHRDKPIREQAENIIHLFTLTNLGAPAAFKYFDTTIDRKRYTSTKEVLDATLIHQSITGLYETRIDLSQLGGDGGGGGGSGGGGSGGGGSGGGGSGGTLNIEDEYRLHETSKEPDVSLGSTWLSDFPQAWAETGGMGLAVRQAPLIIPLKATSTPVSIKQYPMSQEARLGIKPHIQRLLDQGILVPCQSPWNTPLLPVKKPGTNDYRPVQDLREVNKRVEDIHPTVPNPYNLLSGLPPSHQWYTVLDLKDAFFCLRLHPTSQPLFAFEWRDPEMGISGQLTWTRLPQGFKNSPTLFNEALHRDLADFRIQHPDLILLQYVDDLLLAATSELDCQQGTRALLQTLGNLGYRASAKKAQICQKQVKYLGYLLKEGQRWLTEARKETVMGQPTPKTPRQLREFLGKAGFCRLFIPGFAEMAAPLYPLTKPGTLFNWGPDQQKAYQEIKQALLTAPALGLPDLTKPFELFVDEKQGYAKGVLTQKLGPWRRPVAYLSKKLDPVAAGWPPCLRMVAAIAVLTKDAGKLTMGQPLVILAPHAVEALVKQPPDRWLSNARMTHYQALLLDTDRVQFGPVVALNPATLLPLPEEGLQHNCLDILAEAHGTRPDLTDQPLPDADHTWYTDGSSLLQEGQRKAGAAVTTETEVIWAKALPAGTSAQRAELIALTQALKMAEGKKLNVYTDSRYAFATAHIHGEIYRRRGWLTSEGKEIKNKDEILALLKALFLPKRLSIIHCPGHQKGHSAEARGNRMADQAARKAAITETPDTSTLLIENSSPSGGSKRTADGSEFEAGKRTADGSEFEKRTADGSEFESPKKKAKVE

SEQ ID NO: 2616-2617 - skipped (2 entries)

SEQ ID NO: 2618 - protein, 2114 aa, synthetic construct
MPAAKRVKLDGGDKKYSIGLDIGTNSVGWAVITDEYKVPSKKFKVLGNTDRHSIKKNLIGALLFDSGETAEATRLKRTARRRYTRRKNRICYLQEIFSNEMAKVDDSFFHRLEESFLVEEDKKHERHPIFGNIVDEVAYHEKYPTIYHLRKKLVDSTDKADLRLIYLALAHMIKFRGHFLIEGDLNPDNSDVDKLFIQLVQTYNQLFEENPINASGVDAKAILSARLSKSRRLENLIAQLPGEKKNGLFGNLIALSLGLTPNFKSNFDLAEDAKLQLSKDTYDDDLDNLLAQIGDQYADLFLAAKNLSDAILLSDILRVNTEITKAPLSASMIKRYDEHHQDLTLLKALVRQQLPEKYKEIFFDQSKNGYAGYIDGGASQEEFYKFIKPILEKMDGTEELLVKLNREDLLRKQRTFDNGSIPHQIHLGELHAILRRQEDFYPFLKDNREKIEKILTFRIPYYVGPLARGNSRFAWMTRKSEETITPWNFEEVVDKGASAQSFIERMTNFDKNLPNEKVLPKHSLLYEYFTVYNELTKVKYVTEGMRKPAFLSGEQKKAIVDLLFKTNRKVTVKQLKEDYFKKIECFDSVEISGVEDRFNASLGTYHDLLKIIKDKDFLDNEENEDILEDIVLTLTLFEDREMIEERLKTYAHLFDDKVMKQLKRRRYTGWGRLSRKLINGIRDKQSGKTILDFLKSDGFANRNFMQLIHDDSLTFKEDIQKAQVSGQGDSLHEHIANLAGSPAIKKGILQTVKVVDELVKVMGRHKPENIVIEMARENQTTQKGQKNSRERMKRIEEGIKELGSQILKEHPVENTQLQNEKLYLYYLQNGRDMYVDQELDINRLSDYDVDHIVPQSFLKDDSIDNKVLTRSDKARGKSDNVPSEEVVKKMKNYWRQLLNAKLITQRKFDNLTKAERGGLSELDKAGFIKRQLVETRQITKHVAQILDSRMNTKYDENDKLIREVKVITLKSKLVSDFRKDFQFYKVREINNYHHAHDAYLNAVVGTALIKKYPKLESEFVYGDYKVYDVRKMIAKSEQEIGKATAKYFFYSNIMNFFKTEITLANGEIRKRPLIETNGETGEIVWDKGRDFATVRKVLSMPQVNIVKKTEVQTGGFSKESILPKRNSDKLIARKKDWDPKKYGGFDSPTVAYSVLVVAKVEKGKSKKLKSVKELLGITIMERSSFEKNPIDFLEAKGYKEVKKDLIIKLPKYSLFELENGRKRMLASAGELQKGNELALPSKYVNFLYLASHYEKLKGSPEDNEQKQLFVEQHKHYLDEIIEQISEFSKRVILADANLDKVLSAYNKHRDKPIREQAENIIHLFTLTNLGAPAAFKYFDTTIDRKRYTSTKEVLDATLIHQSITGLYETRIDLSQLGGDGGGGGPAPGGSGGTLNIEDEYRLHETSKEPDVSLGSTWLSDFPQAWAETGGMGLAVRQAPLIIPLKATSTPVSIKQYPMSQEARLGIKPHIQRLLDQGILVPCQSPWNTPLLPVKKPGTNDYRPVQDLREVNKRVEDIHPTVPNPYNLLSGLPPSHQWYTVLDLKDAFFCLRLHPTSQPLFAFEWRDPEMGISGQLTWTRLPQGFKNSPTLFNEALHRDLADFRIQHPDLILLQYVDDLLLAATSELDCQQGTRALLQTLGNLGYRASAKKAQICQKQVKYLGYLLKEGQRWLTEARKETVMGQPTPKTPRQLREFLGKAGFCRLFIPGFAEMAAPLYPLTKPGTLFNWGPDQQKAYQEIKQALLTAPALGLPDLTKPFELFVDEKQGYAKGVLTQKLGPWRRPVAYLSKKLDPVAAGWPPCLRMVAAIAVLTKDAGKLTMGQPLVILAPHAVEALVKQPPDRWLSNARMTHYQALLLDTDRVQFGPVVALNPATLLPLPEEGLQHNCLDILAEAHGTRPDLTDQPLPDADHTWYTDGSSLLQEGQRKAGAAVTTETEVIWAKALPAGTSAQRAELIALTQALKMAEGKKLNVYTDSRYAFATAHIHGEIYRRRGWLTSEGKEIKNKDEILALLKALFLPKRLSIIHCPGHQKGHSAEARGNRMADQAARKAAITETPDTSTLLIENSSPSGGSKRTADGSEFEAGKRTADGSEFEKRTADGSEFESPKKKAKVE

SEQ ID NO: 2619 - protein, 2116 aa, synthetic construct
MPAAKRVKLDGGDKKYSIGLDIGTNSVGWAVITDEYKVPSKKFKVLGNTDRHSIKKNLIGALLFDSGETAEATRLKRTARRRYTRRKNRICYLQEIFSNEMAKVDDSFFHRLEESFLVEEDKKHERHPIFGNIVDEVAYHEKYPTIYHLRKKLVDSTDKADLRLIYLALAHMIKFRGHFLIEGDLNPDNSDVDKLFIQLVQTYNQLFEENPINASGVDAKAILSARLSKSRRLENLIAQLPGEKKNGLFGNLIALSLGLTPNFKSNFDLAEDAKLQLSKDTYDDDLDNLLAQIGDQYADLFLAAKNLSDAILLSDILRVNTEITKAPLSASMIKRYDEHHQDLTLLKALVRQQLPEKYKEIFFDQSKNGYAGYIDGGASQEEFYKFIKPILEKMDGTEELLVKLNREDLLRKQRTFDNGSIPHQIHLGELHAILRRQEDFYPFLKDNREKIEKILTFRIPYYVGPLARGNSRFAWMTRKSEETITPWNFEEVVDKGASAQSFIERMTNFDKNLPNEKVLPKHSLLYEYFTVYNELTKVKYVTEGMRKPAFLSGEQKKAIVDLLFKTNRKVTVKQLKEDYFKKIECFDSVEISGVEDRFNASLGTYHDLLKIIKDKDFLDNEENEDILEDIVLTLTLFEDREMIEERLKTYAHLFDDKVMKQLKRRRYTGWGRLSRKLINGIRDKQSGKTILDFLKSDGFANRNFMQLIHDDSLTFKEDIQKAQVSGQGDSLHEHIANLAGSPAIKKGILQTVKVVDELVKVMGRHKPENIVIEMARENQTTQKGQKNSRERMKRIEEGIKELGSQILKEHPVENTQLQNEKLYLYYLQNGRDMYVDQELDINRLSDYDVDHIVPQSFLKDDSIDNKVLTRSDKARGKSDNVPSEEVVKKMKNYWRQLLNAKLITQRKFDNLTKAERGGLSELDKAGFIKRQLVETRQITKHVAQILDSRMNTKYDENDKLIREVKVITLKSKLVSDFRKDFQFYKVREINNYHHAHDAYLNAVVGTALIKKYPKLESEFVYGDYKVYDVRKMIAKSEQEIGKATAKYFFYSNIMNFFKTEITLANGEIRKRPLIETNGETGEIVWDKGRDFATVRKVLSMPQVNIVKKTEVQTGGFSKESILPKRNSDKLIARKKDWDPKKYGGFDSPTVAYSVLVVAKVEKGKSKKLKSVKELLGITIMERSSFEKNPIDFLEAKGYKEVKKDLIIKLPKYSLFELENGRKRMLASAGELQKGNELALPSKYVNFLYLASHYEKLKGSPEDNEQKQLFVEQHKHYLDEIIEQISEFSKRVILADANLDKVLSAYNKHRDKPIREQAENIIHLFTLTNLGAPAAFKYFDTTIDRKRYTSTKEVLDATLIHQSITGLYETRIDLSQLGGDGGPAPAPAPAPAPGGTLNIEDEYRLHETSKEPDVSLGSTWLSDFPQAWAETGGMGLAVRQAPLIIPLKATSTPVSIKQYPMSQEARLGIKPHIQRLLDQGILVPCQSPWNTPLLPVKKPGTNDYRPVQDLREVNKRVEDIHPTVPNPYNLLSGLPPSHQWYTVLDLKDAFFCLRLHPTSQPLFAFEWRDPEMGISGQLTWTRLPQGFKNSPTLFNEALHRDLADFRIQHPDLILLQYVDDLLLAATSELDCQQGTRALLQTLGNLGYRASAKKAQICQKQVKYLGYLLKEGQRWLTEARKETVMGQPTPKTPRQLREFLGKAGFCRLFIPGFAEMAAPLYPLTKPGTLFNWGPDQQKAYQEIKQALLTAPALGLPDLTKPFELFVDEKQGYAKGVLTQKLGPWRRPVAYLSKKLDPVAAGWPPCLRMVAAIAVLTKDAGKLTMGQPLVILAPHAVEALVKQPPDRWLSNARMTHYQALLLDTDRVQFGPVVALNPATLLPLPEEGLQHNCLDILAEAHGTRPDLTDQPLPDADHTWYTDGSSLLQEGQRKAGAAVTTETEVIWAKALPAGTSAQRAELIALTQALKMAEGKKLNVYTDSRYAFATAHIHGEIYRRRGWLTSEGKEIKNKDEILALLKALFLPKRLSIIHCPGHQKGHSAEARGNRMADQAARKAAITETPDTSTLLIENSSPSGGSKRTADGSEFEAGKRTADGSEFEKRTADGSEFESPKKKAKVE

SEQ ID NO: 2620 - protein, 2110 aa, synthetic construct
MPAAKRVKLDGGDKKYSIGLDIGTNSVGWAVITDEYKVPSKKFKVLGNTDRHSIKKNLIGALLFDSGETAEATRLKRTARRRYTRRKNRICYLQEIFSNEMAKVDDSFFHRLEESFLVEEDKKHERHPIFGNIVDEVAYHEKYPTIYHLRKKLVDSTDKADLRLIYLALAHMIKFRGHFLIEGDLNPDNSDVDKLFIQLVQTYNQLFEENPINASGVDAKAILSARLSKSRRLENLIAQLPGEKKNGLFGNLIALSLGLTPNFKSNFDLAEDAKLQLSKDTYDDDLDNLLAQIGDQYADLFLAAKNLSDAILLSDILRVNTEITKAPLSASMIKRYDEHHQDLTLLKALVRQQLPEKYKEIFFDQSKNGYAGYIDGGASQEEFYKFIKPILEKMDGTEELLVKLNREDLLRKQRTFDNGSIPHQIHLGELHAILRRQEDFYPFLKDNREKIEKILTFRIPYYVGPLARGNSRFAWMTRKSEETITPWNFEEVVDKGASAQSFIERMTNFDKNLPNEKVLPKHSLLYEYFTVYNELTKVKYVTEGMRKPAFLSGEQKKAIVDLLFKTNRKVTVKQLKEDYFKKIECFDSVEISGVEDRFNASLGTYHDLLKIIKDKDFLDNEENEDILEDIVLTLTLFEDREMIEERLKTYAHLFDDKVMKQLKRRRYTGWGRLSRKLINGIRDKQSGKTILDFLKSDGFANRNFMQLIHDDSLTFKEDIQKAQVSGQGDSLHEHIANLAGSPAIKKGILQTVKVVDELVKVMGRHKPENIVIEMARENQTTQKGQKNSRERMKRIEEGIKELGSQILKEHPVENTQLQNEKLYLYYLQNGRDMYVDQELDINRLSDYDVDHIVPQSFLKDDSIDNKVLTRSDKARGKSDNVPSEEVVKKMKNYWRQLLNAKLITQRKFDNLTKAERGGLSELDKAGFIKRQLVETRQITKHVAQILDSRMNTKYDENDKLIREVKVITLKSKLVSDFRKDFQFYKVREINNYHHAHDAYLNAVVGTALIKKYPKLESEFVYGDYKVYDVRKMIAKSEQEIGKATAKYFFYSNIMNFFKTEITLANGEIRKRPLIETNGETGEIVWDKGRDFATVRKVLSMPQVNIVKKTEVQTGGFSKESILPKRNSDKLIARKKDWDPKKYGGFDSPTVAYSVLVVAKVEKGKSKKLKSVKELLGITIMERSSFEKNPIDFLEAKGYKEVKKDLIIKLPKYSLFELENGRKRMLASAGELQKGNELALPSKYVNFLYLASHYEKLKGSPEDNEQKQLFVEQHKHYLDEIIEQISEFSKRVILADANLDKVLSAYNKHRDKPIREQAENIIHLFTLTNLGAPAAFKYFDTTIDRKRYTSTKEVLDATLIHQSITGLYETRIDLSQLGGDGGEAAAKGGTLNIEDEYRLHETSKEPDVSLGSTWLSDFPQAWAETGGMGLAVRQAPLIIPLKATSTPVSIKQYPMSQEARLGIKPHIQRLLDQGILVPCQSPWNTPLLPVKKPGTNDYRPVQDLREVNKRVEDIHPTVPNPYNLLSGLPPSHQWYTVLDLKDAFFCLRLHPTSQPLFAFEWRDPEMGISGQLTWTRLPQGFKNSPTLFNEALHRDLADFRIQHPDLILLQYVDDLLLAATSELDCQQGTRALLQTLGNLGYRASAKKAQICQKQVKYLGYLLKEGQRWLTEARKETVMGQPTPKTPRQLREFLGKAGFCRLFIPGFAEMAAPLYPLTKPGTLFNWGPDQQKAYQEIKQALLTAPALGLPDLTKPFELFVDEKQGYAKGVLTQKLGPWRRPVAYLSKKLDPVAAGWPPCLRMVAAIAVLTKDAGKLTMGQPLVILAPHAVEALVKQPPDRWLSNARMTHYQALLLDTDRVQFGPVVALNPATLLPLPEEGLQHNCLDILAEAHGTRPDLTDQPLPDADHTWYTDGSSLLQEGQRKAGAAVTTETEVIWAKALPAGTSAQRAELIALTQALKMAEGKKLNVYTDSRYAFATAHIHGEIYRRRGWLTSEGKEIKNKDEILALLKALFLPKRLSIIHCPGHQKGHSAEARGNRMADQAARKAAITETPDTSTLLIENSSPSGGSKRTADGSEFEAGKRTADGSEFEKRTADGSEFESPKKKAKVE

SEQ ID NO: 2621 - skipped

SEQ ID NO: 2622 - protein, 2114 aa, synthetic construct
MPAAKRVKLDGGDKKYSIGLDIGTNSVGWAVITDEYKVPSKKFKVLGNTDRHSIKKNLIGALLFDSGETAEATRLKRTARRRYTRRKNRICYLQEIFSNEMAKVDDSFFHRLEESFLVEEDKKHERHPIFGNIVDEVAYHEKYPTIYHLRKKLVDSTDKADLRLIYLALAHMIKFRGHFLIEGDLNPDNSDVDKLFIQLVQTYNQLFEENPINASGVDAKAILSARLSKSRRLENLIAQLPGEKKNGLFGNLIALSLGLTPNFKSNFDLAEDAKLQLSKDTYDDDLDNLLAQIGDQYADLFLAAKNLSDAILLSDILRVNTEITKAPLSASMIKRYDEHHQDLTLLKALVRQQLPEKYKEIFFDQSKNGYAGYIDGGASQEEFYKFIKPILEKMDGTEELLVKLNREDLLRKQRTFDNGSIPHQIHLGELHAILRRQEDFYPFLKDNREKIEKILTFRIPYYVGPLARGNSRFAWMTRKSEETITPWNFEEVVDKGASAQSFIERMTNFDKNLPNEKVLPKHSLLYEYFTVYNELTKVKYVTEGMRKPAFLSGEQKKAIVDLLFKTNRKVTVKQLKEDYFKKIECFDSVEISGVEDRFNASLGTYHDLLKIIKDKDFLDNEENEDILEDIVLTLTLFEDREMIEERLKTYAHLFDDKVMKQLKRRRYTGWGRLSRKLINGIRDKQSGKTILDFLKSDGFANRNFMQLIHDDSLTFKEDIQKAQVSGQGDSLHEHIANLAGSPAIKKGILQTVKVVDELVKVMGRHKPENIVIEMARENQTTQKGQKNSRERMKRIEEGIKELGSQILKEHPVENTQLQNEKLYLYYLQNGRDMYVDQELDINRLSDYDVDHIVPQSFLKDDSIDNKVLTRSDKARGKSDNVPSEEVVKKMKNYWRQLLNAKLITQRKFDNLTKAERGGLSELDKAGFIKRQLVETRQITKHVAQILDSRMNTKYDENDKLIREVKVITLKSKLVSDFRKDFQFYKVREINNYHHAHDAYLNAVVGTALIKKYPKLESEFVYGDYKVYDVRKMIAKSEQEIGKATAKYFFYSNIMNFFKTEITLANGEIRKRPLIETNGETGEIVWDKGRDFATVRKVLSMPQVNIVKKTEVQTGGFSKESILPKRNSDKLIARKKDWDPKKYGGFDSPTVAYSVLVVAKVEKGKSKKLKSVKELLGITIMERSSFEKNPIDFLEAKGYKEVKKDLIIKLPKYSLFELENGRKRMLASAGELQKGNELALPSKYVNFLYLASHYEKLKGSPEDNEQKQLFVEQHKHYLDEIIEQISEFSKRVILADANLDKVLSAYNKHRDKPIREQAENIIHLFTLTNLGAPAAFKYFDTTIDRKRYTSTKEVLDATLIHQSITGLYETRIDLSQLGGDGGGGSGGGPAPGGTLNIEDEYRLHETSKEPDVSLGSTWLSDFPQAWAETGGMGLAVRQAPLIIPLKATSTPVSIKQYPMSQEARLGIKPHIQRLLDQGILVPCQSPWNTPLLPVKKPGTNDYRPVQDLREVNKRVEDIHPTVPNPYNLLSGLPPSHQWYTVLDLKDAFFCLRLHPTSQPLFAFEWRDPEMGISGQLTWTRLPQGFKNSPTLFNEALHRDLADFRIQHPDLILLQYVDDLLLAATSELDCQQGTRALLQTLGNLGYRASAKKAQICQKQVKYLGYLLKEGQRWLTEARKETVMGQPTPKTPRQLREFLGKAGFCRLFIPGFAEMAAPLYPLTKPGTLFNWGPDQQKAYQEIKQALLTAPALGLPDLTKPFELFVDEKQGYAKGVLTQKLGPWRRPVAYLSKKLDPVAAGWPPCLRMVAAIAVLTKDAGKLTMGQPLVILAPHAVEALVKQPPDRWLSNARMTHYQALLLDTDRVQFGPVVALNPATLLPLPEEGLQHNCLDILAEAHGTRPDLTDQPLPDADHTWYTDGSSLLQEGQRKAGAAVTTETEVIWAKALPAGTSAQRAELIALTQALKMAEGKKLNVYTDSRYAFATAHIHGEIYRRRGWLTSEGKEIKNKDEILALLKALFLPKRLSIIHCPGHQKGHSAEARGNRMADQAARKAAITETPDTSTLLIENSSPSGGSKRTADGSEFEAGKRTADGSEFEKRTADGSEFESPKKKAKVE

SEQ ID NO: 2623 - protein, 2120 aa, synthetic construct
MPAAKRVKLDGGDKKYSIGLDIGTNSVGWAVITDEYKVPSKKFKVLGNTDRHSIKKNLIGALLFDSGETAEATRLKRTARRRYTRRKNRICYLQEIFSNEMAKVDDSFFHRLEESFLVEEDKKHERHPIFGNIVDEVAYHEKYPTIYHLRKKLVDSTDKADLRLIYLALAHMIKFRGHFLIEGDLNPDNSDVDKLFIQLVQTYNQLFEENPINASGVDAKAILSARLSKSRRLENLIAQLPGEKKNGLFGNLIALSLGLTPNFKSNFDLAEDAKLQLSKDTYDDDLDNLLAQIGDQYADLFLAAKNLSDAILLSDILRVNTEITKAPLSASMIKRYDEHHQDLTLLKALVRQQLPEKYKEIFFDQSKNGYAGYIDGGASQEEFYKFIKPILEKMDGTEELLVKLNREDLLRKQRTFDNGSIPHQIHLGELHAILRRQEDFYPFLKDNREKIEKILTFRIPYYVGPLARGNSRFAWMTRKSEETITPWNFEEVVDKGASAQSFIERMTNFDKNLPNEKVLPKHSLLYEYFTVYNELTKVKYVTEGMRKPAFLSGEQKKAIVDLLFKTNRKVTVKQLKEDYFKKIECFDSVEISGVEDRFNASLGTYHDLLKIIKDKDFLDNEENEDILEDIVLTLTLFEDREMIEERLKTYAHLFDDKVMKQLKRRRYTGWGRLSRKLINGIRDKQSGKTILDFLKSDGFANRNFMQLIHDDSLTFKEDIQKAQVSGQGDSLHEHIANLAGSPAIKKGILQTVKVVDELVKVMGRHKPENIVIEMARENQTTQKGQKNSRERMKRIEEGIKELGSQILKEHPVENTQLQNEKLYLYYLQNGRDMYVDQELDINRLSDYDVDHIVPQSFLKDDSIDNKVLTRSDKARGKSDNVPSEEVVKKMKNYWRQLLNAKLITQRKFDNLTKAERGGLSELDKAGFIKRQLVETRQITKHVAQILDSRMNTKYDENDKLIREVKVITLKSKLVSDFRKDFQFYKVREINNYHHAHDAYLNAVVGTALIKKYPKLESEFVYGDYKVYDVRKMIAKSEQEIGKATAKYFFYSNIMNFFKTEITLANGEIRKRPLIETNGETGEIVWDKGRDFATVRKVLSMPQVNIVKKTEVQTGGFSKESILPKRNSDKLIARKKDWDPKKYGGFDSPTVAYSVLVVAKVEKGKSKKLKSVKELLGITIMERSSFEKNPIDFLEAKGYKEVKKDLIIKLPKYSLFELENGRKRMLASAGELQKGNELALPSKYVNFLYLASHYEKLKGSPEDNEQKQLFVEQHKHYLDEIIEQISEFSKRVILADANLDKVLSAYNKHRDKPIREQAENIIHLFTLTNLGAPAAFKYFDTTIDRKRYTSTKEVLDATLIHQSITGLYETRIDLSQLGGDGGEAAAKGGGGSEAAAKGGTLNIEDEYRLHETSKEPDVSLGSTWLSDFPQAWAETGGMGLAVRQAPLIIPLKATSTPVSIKQYPMSQEARLGIKPHIQRLLDQGILVPCQSPWNTPLLPVKKPGTNDYRPVQDLREVNKRVEDIHPTVPNPYNLLSGLPPSHQWYTVLDLKDAFFCLRLHPTSQPLFAFEWRDPEMGISGQLTWTRLPQGFKNSPTLFNEALHRDLADFRIQHPDLILLQYVDDLLLAATSELDCQQGTRALLQTLGNLGYRASAKKAQICQKQVKYLGYLLKEGQRWLTEARKETVMGQPTPKTPRQLREFLGKAGFCRLFIPGFAEMAAPLYPLTKPGTLFNWGPDQQKAYQEIKQALLTAPALGLPDLTKPFELFVDEKQGYAKGVLTQKLGPWRRPVAYLSKKLDPVAAGWPPCLRMVAAIAVLTKDAGKLTMGQPLVILAPHAVEALVKQPPDRWLSNARMTHYQALLLDTDRVQFGPVVALNPATLLPLPEEGLQHNCLDILAEAHGTRPDLTDQPLPDADHTWYTDGSSLLQEGQRKAGAAVTTETEVIWAKALPAGTSAQRAELIALTQALKMAEGKKLNVYTDSRYAFATAHIHGEIYRRRGWLTSEGKEIKNKDEILALLKALFLPKRLSIIHCPGHQKGHSAEARGNRMADQAARKAAITETPDTSTLLIENSSPSGGSKRTADGSEFEAGKRTADGSEFEKRTADGSEFESPKKKAKVE

SEQ ID NO: 2624 - protein, 2108 aa, synthetic construct
MPAAKRVKLDGGDKKYSIGLDIGTNSVGWAVITDEYKVPSKKFKVLGNTDRHSIKKNLIGALLFDSGETAEATRLKRTARRRYTRRKNRICYLQEIFSNEMAKVDDSFFHRLEESFLVEEDKKHERHPIFGNIVDEVAYHEKYPTIYHLRKKLVDSTDKADLRLIYLALAHMIKFRGHFLIEGDLNPDNSDVDKLFIQLVQTYNQLFEENPINASGVDAKAILSARLSKSRRLENLIAQLPGEKKNGLFGNLIALSLGLTPNFKSNFDLAEDAKLQLSKDTYDDDLDNLLAQIGDQYADLFLAAKNLSDAILLSDILRVNTEITKAPLSASMIKRYDEHHQDLTLLKALVRQQLPEKYKEIFFDQSKNGYAGYIDGGASQEEFYKFIKPILEKMDGTEELLVKLNREDLLRKQRTFDNGSIPHQIHLGELHAILRRQEDFYPFLKDNREKIEKILTFRIPYYVGPLARGNSRFAWMTRKSEETITPWNFEEVVDKGASAQSFIERMTNFDKNLPNEKVLPKHSLLYEYFTVYNELTKVKYVTEGMRKPAFLSGEQKKAIVDLLFKTNRKVTVKQLKEDYFKKIECFDSVEISGVEDRFNASLGTYHDLLKIIKDKDFLDNEENEDILEDIVLTLTLFEDREMIEERLKTYAHLFDDKVMKQLKRRRYTGWGRLSRKLINGIRDKQSGKTILDFLKSDGFANRNFMQLIHDDSLTFKEDIQKAQVSGQGDSLHEHIANLAGSPAIKKGILQTVKVVDELVKVMGRHKPENIVIEMARENQTTQKGQKNSRERMKRIEEGIKELGSQILKEHPVENTQLQNEKLYLYYLQNGRDMYVDQELDINRLSDYDVDHIVPQSFLKDDSIDNKVLTRSDKARGKSDNVPSEEVVKKMKNYWRQLLNAKLITQRKFDNLTKAERGGLSELDKAGFIKRQLVETRQITKHVAQILDSRMNTKYDENDKLIREVKVITLKSKLVSDFRKDFQFYKVREINNYHHAHDAYLNAVVGTALIKKYPKLESEFVYGDYKVYDVRKMIAKSEQEIGKATAKYFFYSNIMNFFKTEITLANGEIRKRPLIETNGETGEIVWDKGRDFATVRKVLSMPQVNIVKKTEVQTGGFSKESILPKRNSDKLIARKKDWDPKKYGGFDSPTVAYSVLVVAKVEKGKSKKLKSVKELLGITIMERSSFEKNPIDFLEAKGYKEVKKDLIIKLPKYSLFELENGRKRMLASAGELQKGNELALPSKYVNFLYLASHYEKLKGSPEDNEQKQLFVEQHKHYLDEIIEQISEFSKRVILADANLDKVLSAYNKHRDKPIREQAENIIHLFTLTNLGAPAAFKYFDTTIDRKRYTSTKEVLDATLIHQSITGLYETRIDLSQLGGDGGPAPGGTLNIEDEYRLHETSKEPDVSLGSTWLSDFPQAWAETGGMGLAVRQAPLIIPLKATSTPVSIKQYPMSQEARLGIKPHIQRLLDQGILVPCQSPWNTPLLPVKKPGTNDYRPVQDLREVNKRVEDIHPTVPNPYNLLSGLPPSHQWYTVLDLKDAFFCLRLHPTSQPLFAFEWRDPEMGISGQLTWTRLPQGFKNSPTLFNEALHRDLADFRIQHPDLILLQYVDDLLLAATSELDCQQGTRALLQTLGNLGYRASAKKAQICQKQVKYLGYLLKEGQRWLTEARKETVMGQPTPKTPRQLREFLGKAGFCRLFIPGFAEMAAPLYPLTKPGTLFNWGPDQQKAYQEIKQALLTAPALGLPDLTKPFELFVDEKQGYAKGVLTQKLGPWRRPVAYLSKKLDPVAAGWPPCLRMVAAIAVLTKDAGKLTMGQPLVILAPHAVEALVKQPPDRWLSNARMTHYQALLLDTDRVQFGPVVALNPATLLPLPEEGLQHNCLDILAEAHGTRPDLTDQPLPDADHTWYTDGSSLLQEGQRKAGAAVTTETEVIWAKALPAGTSAQRAELIALTQALKMAEGKKLNVYTDSRYAFATAHIHGEIYRRRGWLTSEGKEIKNKDEILALLKALFLPKRLSIIHCPGHQKGHSAEARGNRMADQAARKAAITETPDTSTLLIENSSPSGGSKRTADGSEFEAGKRTADGSEFEKRTADGSEFESPKKKAKVE

SEQ ID NO: 2625-2626 - skipped (2 entries)

SEQ ID NO: 2627 - protein, 2120 aa, synthetic construct
MPAAKRVKLDGGDKKYSIGLDIGTNSVGWAVITDEYKVPSKKFKVLGNTDRHSIKKNLIGALLFDSGETAEATRLKRTARRRYTRRKNRICYLQEIFSNEMAKVDDSFFHRLEESFLVEEDKKHERHPIFGNIVDEVAYHEKYPTIYHLRKKLVDSTDKADLRLIYLALAHMIKFRGHFLIEGDLNPDNSDVDKLFIQLVQTYNQLFEENPINASGVDAKAILSARLSKSRRLENLIAQLPGEKKNGLFGNLIALSLGLTPNFKSNFDLAEDAKLQLSKDTYDDDLDNLLAQIGDQYADLFLAAKNLSDAILLSDILRVNTEITKAPLSASMIKRYDEHHQDLTLLKALVRQQLPEKYKEIFFDQSKNGYAGYIDGGASQEEFYKFIKPILEKMDGTEELLVKLNREDLLRKQRTFDNGSIPHQIHLGELHAILRRQEDFYPFLKDNREKIEKILTFRIPYYVGPLARGNSRFAWMTRKSEETITPWNFEEVVDKGASAQSFIERMTNFDKNLPNEKVLPKHSLLYEYFTVYNELTKVKYVTEGMRKPAFLSGEQKKAIVDLLFKTNRKVTVKQLKEDYFKKIECFDSVEISGVEDRFNASLGTYHDLLKIIKDKDFLDNEENEDILEDIVLTLTLFEDREMIEERLKTYAHLFDDKVMKQLKRRRYTGWGRLSRKLINGIRDKQSGKTILDFLKSDGFANRNFMQLIHDDSLTFKEDIQKAQVSGQGDSLHEHIANLAGSPAIKKGILQTVKVVDELVKVMGRHKPENIVIEMARENQTTQKGQKNSRERMKRIEEGIKELGSQILKEHPVENTQLQNEKLYLYYLQNGRDMYVDQELDINRLSDYDVDHIVPQSFLKDDSIDNKVLTRSDKARGKSDNVPSEEVVKKMKNYWRQLLNAKLITQRKFDNLTKAERGGLSELDKAGFIKRQLVETRQITKHVAQILDSRMNTKYDENDKLIREVKVITLKSKLVSDFRKDFQFYKVREINNYHHAHDAYLNAVVGTALIKKYPKLESEFVYGDYKVYDVRKMIAKSEQEIGKATAKYFFYSNIMNFFKTEITLANGEIRKRPLIETNGETGEIVWDKGRDFATVRKVLSMPQVNIVKKTEVQTGGFSKESILPKRNSDKLIARKKDWDPKKYGGFDSPTVAYSVLVVAKVEKGKSKKLKSVKELLGITIMERSSFEKNPIDFLEAKGYKEVKKDLIIKLPKYSLFELENGRKRMLASAGELQKGNELALPSKYVNFLYLASHYEKLKGSPEDNEQKQLFVEQHKHYLDEIIEQISEFSKRVILADANLDKVLSAYNKHRDKPIREQAENIIHLFTLTNLGAPAAFKYFDTTIDRKRYTSTKEVLDATLIHQSITGLYETRIDLSQLGGDGGEAAAKEAAAKEAAAKGGTLNIEDEYRLHETSKEPDVSLGSTWLSDFPQAWAETGGMGLAVRQAPLIIPLKATSTPVSIKQYPMSQEARLGIKPHIQRLLDQGILVPCQSPWNTPLLPVKKPGTNDYRPVQDLREVNKRVEDIHPTVPNPYNLLSGLPPSHQWYTVLDLKDAFFCLRLHPTSQPLFAFEWRDPEMGISGQLTWTRLPQGFKNSPTLFNEALHRDLADFRIQHPDLILLQYVDDLLLAATSELDCQQGTRALLQTLGNLGYRASAKKAQICQKQVKYLGYLLKEGQRWLTEARKETVMGQPTPKTPRQLREFLGKAGFCRLFIPGFAEMAAPLYPLTKPGTLFNWGPDQQKAYQEIKQALLTAPALGLPDLTKPFELFVDEKQGYAKGVLTQKLGPWRRPVAYLSKKLDPVAAGWPPCLRMVAAIAVLTKDAGKLTMGQPLVILAPHAVEALVKQPPDRWLSNARMTHYQALLLDTDRVQFGPVVALNPATLLPLPEEGLQHNCLDILAEAHGTRPDLTDQPLPDADHTWYTDGSSLLQEGQRKAGAAVTTETEVIWAKALPAGTSAQRAELIALTQALKMAEGKKLNVYTDSRYAFATAHIHGEIYRRRGWLTSEGKEIKNKDEILALLKALFLPKRLSIIHCPGHQKGHSAEARGNRMADQAARKAAITETPDTSTLLIENSSPSGGSKRTADGSEFEAGKRTADGSEFEKRTADGSEFESPKKKAKVE

SEQ ID NO: 2628 - skipped

SEQ ID NO: 2629 - protein, 2116 aa, synthetic construct
MPAAKRVKLDGGDKKYSIGLDIGTNSVGWAVITDEYKVPSKKFKVLGNTDRHSIKKNLIGALLFDSGETAEATRLKRTARRRYTRRKNRICYLQEIFSNEMAKVDDSFFHRLEESFLVEEDKKHERHPIFGNIVDEVAYHEKYPTIYHLRKKLVDSTDKADLRLIYLALAHMIKFRGHFLIEGDLNPDNSDVDKLFIQLVQTYNQLFEENPINASGVDAKAILSARLSKSRRLENLIAQLPGEKKNGLFGNLIALSLGLTPNFKSNFDLAEDAKLQLSKDTYDDDLDNLLAQIGDQYADLFLAAKNLSDAILLSDILRVNTEITKAPLSASMIKRYDEHHQDLTLLKALVRQQLPEKYKEIFFDQSKNGYAGYIDGGASQEEFYKFIKPILEKMDGTEELLVKLNREDLLRKQRTFDNGSIPHQIHLGELHAILRRQEDFYPFLKDNREKIEKILTFRIPYYVGPLARGNSRFAWMTRKSEETITPWNFEEVVDKGASAQSFIERMTNFDKNLPNEKVLPKHSLLYEYFTVYNELTKVKYVTEGMRKPAFLSGEQKKAIVDLLFKTNRKVTVKQLKEDYFKKIECFDSVEISGVEDRFNASLGTYHDLLKIIKDKDFLDNEENEDILEDIVLTLTLFEDREMIEERLKTYAHLFDDKVMKQLKRRRYTGWGRLSRKLINGIRDKQSGKTILDFLKSDGFANRNFMQLIHDDSLTFKEDIQKAQVSGQGDSLHEHIANLAGSPAIKKGILQTVKVVDELVKVMGRHKPENIVIEMARENQTTQKGQKNSRERMKRIEEGIKELGSQILKEHPVENTQLQNEKLYLYYLQNGRDMYVDQELDINRLSDYDVDHIVPQSFLKDDSIDNKVLTRSDKARGKSDNVPSEEVVKKMKNYWRQLLNAKLITQRKFDNLTKAERGGLSELDKAGFIKRQLVETRQITKHVAQILDSRMNTKYDENDKLIREVKVITLKSKLVSDFRKDFQFYKVREINNYHHAHDAYLNAVVGTALIKKYPKLESEFVYGDYKVYDVRKMIAKSEQEIGKATAKYFFYSNIMNFFKTEITLANGEIRKRPLIETNGETGEIVWDKGRDFATVRKVLSMPQVNIVKKTEVQTGGFSKESILPKRNSDKLIARKKDWDPKKYGGFDSPTVAYSVLVVAKVEKGKSKKLKSVKELLGITIMERSSFEKNPIDFLEAKGYKEVKKDLIIKLPKYSLFELENGRKRMLASAGELQKGNELALPSKYVNFLYLASHYEKLKGSPEDNEQKQLFVEQHKHYLDEIIEQISEFSKRVILADANLDKVLSAYNKHRDKPIREQAENIIHLFTLTNLGAPAAFKYFDTTIDRKRYTSTKEVLDATLIHQSITGLYETRIDLSQLGGDGGGGSEAAAKGGGGGTLNIEDEYRLHETSKEPDVSLGSTWLSDFPQAWAETGGMGLAVRQAPLIIPLKATSTPVSIKQYPMSQEARLGIKPHIQRLLDQGILVPCQSPWNTPLLPVKKPGTNDYRPVQDLREVNKRVEDIHPTVPNPYNLLSGLPPSHQWYTVLDLKDAFFCLRLHPTSQPLFAFEWRDPEMGISGQLTWTRLPQGFKNSPTLFNEALHRDLADFRIQHPDLILLQYVDDLLLAATSELDCQQGTRALLQTLGNLGYRASAKKAQICQKQVKYLGYLLKEGQRWLTEARKETVMGQPTPKTPRQLREFLGKAGFCRLFIPGFAEMAAPLYPLTKPGTLFNWGPDQQKAYQEIKQALLTAPALGLPDLTKPFELFVDEKQGYAKGVLTQKLGPWRRPVAYLSKKLDPVAAGWPPCLRMVAAIAVLTKDAGKLTMGQPLVILAPHAVEALVKQPPDRWLSNARMTHYQALLLDTDRVQFGPVVALNPATLLPLPEEGLQHNCLDILAEAHGTRPDLTDQPLPDADHTWYTDGSSLLQEGQRKAGAAVTTETEVIWAKALPAGTSAQRAELIALTQALKMAEGKKLNVYTDSRYAFATAHIHGEIYRRRGWLTSEGKEIKNKDEILALLKALFLPKRLSIIHCPGHQKGHSAEARGNRMADQAARKAAITETPDTSTLLIENSSPSGGSKRTADGSEFEAGKRTADGSEFEKRTADGSEFESPKKKAKVE

SEQ ID NO: 2630 - skipped

SEQ ID NO: 2631 - protein, 2108 aa, synthetic construct
MPAAKRVKLDGGDKKYSIGLDIGTNSVGWAVITDEYKVPSKKFKVLGNTDRHSIKKNLIGALLFDSGETAEATRLKRTARRRYTRRKNRICYLQEIFSNEMAKVDDSFFHRLEESFLVEEDKKHERHPIFGNIVDEVAYHEKYPTIYHLRKKLVDSTDKADLRLIYLALAHMIKFRGHFLIEGDLNPDNSDVDKLFIQLVQTYNQLFEENPINASGVDAKAILSARLSKSRRLENLIAQLPGEKKNGLFGNLIALSLGLTPNFKSNFDLAEDAKLQLSKDTYDDDLDNLLAQIGDQYADLFLAAKNLSDAILLSDILRVNTEITKAPLSASMIKRYDEHHQDLTLLKALVRQQLPEKYKEIFFDQSKNGYAGYIDGGASQEEFYKFIKPILEKMDGTEELLVKLNREDLLRKQRTFDNGSIPHQIHLGELHAILRRQEDFYPFLKDNREKIEKILTFRIPYYVGPLARGNSRFAWMTRKSEETITPWNFEEVVDKGASAQSFIERMTNFDKNLPNEKVLPKHSLLYEYFTVYNELTKVKYVTEGMRKPAFLSGEQKKAIVDLLFKTNRKVTVKQLKEDYFKKIECFDSVEISGVEDRFNASLGTYHDLLKIIKDKDFLDNEENEDILEDIVLTLTLFEDREMIEERLKTYAHLFDDKVMKQLKRRRYTGWGRLSRKLINGIRDKQSGKTILDFLKSDGFANRNFMQLIHDDSLTFKEDIQKAQVSGQGDSLHEHIANLAGSPAIKKGILQTVKVVDELVKVMGRHKPENIVIEMARENQTTQKGQKNSRERMKRIEEGIKELGSQILKEHPVENTQLQNEKLYLYYLQNGRDMYVDQELDINRLSDYDVDHIVPQSFLKDDSIDNKVLTRSDKARGKSDNVPSEEVVKKMKNYWRQLLNAKLITQRKFDNLTKAERGGLSELDKAGFIKRQLVETRQITKHVAQILDSRMNTKYDENDKLIREVKVITLKSKLVSDFRKDFQFYKVREINNYHHAHDAYLNAVVGTALIKKYPKLESEFVYGDYKVYDVRKMIAKSEQEIGKATAKYFFYSNIMNFFKTEITLANGEIRKRPLIETNGETGEIVWDKGRDFATVRKVLSMPQVNIVKKTEVQTGGFSKESILPKRNSDKLIARKKDWDPKKYGGFDSPTVAYSVLVVAKVEKGKSKKLKSVKELLGITIMERSSFEKNPIDFLEAKGYKEVKKDLIIKLPKYSLFELENGRKRMLASAGELQKGNELALPSKYVNFLYLASHYEKLKGSPEDNEQKQLFVEQHKHYLDEIIEQISEFSKRVILADANLDKVLSAYNKHRDKPIREQAENIIHLFTLTNLGAPAAFKYFDTTIDRKRYTSTKEVLDATLIHQSITGLYETRIDLSQLGGDGGGGSGGTLNIEDEYRLHETSKEPDVSLGSTWLSDFPQAWAETGGMGLAVRQAPLIIPLKATSTPVSIKQYPMSQEARLGIKPHIQRLLDQGILVPCQSPWNTPLLPVKKPGTNDYRPVQDLREVNKRVEDIHPTVPNPYNLLSGLPPSHQWYTVLDLKDAFFCLRLHPTSQPLFAFEWRDPEMGISGQLTWTRLPQGFKNSPTLFNEALHRDLADFRIQHPDLILLQYVDDLLLAATSELDCQQGTRALLQTLGNLGYRASAKKAQICQKQVKYLGYLLKEGQRWLTEARKETVMGQPTPKTPRQLREFLGKAGFCRLFIPGFAEMAAPLYPLTKPGTLFNWGPDQQKAYQEIKQALLTAPALGLPDLTKPFELFVDEKQGYAKGVLTQKLGPWRRPVAYLSKKLDPVAAGWPPCLRMVAAIAVLTKDAGKLTMGQPLVILAPHAVEALVKQPPDRWLSNARMTHYQALLLDTDRVQFGPVVALNPATLLPLPEEGLQHNCLDILAEAHGTRPDLTDQPLPDADHTWYTDGSSLLQEGQRKAGAAVTTETEVIWAKALPAGTSAQRAELIALTQALKMAEGKKLNVYTDSRYAFATAHIHGEIYRRRGWLTSEGKEIKNKDEILALLKALFLPKRLSIIHCPGHQKGHSAEARGNRMADQAARKAAITETPDTSTLLIENSSPSGGSKRTADGSEFEAGKRTADGSEFEKRTADGSEFESPKKKAKVE

SEQ ID NO: 2632 - protein, 2114 aa, synthetic construct
MPAAKRVKLDGGDKKYSIGLDIGTNSVGWAVITDEYKVPSKKFKVLGNTDRHSIKKNLIGALLFDSGETAEATRLKRTARRRYTRRKNRICYLQEIFSNEMAKVDDSFFHRLEESFLVEEDKKHERHPIFGNIVDEVAYHEKYPTIYHLRKKLVDSTDKADLRLIYLALAHMIKFRGHFLIEGDLNPDNSDVDKLFIQLVQTYNQLFEENPINASGVDAKAILSARLSKSRRLENLIAQLPGEKKNGLFGNLIALSLGLTPNFKSNFDLAEDAKLQLSKDTYDDDLDNLLAQIGDQYADLFLAAKNLSDAILLSDILRVNTEITKAPLSASMIKRYDEHHQDLTLLKALVRQQLPEKYKEIFFDQSKNGYAGYIDGGASQEEFYKFIKPILEKMDGTEELLVKLNREDLLRKQRTFDNGSIPHQIHLGELHAILRRQEDFYPFLKDNREKIEKILTFRIPYYVGPLARGNSRFAWMTRKSEETITPWNFEEVVDKGASAQSFIERMTNFDKNLPNEKVLPKHSLLYEYFTVYNELTKVKYVTEGMRKPAFLSGEQKKAIVDLLFKTNRKVTVKQLKEDYFKKIECFDSVEISGVEDRFNASLGTYHDLLKIIKDKDFLDNEENEDILEDIVLTLTLFEDREMIEERLKTYAHLFDDKVMKQLKRRRYTGWGRLSRKLINGIRDKQSGKTILDFLKSDGFANRNFMQLIHDDSLTFKEDIQKAQVSGQGDSLHEHIANLAGSPAIKKGILQTVKVVDELVKVMGRHKPENIVIEMARENQTTQKGQKNSRERMKRIEEGIKELGSQILKEHPVENTQLQNEKLYLYYLQNGRDMYVDQELDINRLSDYDVDHIVPQSFLKDDSIDNKVLTRSDKARGKSDNVPSEEVVKKMKNYWRQLLNAKLITQRKFDNLTKAERGGLSELDKAGFIKRQLVETRQITKHVAQILDSRMNTKYDENDKLIREVKVITLKSKLVSDFRKDFQFYKVREINNYHHAHDAYLNAVVGTALIKKYPKLESEFVYGDYKVYDVRKMIAKSEQEIGKATAKYFFYSNIMNFFKTEITLANGEIRKRPLIETNGETGEIVWDKGRDFATVRKVLSMPQVNIVKKTEVQTGGFSKESILPKRNSDKLIARKKDWDPKKYGGFDSPTVAYSVLVVAKVEKGKSKKLKSVKELLGITIMERSSFEKNPIDFLEAKGYKEVKKDLIIKLPKYSLFELENGRKRMLASAGELQKGNELALPSKYVNFLYLASHYEKLKGSPEDNEQKQLFVEQHKHYLDEIIEQISEFSKRVILADANLDKVLSAYNKHRDKPIREQAENIIHLFTLTNLGAPAAFKYFDTTIDRKRYTSTKEVLDATLIHQSITGLYETRIDLSQLGGDGGGGGGSSGGSGGTLNIEDEYRLHETSKEPDVSLGSTWLSDFPQAWAETGGMGLAVRQAPLIIPLKATSTPVSIKQYPMSQEARLGIKPHIQRLLDQGILVPCQSPWNTPLLPVKKPGTNDYRPVQDLREVNKRVEDIHPTVPNPYNLLSGLPPSHQWYTVLDLKDAFFCLRLHPTSQPLFAFEWRDPEMGISGQLTWTRLPQGFKNSPTLFNEALHRDLADFRIQHPDLILLQYVDDLLLAATSELDCQQGTRALLQTLGNLGYRASAKKAQICQKQVKYLGYLLKEGQRWLTEARKETVMGQPTPKTPRQLREFLGKAGFCRLFIPGFAEMAAPLYPLTKPGTLFNWGPDQQKAYQEIKQALLTAPALGLPDLTKPFELFVDEKQGYAKGVLTQKLGPWRRPVAYLSKKLDPVAAGWPPCLRMVAAIAVLTKDAGKLTMGQPLVILAPHAVEALVKQPPDRWLSNARMTHYQALLLDTDRVQFGPVVALNPATLLPLPEEGLQHNCLDILAEAHGTRPDLTDQPLPDADHTWYTDGSSLLQEGQRKAGAAVTTETEVIWAKALPAGTSAQRAELIALTQALKMAEGKKLNVYTDSRYAFATAHIHGEIYRRRGWLTSEGKEIKNKDEILALLKALFLPKRLSIIHCPGHQKGHSAEARGNRMADQAARKAAITETPDTSTLLIENSSPSGGSKRTADGSEFEAGKRTADGSEFEKRTADGSEFESPKKKAKVE

SEQ ID NO: 2633 - protein, 2114 aa, synthetic construct
MPAAKRVKLDGGDKKYSIGLDIGTNSVGWAVITDEYKVPSKKFKVLGNTDRHSIKKNLIGALLFDSGETAEATRLKRTARRRYTRRKNRICYLQEIFSNEMAKVDDSFFHRLEESFLVEEDKKHERHPIFGNIVDEVAYHEKYPTIYHLRKKLVDSTDKADLRLIYLALAHMIKFRGHFLIEGDLNPDNSDVDKLFIQLVQTYNQLFEENPINASGVDAKAILSARLSKSRRLENLIAQLPGEKKNGLFGNLIALSLGLTPNFKSNFDLAEDAKLQLSKDTYDDDLDNLLAQIGDQYADLFLAAKNLSDAILLSDILRVNTEITKAPLSASMIKRYDEHHQDLTLLKALVRQQLPEKYKEIFFDQSKNGYAGYIDGGASQEEFYKFIKPILEKMDGTEELLVKLNREDLLRKQRTFDNGSIPHQIHLGELHAILRRQEDFYPFLKDNREKIEKILTFRIPYYVGPLARGNSRFAWMTRKSEETITPWNFEEVVDKGASAQSFIERMTNFDKNLPNEKVLPKHSLLYEYFTVYNELTKVKYVTEGMRKPAFLSGEQKKAIVDLLFKTNRKVTVKQLKEDYFKKIECFDSVEISGVEDRFNASLGTYHDLLKIIKDKDFLDNEENEDILEDIVLTLTLFEDREMIEERLKTYAHLFDDKVMKQLKRRRYTGWGRLSRKLINGIRDKQSGKTILDFLKSDGFANRNFMQLIHDDSLTFKEDIQKAQVSGQGDSLHEHIANLAGSPAIKKGILQTVKVVDELVKVMGRHKPENIVIEMARENQTTQKGQKNSRERMKRIEEGIKELGSQILKEHPVENTQLQNEKLYLYYLQNGRDMYVDQELDINRLSDYDVDHIVPQSFLKDDSIDNKVLTRSDKARGKSDNVPSEEVVKKMKNYWRQLLNAKLITQRKFDNLTKAERGGLSELDKAGFIKRQLVETRQITKHVAQILDSRMNTKYDENDKLIREVKVITLKSKLVSDFRKDFQFYKVREINNYHHAHDAYLNAVVGTALIKKYPKLESEFVYGDYKVYDVRKMIAKSEQEIGKATAKYFFYSNIMNFFKTEITLANGEIRKRPLIETNGETGEIVWDKGRDFATVRKVLSMPQVNIVKKTEVQTGGFSKESILPKRNSDKLIARKKDWDPKKYGGFDSPTVAYSVLVVAKVEKGKSKKLKSVKELLGITIMERSSFEKNPIDFLEAKGYKEVKKDLIIKLPKYSLFELENGRKRMLASAGELQKGNELALPSKYVNFLYLASHYEKLKGSPEDNEQKQLFVEQHKHYLDEIIEQISEFSKRVILADANLDKVLSAYNKHRDKPIREQAENIIHLFTLTNLGAPAAFKYFDTTIDRKRYTSTKEVLDATLIHQSITGLYETRIDLSQLGGDGGGSSPAPGGGGGTLNIEDEYRLHETSKEPDVSLGSTWLSDFPQAWAETGGMGLAVRQAPLIIPLKATSTPVSIKQYPMSQEARLGIKPHIQRLLDQGILVPCQSPWNTPLLPVKKPGTNDYRPVQDLREVNKRVEDIHPTVPNPYNLLSGLPPSHQWYTVLDLKDAFFCLRLHPTSQPLFAFEWRDPEMGISGQLTWTRLPQGFKNSPTLFNEALHRDLADFRIQHPDLILLQYVDDLLLAATSELDCQQGTRALLQTLGNLGYRASAKKAQICQKQVKYLGYLLKEGQRWLTEARKETVMGQPTPKTPRQLREFLGKAGFCRLFIPGFAEMAAPLYPLTKPGTLFNWGPDQQKAYQEIKQALLTAPALGLPDLTKPFELFVDEKQGYAKGVLTQKLGPWRRPVAYLSKKLDPVAAGWPPCLRMVAAIAVLTKDAGKLTMGQPLVILAPHAVEALVKQPPDRWLSNARMTHYQALLLDTDRVQFGPVVALNPATLLPLPEEGLQHNCLDILAEAHGTRPDLTDQPLPDADHTWYTDGSSLLQEGQRKAGAAVTTETEVIWAKALPAGTSAQRAELIALTQALKMAEGKKLNVYTDSRYAFATAHIHGEIYRRRGWLTSEGKEIKNKDEILALLKALFLPKRLSIIHCPGHQKGHSAEARGNRMADQAARKAAITETPDTSTLLIENSSPSGGSKRTADGSEFEAGKRTADGSEFEKRTADGSEFESPKKKAKVE

SEQ ID NO: 2634 - protein, 2114 aa, synthetic construct
MPAAKRVKLDGGDKKYSIGLDIGTNSVGWAVITDEYKVPSKKFKVLGNTDRHSIKKNLIGALLFDSGETAEATRLKRTARRRYTRRKNRICYLQEIFSNEMAKVDDSFFHRLEESFLVEEDKKHERHPIFGNIVDEVAYHEKYPTIYHLRKKLVDSTDKADLRLIYLALAHMIKFRGHFLIEGDLNPDNSDVDKLFIQLVQTYNQLFEENPINASGVDAKAILSARLSKSRRLENLIAQLPGEKKNGLFGNLIALSLGLTPNFKSNFDLAEDAKLQLSKDTYDDDLDNLLAQIGDQYADLFLAAKNLSDAILLSDILRVNTEITKAPLSASMIKRYDEHHQDLTLLKALVRQQLPEKYKEIFFDQSKNGYAGYIDGGASQEEFYKFIKPILEKMDGTEELLVKLNREDLLRKQRTFDNGSIPHQIHLGELHAILRRQEDFYPFLKDNREKIEKILTFRIPYYVGPLARGNSRFAWMTRKSEETITPWNFEEVVDKGASAQSFIERMTNFDKNLPNEKVLPKHSLLYEYFTVYNELTKVKYVTEGMRKPAFLSGEQKKAIVDLLFKTNRKVTVKQLKEDYFKKIECFDSVEISGVEDRFNASLGTYHDLLKIIKDKDFLDNEENEDILEDIVLTLTLFEDREMIEERLKTYAHLFDDKVMKQLKRRRYTGWGRLSRKLINGIRDKQSGKTILDFLKSDGFANRNFMQLIHDDSLTFKEDIQKAQVSGQGDSLHEHIANLAGSPAIKKGILQTVKVVDELVKVMGRHKPENIVIEMARENQTTQKGQKNSRERMKRIEEGIKELGSQILKEHPVENTQLQNEKLYLYYLQNGRDMYVDQELDINRLSDYDVDHIVPQSFLKDDSIDNKVLTRSDKARGKSDNVPSEEVVKKMKNYWRQLLNAKLITQRKFDNLTKAERGGLSELDKAGFIKRQLVETRQITKHVAQILDSRMNTKYDENDKLIREVKVITLKSKLVSDFRKDFQFYKVREINNYHHAHDAYLNAVVGTALIKKYPKLESEFVYGDYKVYDVRKMIAKSEQEIGKATAKYFFYSNIMNFFKTEITLANGEIRKRPLIETNGETGEIVWDKGRDFATVRKVLSMPQVNIVKKTEVQTGGFSKESILPKRNSDKLIARKKDWDPKKYGGFDSPTVAYSVLVVAKVEKGKSKKLKSVKELLGITIMERSSFEKNPIDFLEAKGYKEVKKDLIIKLPKYSLFELENGRKRMLASAGELQKGNELALPSKYVNFLYLASHYEKLKGSPEDNEQKQLFVEQHKHYLDEIIEQISEFSKRVILADANLDKVLSAYNKHRDKPIREQAENIIHLFTLTNLGAPAAFKYFDTTIDRKRYTSTKEVLDATLIHQSITGLYETRIDLSQLGGDGGGSSGSSGSSGGTLNIEDEYRLHETSKEPDVSLGSTWLSDFPQAWAETGGMGLAVRQAPLIIPLKATSTPVSIKQYPMSQEARLGIKPHIQRLLDQGILVPCQSPWNTPLLPVKKPGTNDYRPVQDLREVNKRVEDIHPTVPNPYNLLSGLPPSHQWYTVLDLKDAFFCLRLHPTSQPLFAFEWRDPEMGISGQLTWTRLPQGFKNSPTLFNEALHRDLADFRIQHPDLILLQYVDDLLLAATSELDCQQGTRALLQTLGNLGYRASAKKAQICQKQVKYLGYLLKEGQRWLTEARKETVMGQPTPKTPRQLREFLGKAGFCRLFIPGFAEMAAPLYPLTKPGTLFNWGPDQQKAYQEIKQALLTAPALGLPDLTKPFELFVDEKQGYAKGVLTQKLGPWRRPVAYLSKKLDPVAAGWPPCLRMVAAIAVLTKDAGKLTMGQPLVILAPHAVEALVKQPPDRWLSNARMTHYQALLLDTDRVQFGPVVALNPATLLPLPEEGLQHNCLDILAEAHGTRPDLTDQPLPDADHTWYTDGSSLLQEGQRKAGAAVTTETEVIWAKALPAGTSAQRAELIALTQALKMAEGKKLNVYTDSRYAFATAHIHGEIYRRRGWLTSEGKEIKNKDEILALLKALFLPKRLSIIHCPGHQKGHSAEARGNRMADQAARKAAITETPDTSTLLIENSSPSGGSKRTADGSEFEAGKRTADGSEFEKRTADGSEFESPKKKAKVE

SEQ ID NO: 2635 - skipped

SEQ ID NO: 2636 - protein, 2120 aa, synthetic construct
MPAAKRVKLDGGDKKYSIGLDIGTNSVGWAVITDEYKVPSKKFKVLGNTDRHSIKKNLIGALLFDSGETAEATRLKRTARRRYTRRKNRICYLQEIFSNEMAKVDDSFFHRLEESFLVEEDKKHERHPIFGNIVDEVAYHEKYPTIYHLRKKLVDSTDKADLRLIYLALAHMIKFRGHFLIEGDLNPDNSDVDKLFIQLVQTYNQLFEENPINASGVDAKAILSARLSKSRRLENLIAQLPGEKKNGLFGNLIALSLGLTPNFKSNFDLAEDAKLQLSKDTYDDDLDNLLAQIGDQYADLFLAAKNLSDAILLSDILRVNTEITKAPLSASMIKRYDEHHQDLTLLKALVRQQLPEKYKEIFFDQSKNGYAGYIDGGASQEEFYKFIKPILEKMDGTEELLVKLNREDLLRKQRTFDNGSIPHQIHLGELHAILRRQEDFYPFLKDNREKIEKILTFRIPYYVGPLARGNSRFAWMTRKSEETITPWNFEEVVDKGASAQSFIERMTNFDKNLPNEKVLPKHSLLYEYFTVYNELTKVKYVTEGMRKPAFLSGEQKKAIVDLLFKTNRKVTVKQLKEDYFKKIECFDSVEISGVEDRFNASLGTYHDLLKIIKDKDFLDNEENEDILEDIVLTLTLFEDREMIEERLKTYAHLFDDKVMKQLKRRRYTGWGRLSRKLINGIRDKQSGKTILDFLKSDGFANRNFMQLIHDDSLTFKEDIQKAQVSGQGDSLHEHIANLAGSPAIKKGILQTVKVVDELVKVMGRHKPENIVIEMARENQTTQKGQKNSRERMKRIEEGIKELGSQILKEHPVENTQLQNEKLYLYYLQNGRDMYVDQELDINRLSDYDVDHIVPQSFLKDDSIDNKVLTRSDKARGKSDNVPSEEVVKKMKNYWRQLLNAKLITQRKFDNLTKAERGGLSELDKAGFIKRQLVETRQITKHVAQILDSRMNTKYDENDKLIREVKVITLKSKLVSDFRKDFQFYKVREINNYHHAHDAYLNAVVGTALIKKYPKLESEFVYGDYKVYDVRKMIAKSEQEIGKATAKYFFYSNIMNFFKTEITLANGEIRKRPLIETNGETGEIVWDKGRDFATVRKVLSMPQVNIVKKTEVQTGGFSKESILPKRNSDKLIARKKDWDPKKYGGFDSPTVAYSVLVVAKVEKGKSKKLKSVKELLGITIMERSSFEKNPIDFLEAKGYKEVKKDLIIKLPKYSLFELENGRKRMLASAGELQKGNELALPSKYVNFLYLASHYEKLKGSPEDNEQKQLFVEQHKHYLDEIIEQISEFSKRVILADANLDKVLSAYNKHRDKPIREQAENIIHLFTLTNLGAPAAFKYFDTTIDRKRYTSTKEVLDATLIHQSITGLYETRIDLSQLGGDGGGGGGSEAAAKGGGGSGGTLNIEDEYRLHETSKEPDVSLGSTWLSDFPQAWAETGGMGLAVRQAPLIIPLKATSTPVSIKQYPMSQEARLGIKPHIQRLLDQGILVPCQSPWNTPLLPVKKPGTNDYRPVQDLREVNKRVEDIHPTVPNPYNLLSGLPPSHQWYTVLDLKDAFFCLRLHPTSQPLFAFEWRDPEMGISGQLTWTRLPQGFKNSPTLFNEALHRDLADFRIQHPDLILLQYVDDLLLAATSELDCQQGTRALLQTLGNLGYRASAKKAQICQKQVKYLGYLLKEGQRWLTEARKETVMGQPTPKTPRQLREFLGKAGFCRLFIPGFAEMAAPLYPLTKPGTLFNWGPDQQKAYQEIKQALLTAPALGLPDLTKPFELFVDEKQGYAKGVLTQKLGPWRRPVAYLSKKLDPVAAGWPPCLRMVAAIAVLTKDAGKLTMGQPLVILAPHAVEALVKQPPDRWLSNARMTHYQALLLDTDRVQFGPVVALNPATLLPLPEEGLQHNCLDILAEAHGTRPDLTDQPLPDADHTWYTDGSSLLQEGQRKAGAAVTTETEVIWAKALPAGTSAQRAELIALTQALKMAEGKKLNVYTDSRYAFATAHIHGEIYRRRGWLTSEGKEIKNKDEILALLKALFLPKRLSIIHCPGHQKGHSAEARGNRMADQAARKAAITETPDTSTLLIENSSPSGGSKRTADGSEFEAGKRTADGSEFEKRTADGSEFESPKKKAKVE

SEQ ID NO: 2637 - protein, 2116 aa, synthetic construct
MPAAKRVKLDGGDKKYSIGLDIGTNSVGWAVITDEYKVPSKKFKVLGNTDRHSIKKNLIGALLFDSGETAEATRLKRTARRRYTRRKNRICYLQEIFSNEMAKVDDSFFHRLEESFLVEEDKKHERHPIFGNIVDEVAYHEKYPTIYHLRKKLVDSTDKADLRLIYLALAHMIKFRGHFLIEGDLNPDNSDVDKLFIQLVQTYNQLFEENPINASGVDAKAILSARLSKSRRLENLIAQLPGEKKNGLFGNLIALSLGLTPNFKSNFDLAEDAKLQLSKDTYDDDLDNLLAQIGDQYADLFLAAKNLSDAILLSDILRVNTEITKAPLSASMIKRYDEHHQDLTLLKALVRQQLPEKYKEIFFDQSKNGYAGYIDGGASQEEFYKFIKPILEKMDGTEELLVKLNREDLLRKQRTFDNGSIPHQIHLGELHAILRRQEDFYPFLKDNREKIEKILTFRIPYYVGPLARGNSRFAWMTRKSEETITPWNFEEVVDKGASAQSFIERMTNFDKNLPNEKVLPKHSLLYEYFTVYNELTKVKYVTEGMRKPAFLSGEQKKAIVDLLFKTNRKVTVKQLKEDYFKKIECFDSVEISGVEDRFNASLGTYHDLLKIIKDKDFLDNEENEDILEDIVLTLTLFEDREMIEERLKTYAHLFDDKVMKQLKRRRYTGWGRLSRKLINGIRDKQSGKTILDFLKSDGFANRNFMQLIHDDSLTFKEDIQKAQVSGQGDSLHEHIANLAGSPAIKKGILQTVKVVDELVKVMGRHKPENIVIEMARENQTTQKGQKNSRERMKRIEEGIKELGSQILKEHPVENTQLQNEKLYLYYLQNGRDMYVDQELDINRLSDYDVDHIVPQSFLKDDSIDNKVLTRSDKARGKSDNVPSEEVVKKMKNYWRQLLNAKLITQRKFDNLTKAERGGLSELDKAGFIKRQLVETRQITKHVAQILDSRMNTKYDENDKLIREVKVITLKSKLVSDFRKDFQFYKVREINNYHHAHDAYLNAVVGTALIKKYPKLESEFVYGDYKVYDVRKMIAKSEQEIGKATAKYFFYSNIMNFFKTEITLANGEIRKRPLIETNGETGEIVWDKGRDFATVRKVLSMPQVNIVKKTEVQTGGFSKESILPKRNSDKLIARKKDWDPKKYGGFDSPTVAYSVLVVAKVEKGKSKKLKSVKELLGITIMERSSFEKNPIDFLEAKGYKEVKKDLIIKLPKYSLFELENGRKRMLASAGELQKGNELALPSKYVNFLYLASHYEKLKGSPEDNEQKQLFVEQHKHYLDEIIEQISEFSKRVILADANLDKVLSAYNKHRDKPIREQAENIIHLFTLTNLGAPAAFKYFDTTIDRKRYTSTKEVLDATLIHQSITGLYETRIDLSQLGGDGGEAAAKGGSGGGGGTLNIEDEYRLHETSKEPDVSLGSTWLSDFPQAWAETGGMGLAVRQAPLIIPLKATSTPVSIKQYPMSQEARLGIKPHIQRLLDQGILVPCQSPWNTPLLPVKKPGTNDYRPVQDLREVNKRVEDIHPTVPNPYNLLSGLPPSHQWYTVLDLKDAFFCLRLHPTSQPLFAFEWRDPEMGISGQLTWTRLPQGFKNSPTLFNEALHRDLADFRIQHPDLILLQYVDDLLLAATSELDCQQGTRALLQTLGNLGYRASAKKAQICQKQVKYLGYLLKEGQRWLTEARKETVMGQPTPKTPRQLREFLGKAGFCRLFIPGFAEMAAPLYPLTKPGTLFNWGPDQQKAYQEIKQALLTAPALGLPDLTKPFELFVDEKQGYAKGVLTQKLGPWRRPVAYLSKKLDPVAAGWPPCLRMVAAIAVLTKDAGKLTMGQPLVILAPHAVEALVKQPPDRWLSNARMTHYQALLLDTDRVQFGPVVALNPATLLPLPEEGLQHNCLDILAEAHGTRPDLTDQPLPDADHTWYTDGSSLLQEGQRKAGAAVTTETEVIWAKALPAGTSAQRAELIALTQALKMAEGKKLNVYTDSRYAFATAHIHGEIYRRRGWLTSEGKEIKNKDEILALLKALFLPKRLSIIHCPGHQKGHSAEARGNRMADQAARKAAITETPDTSTLLIENSSPSGGSKRTADGSEFEAGKRTADGSEFEKRTADGSEFESPKKKAKVE

SEQ ID NO: 2638 - protein, 2116 aa, synthetic construct
MPAAKRVKLDGGDKKYSIGLDIGTNSVGWAVITDEYKVPSKKFKVLGNTDRHSIKKNLIGALLFDSGETAEATRLKRTARRRYTRRKNRICYLQEIFSNEMAKVDDSFFHRLEESFLVEEDKKHERHPIFGNIVDEVAYHEKYPTIYHLRKKLVDSTDKADLRLIYLALAHMIKFRGHFLIEGDLNPDNSDVDKLFIQLVQTYNQLFEENPINASGVDAKAILSARLSKSRRLENLIAQLPGEKKNGLFGNLIALSLGLTPNFKSNFDLAEDAKLQLSKDTYDDDLDNLLAQIGDQYADLFLAAKNLSDAILLSDILRVNTEITKAPLSASMIKRYDEHHQDLTLLKALVRQQLPEKYKEIFFDQSKNGYAGYIDGGASQEEFYKFIKPILEKMDGTEELLVKLNREDLLRKQRTFDNGSIPHQIHLGELHAILRRQEDFYPFLKDNREKIEKILTFRIPYYVGPLARGNSRFAWMTRKSEETITPWNFEEVVDKGASAQSFIERMTNFDKNLPNEKVLPKHSLLYEYFTVYNELTKVKYVTEGMRKPAFLSGEQKKAIVDLLFKTNRKVTVKQLKEDYFKKIECFDSVEISGVEDRFNASLGTYHDLLKIIKDKDFLDNEENEDILEDIVLTLTLFEDREMIEERLKTYAHLFDDKVMKQLKRRRYTGWGRLSRKLINGIRDKQSGKTILDFLKSDGFANRNFMQLIHDDSLTFKEDIQKAQVSGQGDSLHEHIANLAGSPAIKKGILQTVKVVDELVKVMGRHKPENIVIEMARENQTTQKGQKNSRERMKRIEEGIKELGSQILKEHPVENTQLQNEKLYLYYLQNGRDMYVDQELDINRLSDYDVDHIVPQSFLKDDSIDNKVLTRSDKARGKSDNVPSEEVVKKMKNYWRQLLNAKLITQRKFDNLTKAERGGLSELDKAGFIKRQLVETRQITKHVAQILDSRMNTKYDENDKLIREVKVITLKSKLVSDFRKDFQFYKVREINNYHHAHDAYLNAVVGTALIKKYPKLESEFVYGDYKVYDVRKMIAKSEQEIGKATAKYFFYSNIMNFFKTEITLANGEIRKRPLIETNGETGEIVWDKGRDFATVRKVLSMPQVNIVKKTEVQTGGFSKESILPKRNSDKLIARKKDWDPKKYGGFDSPTVAYSVLVVAKVEKGKSKKLKSVKELLGITIMERSSFEKNPIDFLEAKGYKEVKKDLIIKLPKYSLFELENGRKRMLASAGELQKGNELALPSKYVNFLYLASHYEKLKGSPEDNEQKQLFVEQHKHYLDEIIEQISEFSKRVILADANLDKVLSAYNKHRDKPIREQAENIIHLFTLTNLGAPAAFKYFDTTIDRKRYTSTKEVLDATLIHQSITGLYETRIDLSQLGGDGGGGGEAAAKGGSGGTLNIEDEYRLHETSKEPDVSLGSTWLSDFPQAWAETGGMGLAVRQAPLIIPLKATSTPVSIKQYPMSQEARLGIKPHIQRLLDQGILVPCQSPWNTPLLPVKKPGTNDYRPVQDLREVNKRVEDIHPTVPNPYNLLSGLPPSHQWYTVLDLKDAFFCLRLHPTSQPLFAFEWRDPEMGISGQLTWTRLPQGFKNSPTLFNEALHRDLADFRIQHPDLILLQYVDDLLLAATSELDCQQGTRALLQTLGNLGYRASAKKAQICQKQVKYLGYLLKEGQRWLTEARKETVMGQPTPKTPRQLREFLGKAGFCRLFIPGFAEMAAPLYPLTKPGTLFNWGPDQQKAYQEIKQALLTAPALGLPDLTKPFELFVDEKQGYAKGVLTQKLGPWRRPVAYLSKKLDPVAAGWPPCLRMVAAIAVLTKDAGKLTMGQPLVILAPHAVEALVKQPPDRWLSNARMTHYQALLLDTDRVQFGPVVALNPATLLPLPEEGLQHNCLDILAEAHGTRPDLTDQPLPDADHTWYTDGSSLLQEGQRKAGAAVTTETEVIWAKALPAGTSAQRAELIALTQALKMAEGKKLNVYTDSRYAFATAHIHGEIYRRRGWLTSEGKEIKNKDEILALLKALFLPKRLSIIHCPGHQKGHSAEARGNRMADQAARKAAITETPDTSTLLIENSSPSGGSKRTADGSEFEAGKRTADGSEFEKRTADGSEFESPKKKAKVE

SEQ ID NO: 2639 - protein, 2115 aa, synthetic construct
MPAAKRVKLDGGDKKYSIGLDIGTNSVGWAVITDEYKVPSKKFKVLGNTDRHSIKKNLIGALLFDSGETAEATRLKRTARRRYTRRKNRICYLQEIFSNEMAKVDDSFFHRLEESFLVEEDKKHERHPIFGNIVDEVAYHEKYPTIYHLRKKLVDSTDKADLRLIYLALAHMIKFRGHFLIEGDLNPDNSDVDKLFIQLVQTYNQLFEENPINASGVDAKAILSARLSKSRRLENLIAQLPGEKKNGLFGNLIALSLGLTPNFKSNFDLAEDAKLQLSKDTYDDDLDNLLAQIGDQYADLFLAAKNLSDAILLSDILRVNTEITKAPLSASMIKRYDEHHQDLTLLKALVRQQLPEKYKEIFFDQSKNGYAGYIDGGASQEEFYKFIKPILEKMDGTEELLVKLNREDLLRKQRTFDNGSIPHQIHLGELHAILRRQEDFYPFLKDNREKIEKILTFRIPYYVGPLARGNSRFAWMTRKSEETITPWNFEEVVDKGASAQSFIERMTNFDKNLPNEKVLPKHSLLYEYFTVYNELTKVKYVTEGMRKPAFLSGEQKKAIVDLLFKTNRKVTVKQLKEDYFKKIECFDSVEISGVEDRFNASLGTYHDLLKIIKDKDFLDNEENEDILEDIVLTLTLFEDREMIEERLKTYAHLFDDKVMKQLKRRRYTGWGRLSRKLINGIRDKQSGKTILDFLKSDGFANRNFMQLIHDDSLTFKEDIQKAQVSGQGDSLHEHIANLAGSPAIKKGILQTVKVVDELVKVMGRHKPENIVIEMARENQTTQKGQKNSRERMKRIEEGIKELGSQILKEHPVENTQLQNEKLYLYYLQNGRDMYVDQELDINRLSDYDVDHIVPQSFLKDDSIDNKVLTRSDKARGKSDNVPSEEVVKKMKNYWRQLLNAKLITQRKFDNLTKAERGGLSELDKAGFIKRQLVETRQITKHVAQILDSRMNTKYDENDKLIREVKVITLKSKLVSDFRKDFQFYKVREINNYHHAHDAYLNAVVGTALIKKYPKLESEFVYGDYKVYDVRKMIAKSEQEIGKATAKYFFYSNIMNFFKTEITLANGEIRKRPLIETNGETGEIVWDKGRDFATVRKVLSMPQVNIVKKTEVQTGGFSKESILPKRNSDKLIARKKDWDPKKYGGFDSPTVAYSVLVVAKVEKGKSKKLKSVKELLGITIMERSSFEKNPIDFLEAKGYKEVKKDLIIKLPKYSLFELENGRKRMLASAGELQKGNELALPSKYVNFLYLASHYEKLKGSPEDNEQKQLFVEQHKHYLDEIIEQISEFSKRVILADANLDKVLSAYNKHRDKPIREQAENIIHLFTLTNLGAPAAFKYFDTTIDRKRYTSTKEVLDATLIHQSITGLYETRIDLSQLGGDGGGGGGSGGGGSGGTLNIEDEYRLHETSKEPDVSLGSTWLSDFPQAWAETGGMGLAVRQAPLIIPLKATSTPVSIKQYPMSQEARLGIKPHIQRLLDQGILVPCQSPWNTPLLPVKKPGTNDYRPVQDLREVNKRVEDIHPTVPNPYNLLSGLPPSHQWYTVLDLKDAFFCLRLHPTSQPLFAFEWRDPEMGISGQLTWTRLPQGFKNSPTLFNEALHRDLADFRIQHPDLILLQYVDDLLLAATSELDCQQGTRALLQTLGNLGYRASAKKAQICQKQVKYLGYLLKEGQRWLTEARKETVMGQPTPKTPRQLREFLGKAGFCRLFIPGFAEMAAPLYPLTKPGTLFNWGPDQQKAYQEIKQALLTAPALGLPDLTKPFELFVDEKQGYAKGVLTQKLGPWRRPVAYLSKKLDPVAAGWPPCLRMVAAIAVLTKDAGKLTMGQPLVILAPHAVEALVKQPPDRWLSNARMTHYQALLLDTDRVQFGPVVALNPATLLPLPEEGLQHNCLDILAEAHGTRPDLTDQPLPDADHTWYTDGSSLLQEGQRKAGAAVTTETEVIWAKALPAGTSAQRAELIALTQALKMAEGKKLNVYTDSRYAFATAHIHGEIYRRRGWLTSEGKEIKNKDEILALLKALFLPKRLSIIHCPGHQKGHSAEARGNRMADQAARKAAITETPDTSTLLIENSSPSGGSKRTADGSEFEAGKRTADGSEFEKRTADGSEFESPKKKAKVE

SEQ ID NO: 2640 - skipped

SEQ ID NO: 2641 - protein, 2116 aa, synthetic construct
MPAAKRVKLDGGDKKYSIGLDIGTNSVGWAVITDEYKVPSKKFKVLGNTDRHSIKKNLIGALLFDSGETAEATRLKRTARRRYTRRKNRICYLQEIFSNEMAKVDDSFFHRLEESFLVEEDKKHERHPIFGNIVDEVAYHEKYPTIYHLRKKLVDSTDKADLRLIYLALAHMIKFRGHFLIEGDLNPDNSDVDKLFIQLVQTYNQLFEENPINASGVDAKAILSARLSKSRRLENLIAQLPGEKKNGLFGNLIALSLGLTPNFKSNFDLAEDAKLQLSKDTYDDDLDNLLAQIGDQYADLFLAAKNLSDAILLSDILRVNTEITKAPLSASMIKRYDEHHQDLTLLKALVRQQLPEKYKEIFFDQSKNGYAGYIDGGASQEEFYKFIKPILEKMDGTEELLVKLNREDLLRKQRTFDNGSIPHQIHLGELHAILRRQEDFYPFLKDNREKIEKILTFRIPYYVGPLARGNSRFAWMTRKSEETITPWNFEEVVDKGASAQSFIERMTNFDKNLPNEKVLPKHSLLYEYFTVYNELTKVKYVTEGMRKPAFLSGEQKKAIVDLLFKTNRKVTVKQLKEDYFKKIECFDSVEISGVEDRFNASLGTYHDLLKIIKDKDFLDNEENEDILEDIVLTLTLFEDREMIEERLKTYAHLFDDKVMKQLKRRRYTGWGRLSRKLINGIRDKQSGKTILDFLKSDGFANRNFMQLIHDDSLTFKEDIQKAQVSGQGDSLHEHIANLAGSPAIKKGILQTVKVVDELVKVMGRHKPENIVIEMARENQTTQKGQKNSRERMKRIEEGIKELGSQILKEHPVENTQLQNEKLYLYYLQNGRDMYVDQELDINRLSDYDVDHIVPQSFLKDDSIDNKVLTRSDKARGKSDNVPSEEVVKKMKNYWRQLLNAKLITQRKFDNLTKAERGGLSELDKAGFIKRQLVETRQITKHVAQILDSRMNTKYDENDKLIREVKVITLKSKLVSDFRKDFQFYKVREINNYHHAHDAYLNAVVGTALIKKYPKLESEFVYGDYKVYDVRKMIAKSEQEIGKATAKYFFYSNIMNFFKTEITLANGEIRKRPLIETNGETGEIVWDKGRDFATVRKVLSMPQVNIVKKTEVQTGGFSKESILPKRNSDKLIARKKDWDPKKYGGFDSPTVAYSVLVVAKVEKGKSKKLKSVKELLGITIMERSSFEKNPIDFLEAKGYKEVKKDLIIKLPKYSLFELENGRKRMLASAGELQKGNELALPSKYVNFLYLASHYEKLKGSPEDNEQKQLFVEQHKHYLDEIIEQISEFSKRVILADANLDKVLSAYNKHRDKPIREQAENIIHLFTLTNLGAPAAFKYFDTTIDRKRYTSTKEVLDATLIHQSITGLYETRIDLSQLGGDGGGSSEAAAKPAPGGTLNIEDEYRLHETSKEPDVSLGSTWLSDFPQAWAETGGMGLAVRQAPLIIPLKATSTPVSIKQYPMSQEARLGIKPHIQRLLDQGILVPCQSPWNTPLLPVKKPGTNDYRPVQDLREVNKRVEDIHPTVPNPYNLLSGLPPSHQWYTVLDLKDAFFCLRLHPTSQPLFAFEWRDPEMGISGQLTWTRLPQGFKNSPTLFNEALHRDLADFRIQHPDLILLQYVDDLLLAATSELDCQQGTRALLQTLGNLGYRASAKKAQICQKQVKYLGYLLKEGQRWLTEARKETVMGQPTPKTPRQLREFLGKAGFCRLFIPGFAEMAAPLYPLTKPGTLFNWGPDQQKAYQEIKQALLTAPALGLPDLTKPFELFVDEKQGYAKGVLTQKLGPWRRPVAYLSKKLDPVAAGWPPCLRMVAAIAVLTKDAGKLTMGQPLVILAPHAVEALVKQPPDRWLSNARMTHYQALLLDTDRVQFGPVVALNPATLLPLPEEGLQHNCLDILAEAHGTRPDLTDQPLPDADHTWYTDGSSLLQEGQRKAGAAVTTETEVIWAKALPAGTSAQRAELIALTQALKMAEGKKLNVYTDSRYAFATAHIHGEIYRRRGWLTSEGKEIKNKDEILALLKALFLPKRLSIIHCPGHQKGHSAEARGNRMADQAARKAAITETPDTSTLLIENSSPSGGSKRTADGSEFEAGKRTADGSEFEKRTADGSEFESPKKKAKVE

SEQ ID NO: 2642-2643 - skipped (2 entries)

SEQ ID NO: 2644 - protein, 2135 aa, synthetic construct
MPAAKRVKLDGGDKKYSIGLDIGTNSVGWAVITDEYKVPSKKFKVLGNTDRHSIKKNLIGALLFDSGETAEATRLKRTARRRYTRRKNRICYLQEIFSNEMAKVDDSFFHRLEESFLVEEDKKHERHPIFGNIVDEVAYHEKYPTIYHLRKKLVDSTDKADLRLIYLALAHMIKFRGHFLIEGDLNPDNSDVDKLFIQLVQTYNQLFEENPINASGVDAKAILSARLSKSRRLENLIAQLPGEKKNGLFGNLIALSLGLTPNFKSNFDLAEDAKLQLSKDTYDDDLDNLLAQIGDQYADLFLAAKNLSDAILLSDILRVNTEITKAPLSASMIKRYDEHHQDLTLLKALVRQQLPEKYKEIFFDQSKNGYAGYIDGGASQEEFYKFIKPILEKMDGTEELLVKLNREDLLRKQRTFDNGSIPHQIHLGELHAILRRQEDFYPFLKDNREKIEKILTFRIPYYVGPLARGNSRFAWMTRKSEETITPWNFEEVVDKGASAQSFIERMTNFDKNLPNEKVLPKHSLLYEYFTVYNELTKVKYVTEGMRKPAFLSGEQKKAIVDLLFKTNRKVTVKQLKEDYFKKIECFDSVEISGVEDRFNASLGTYHDLLKIIKDKDFLDNEENEDILEDIVLTLTLFEDREMIEERLKTYAHLFDDKVMKQLKRRRYTGWGRLSRKLINGIRDKQSGKTILDFLKSDGFANRNFMQLIHDDSLTFKEDIQKAQVSGQGDSLHEHIANLAGSPAIKKGILQTVKVVDELVKVMGRHKPENIVIEMARENQTTQKGQKNSRERMKRIEEGIKELGSQILKEHPVENTQLQNEKLYLYYLQNGRDMYVDQELDINRLSDYDVDHIVPQSFLKDDSIDNKVLTRSDKARGKSDNVPSEEVVKKMKNYWRQLLNAKLITQRKFDNLTKAERGGLSELDKAGFIKRQLVETRQITKHVAQILDSRMNTKYDENDKLIREVKVITLKSKLVSDFRKDFQFYKVREINNYHHAHDAYLNAVVGTALIKKYPKLESEFVYGDYKVYDVRKMIAKSEQEIGKATAKYFFYSNIMNFFKTEITLANGEIRKRPLIETNGETGEIVWDKGRDFATVRKVLSMPQVNIVKKTEVQTGGFSKESILPKRNSDKLIARKKDWDPKKYGGFDSPTVAYSVLVVAKVEKGKSKKLKSVKELLGITIMERSSFEKNPIDFLEAKGYKEVKKDLIIKLPKYSLFELENGRKRMLASAGELQKGNELALPSKYVNFLYLASHYEKLKGSPEDNEQKQLFVEQHKHYLDEIIEQISEFSKRVILADANLDKVLSAYNKHRDKPIREQAENIIHLFTLTNLGAPAAFKYFDTTIDRKRYTSTKEVLDATLIHQSITGLYETRIDLSQLGGDGGGGGGSGGGGSGGGGSGGGGSGGGGSGGGGSGGTLNIEDEYRLHETSKEPDVSLGSTWLSDFPQAWAETGGMGLAVRQAPLIIPLKATSTPVSIKQYPMSQEARLGIKPHIQRLLDQGILVPCQSPWNTPLLPVKKPGTNDYRPVQDLREVNKRVEDIHPTVPNPYNLLSGLPPSHQWYTVLDLKDAFFCLRLHPTSQPLFAFEWRDPEMGISGQLTWTRLPQGFKNSPTLFNEALHRDLADFRIQHPDLILLQYVDDLLLAATSELDCQQGTRALLQTLGNLGYRASAKKAQICQKQVKYLGYLLKEGQRWLTEARKETVMGQPTPKTPRQLREFLGKAGFCRLFIPGFAEMAAPLYPLTKPGTLFNWGPDQQKAYQEIKQALLTAPALGLPDLTKPFELFVDEKQGYAKGVLTQKLGPWRRPVAYLSKKLDPVAAGWPPCLRMVAAIAVLTKDAGKLTMGQPLVILAPHAVEALVKQPPDRWLSNARMTHYQALLLDTDRVQFGPVVALNPATLLPLPEEGLQHNCLDILAEAHGTRPDLTDQPLPDADHTWYTDGSSLLQEGQRKAGAAVTTETEVIWAKALPAGTSAQRAELIALTQALKMAEGKKLNVYTDSRYAFATAHIHGEIYRRRGWLTSEGKEIKNKDEILALLKALFLPKRLSIIHCPGHQKGHSAEARGNRMADQAARKAAITETPDTSTLLIENSSPSGGSKRTADGSEFEAGKRTADGSEFEKRTADGSEFESPKKKAKVE

SEQ ID NO: 2645-2646 - skipped (2 entries)

SEQ ID NO: 2647 - protein, 2115 aa, synthetic construct
MPAAKRVKLDGGDKKYSIGLDIGTNSVGWAVITDEYKVPSKKFKVLGNTDRHSIKKNLIGALLFDSGETAEATRLKRTARRRYTRRKNRICYLQEIFSNEMAKVDDSFFHRLEESFLVEEDKKHERHPIFGNIVDEVAYHEKYPTIYHLRKKLVDSTDKADLRLIYLALAHMIKFRGHFLIEGDLNPDNSDVDKLFIQLVQTYNQLFEENPINASGVDAKAILSARLSKSRRLENLIAQLPGEKKNGLFGNLIALSLGLTPNFKSNFDLAEDAKLQLSKDTYDDDLDNLLAQIGDQYADLFLAAKNLSDAILLSDILRVNTEITKAPLSASMIKRYDEHHQDLTLLKALVRQQLPEKYKEIFFDQSKNGYAGYIDGGASQEEFYKFIKPILEKMDGTEELLVKLNREDLLRKQRTFDNGSIPHQIHLGELHAILRRQEDFYPFLKDNREKIEKILTFRIPYYVGPLARGNSRFAWMTRKSEETITPWNFEEVVDKGASAQSFIERMTNFDKNLPNEKVLPKHSLLYEYFTVYNELTKVKYVTEGMRKPAFLSGEQKKAIVDLLFKTNRKVTVKQLKEDYFKKIECFDSVEISGVEDRFNASLGTYHDLLKIIKDKDFLDNEENEDILEDIVLTLTLFEDREMIEERLKTYAHLFDDKVMKQLKRRRYTGWGRLSRKLINGIRDKQSGKTILDFLKSDGFANRNFMQLIHDDSLTFKEDIQKAQVSGQGDSLHEHIANLAGSPAIKKGILQTVKVVDELVKVMGRHKPENIVIEMARENQTTQKGQKNSRERMKRIEEGIKELGSQILKEHPVENTQLQNEKLYLYYLQNGRDMYVDQELDINRLSDYDVDHIVPQSFLKDDSIDNKVLTRSDKARGKSDNVPSEEVVKKMKNYWRQLLNAKLITQRKFDNLTKAERGGLSELDKAGFIKRQLVETRQITKHVAQILDSRMNTKYDENDKLIREVKVITLKSKLVSDFRKDFQFYKVREINNYHHAHDAYLNAVVGTALIKKYPKLESEFVYGDYKVYDVRKMIAKSEQEIGKATAKYFFYSNIMNFFKTEITLANGEIRKRPLIETNGETGEIVWDKGRDFATVRKVLSMPQVNIVKKTEVQTGGFSKESILPKRNSDKLIARKKDWDPKKYGGFDSPTVAYSVLVVAKVEKGKSKKLKSVKELLGITIMERSSFEKNPIDFLEAKGYKEVKKDLIIKLPKYSLFELENGRKRMLASAGELQKGNELALPSKYVNFLYLASHYEKLKGSPEDNEQKQLFVEQHKHYLDEIIEQISEFSKRVILADANLDKVLSAYNKHRDKPIREQAENIIHLFTLTNLGAPAAFKYFDTTIDRKRYTSTKEVLDATLIHQSITGLYETRIDLSQLGGDGGEAAAKEAAAKGGTLNIEDEYRLHETSKEPDVSLGSTWLSDFPQAWAETGGMGLAVRQAPLIIPLKATSTPVSIKQYPMSQEARLGIKPHIQRLLDQGILVPCQSPWNTPLLPVKKPGTNDYRPVQDLREVNKRVEDIHPTVPNPYNLLSGLPPSHQWYTVLDLKDAFFCLRLHPTSQPLFAFEWRDPEMGISGQLTWTRLPQGFKNSPTLFNEALHRDLADFRIQHPDLILLQYVDDLLLAATSELDCQQGTRALLQTLGNLGYRASAKKAQICQKQVKYLGYLLKEGQRWLTEARKETVMGQPTPKTPRQLREFLGKAGFCRLFIPGFAEMAAPLYPLTKPGTLFNWGPDQQKAYQEIKQALLTAPALGLPDLTKPFELFVDEKQGYAKGVLTQKLGPWRRPVAYLSKKLDPVAAGWPPCLRMVAAIAVLTKDAGKLTMGQPLVILAPHAVEALVKQPPDRWLSNARMTHYQALLLDTDRVQFGPVVALNPATLLPLPEEGLQHNCLDILAEAHGTRPDLTDQPLPDADHTWYTDGSSLLQEGQRKAGAAVTTETEVIWAKALPAGTSAQRAELIALTQALKMAEGKKLNVYTDSRYAFATAHIHGEIYRRRGWLTSEGKEIKNKDEILALLKALFLPKRLSIIHCPGHQKGHSAEARGNRMADQAARKAAITETPDTSTLLIENSSPSGGSKRTADGSEFEAGKRTADGSEFEKRTADGSEFESPKKKAKVE

SEQ ID NO: 2648 - protein, 2116 aa, synthetic construct
MPAAKRVKLDGGDKKYSIGLDIGTNSVGWAVITDEYKVPSKKFKVLGNTDRHSIKKNLIGALLFDSGETAEATRLKRTARRRYTRRKNRICYLQEIFSNEMAKVDDSFFHRLEESFLVEEDKKHERHPIFGNIVDEVAYHEKYPTIYHLRKKLVDSTDKADLRLIYLALAHMIKFRGHFLIEGDLNPDNSDVDKLFIQLVQTYNQLFEENPINASGVDAKAILSARLSKSRRLENLIAQLPGEKKNGLFGNLIALSLGLTPNFKSNFDLAEDAKLQLSKDTYDDDLDNLLAQIGDQYADLFLAAKNLSDAILLSDILRVNTEITKAPLSASMIKRYDEHHQDLTLLKALVRQQLPEKYKEIFFDQSKNGYAGYIDGGASQEEFYKFIKPILEKMDGTEELLVKLNREDLLRKQRTFDNGSIPHQIHLGELHAILRRQEDFYPFLKDNREKIEKILTFRIPYYVGPLARGNSRFAWMTRKSEETITPWNFEEVVDKGASAQSFIERMTNFDKNLPNEKVLPKHSLLYEYFTVYNELTKVKYVTEGMRKPAFLSGEQKKAIVDLLFKTNRKVTVKQLKEDYFKKIECFDSVEISGVEDRFNASLGTYHDLLKIIKDKDFLDNEENEDILEDIVLTLTLFEDREMIEERLKTYAHLFDDKVMKQLKRRRYTGWGRLSRKLINGIRDKQSGKTILDFLKSDGFANRNFMQLIHDDSLTFKEDIQKAQVSGQGDSLHEHIANLAGSPAIKKGILQTVKVVDELVKVMGRHKPENIVIEMARENQTTQKGQKNSRERMKRIEEGIKELGSQILKEHPVENTQLQNEKLYLYYLQNGRDMYVDQELDINRLSDYDVDHIVPQSFLKDDSIDNKVLTRSDKARGKSDNVPSEEVVKKMKNYWRQLLNAKLITQRKFDNLTKAERGGLSELDKAGFIKRQLVETRQITKHVAQILDSRMNTKYDENDKLIREVKVITLKSKLVSDFRKDFQFYKVREINNYHHAHDAYLNAVVGTALIKKYPKLESEFVYGDYKVYDVRKMIAKSEQEIGKATAKYFFYSNIMNFFKTEITLANGEIRKRPLIETNGETGEIVWDKGRDFATVRKVLSMPQVNIVKKTEVQTGGFSKESILPKRNSDKLIARKKDWDPKKYGGFDSPTVAYSVLVVAKVEKGKSKKLKSVKELLGITIMERSSFEKNPIDFLEAKGYKEVKKDLIIKLPKYSLFELENGRKRMLASAGELQKGNELALPSKYVNFLYLASHYEKLKGSPEDNEQKQLFVEQHKHYLDEIIEQISEFSKRVILADANLDKVLSAYNKHRDKPIREQAENIIHLFTLTNLGAPAAFKYFDTTIDRKRYTSTKEVLDATLIHQSITGLYETRIDLSQLGGDGGGSSPAPEAAAKGGTLNIEDEYRLHETSKEPDVSLGSTWLSDFPQAWAETGGMGLAVRQAPLIIPLKATSTPVSIKQYPMSQEARLGIKPHIQRLLDQGILVPCQSPWNTPLLPVKKPGTNDYRPVQDLREVNKRVEDIHPTVPNPYNLLSGLPPSHQWYTVLDLKDAFFCLRLHPTSQPLFAFEWRDPEMGISGQLTWTRLPQGFKNSPTLFNEALHRDLADFRIQHPDLILLQYVDDLLLAATSELDCQQGTRALLQTLGNLGYRASAKKAQICQKQVKYLGYLLKEGQRWLTEARKETVMGQPTPKTPRQLREFLGKAGFCRLFIPGFAEMAAPLYPLTKPGTLFNWGPDQQKAYQEIKQALLTAPALGLPDLTKPFELFVDEKQGYAKGVLTQKLGPWRRPVAYLSKKLDPVAAGWPPCLRMVAAIAVLTKDAGKLTMGQPLVILAPHAVEALVKQPPDRWLSNARMTHYQALLLDTDRVQFGPVVALNPATLLPLPEEGLQHNCLDILAEAHGTRPDLTDQPLPDADHTWYTDGSSLLQEGQRKAGAAVTTETEVIWAKALPAGTSAQRAELIALTQALKMAEGKKLNVYTDSRYAFATAHIHGEIYRRRGWLTSEGKEIKNKDEILALLKALFLPKRLSIIHCPGHQKGHSAEARGNRMADQAARKAAITETPDTSTLLIENSSPSGGSKRTADGSEFEAGKRTADGSEFEKRTADGSEFESPKKKAKVE

SEQ ID NO: 2649 - protein, 2114 aa, synthetic construct
MPAAKRVKLDGGDKKYSIGLDIGTNSVGWAVITDEYKVPSKKFKVLGNTDRHSIKKNLIGALLFDSGETAEATRLKRTARRRYTRRKNRICYLQEIFSNEMAKVDDSFFHRLEESFLVEEDKKHERHPIFGNIVDEVAYHEKYPTIYHLRKKLVDSTDKADLRLIYLALAHMIKFRGHFLIEGDLNPDNSDVDKLFIQLVQTYNQLFEENPINASGVDAKAILSARLSKSRRLENLIAQLPGEKKNGLFGNLIALSLGLTPNFKSNFDLAEDAKLQLSKDTYDDDLDNLLAQIGDQYADLFLAAKNLSDAILLSDILRVNTEITKAPLSASMIKRYDEHHQDLTLLKALVRQQLPEKYKEIFFDQSKNGYAGYIDGGASQEEFYKFIKPILEKMDGTEELLVKLNREDLLRKQRTFDNGSIPHQIHLGELHAILRRQEDFYPFLKDNREKIEKILTFRIPYYVGPLARGNSRFAWMTRKSEETITPWNFEEVVDKGASAQSFIERMTNFDKNLPNEKVLPKHSLLYEYFTVYNELTKVKYVTEGMRKPAFLSGEQKKAIVDLLFKTNRKVTVKQLKEDYFKKIECFDSVEISGVEDRFNASLGTYHDLLKIIKDKDFLDNEENEDILEDIVLTLTLFEDREMIEERLKTYAHLFDDKVMKQLKRRRYTGWGRLSRKLINGIRDKQSGKTILDFLKSDGFANRNFMQLIHDDSLTFKEDIQKAQVSGQGDSLHEHIANLAGSPAIKKGILQTVKVVDELVKVMGRHKPENIVIEMARENQTTQKGQKNSRERMKRIEEGIKELGSQILKEHPVENTQLQNEKLYLYYLQNGRDMYVDQELDINRLSDYDVDHIVPQSFLKDDSIDNKVLTRSDKARGKSDNVPSEEVVKKMKNYWRQLLNAKLITQRKFDNLTKAERGGLSELDKAGFIKRQLVETRQITKHVAQILDSRMNTKYDENDKLIREVKVITLKSKLVSDFRKDFQFYKVREINNYHHAHDAYLNAVVGTALIKKYPKLESEFVYGDYKVYDVRKMIAKSEQEIGKATAKYFFYSNIMNFFKTEITLANGEIRKRPLIETNGETGEIVWDKGRDFATVRKVLSMPQVNIVKKTEVQTGGFSKESILPKRNSDKLIARKKDWDPKKYGGFDSPTVAYSVLVVAKVEKGKSKKLKSVKELLGITIMERSSFEKNPIDFLEAKGYKEVKKDLIIKLPKYSLFELENGRKRMLASAGELQKGNELALPSKYVNFLYLASHYEKLKGSPEDNEQKQLFVEQHKHYLDEIIEQISEFSKRVILADANLDKVLSAYNKHRDKPIREQAENIIHLFTLTNLGAPAAFKYFDTTIDRKRYTSTKEVLDATLIHQSITGLYETRIDLSQLGGDGGPAPGGSGGGGGTLNIEDEYRLHETSKEPDVSLGSTWLSDFPQAWAETGGMGLAVRQAPLIIPLKATSTPVSIKQYPMSQEARLGIKPHIQRLLDQGILVPCQSPWNTPLLPVKKPGTNDYRPVQDLREVNKRVEDIHPTVPNPYNLLSGLPPSHQWYTVLDLKDAFFCLRLHPTSQPLFAFEWRDPEMGISGQLTWTRLPQGFKNSPTLFNEALHRDLADFRIQHPDLILLQYVDDLLLAATSELDCQQGTRALLQTLGNLGYRASAKKAQICQKQVKYLGYLLKEGQRWLTEARKETVMGQPTPKTPRQLREFLGKAGFCRLFIPGFAEMAAPLYPLTKPGTLFNWGPDQQKAYQEIKQALLTAPALGLPDLTKPFELFVDEKQGYAKGVLTQKLGPWRRPVAYLSKKLDPVAAGWPPCLRMVAAIAVLTKDAGKLTMGQPLVILAPHAVEALVKQPPDRWLSNARMTHYQALLLDTDRVQFGPVVALNPATLLPLPEEGLQHNCLDILAEAHGTRPDLTDQPLPDADHTWYTDGSSLLQEGQRKAGAAVTTETEVIWAKALPAGTSAQRAELIALTQALKMAEGKKLNVYTDSRYAFATAHIHGEIYRRRGWLTSEGKEIKNKDEILALLKALFLPKRLSIIHCPGHQKGHSAEARGNRMADQAARKAAITETPDTSTLLIENSSPSGGSKRTADGSEFEAGKRTADGSEFEKRTADGSEFESPKKKAKVE

SEQ ID NO: 2650 - skipped

SEQ ID NO: 2651 - protein, 2116 aa, synthetic construct
MPAAKRVKLDGGDKKYSIGLDIGTNSVGWAVITDEYKVPSKKFKVLGNTDRHSIKKNLIGALLFDSGETAEATRLKRTARRRYTRRKNRICYLQEIFSNEMAKVDDSFFHRLEESFLVEEDKKHERHPIFGNIVDEVAYHEKYPTIYHLRKKLVDSTDKADLRLIYLALAHMIKFRGHFLIEGDLNPDNSDVDKLFIQLVQTYNQLFEENPINASGVDAKAILSARLSKSRRLENLIAQLPGEKKNGLFGNLIALSLGLTPNFKSNFDLAEDAKLQLSKDTYDDDLDNLLAQIGDQYADLFLAAKNLSDAILLSDILRVNTEITKAPLSASMIKRYDEHHQDLTLLKALVRQQLPEKYKEIFFDQSKNGYAGYIDGGASQEEFYKFIKPILEKMDGTEELLVKLNREDLLRKQRTFDNGSIPHQIHLGELHAILRRQEDFYPFLKDNREKIEKILTFRIPYYVGPLARGNSRFAWMTRKSEETITPWNFEEVVDKGASAQSFIERMTNFDKNLPNEKVLPKHSLLYEYFTVYNELTKVKYVTEGMRKPAFLSGEQKKAIVDLLFKTNRKVTVKQLKEDYFKKIECFDSVEISGVEDRFNASLGTYHDLLKIIKDKDFLDNEENEDILEDIVLTLTLFEDREMIEERLKTYAHLFDDKVMKQLKRRRYTGWGRLSRKLINGIRDKQSGKTILDFLKSDGFANRNFMQLIHDDSLTFKEDIQKAQVSGQGDSLHEHIANLAGSPAIKKGILQTVKVVDELVKVMGRHKPENIVIEMARENQTTQKGQKNSRERMKRIEEGIKELGSQILKEHPVENTQLQNEKLYLYYLQNGRDMYVDQELDINRLSDYDVDHIVPQSFLKDDSIDNKVLTRSDKARGKSDNVPSEEVVKKMKNYWRQLLNAKLITQRKFDNLTKAERGGLSELDKAGFIKRQLVETRQITKHVAQILDSRMNTKYDENDKLIREVKVITLKSKLVSDFRKDFQFYKVREINNYHHAHDAYLNAVVGTALIKKYPKLESEFVYGDYKVYDVRKMIAKSEQEIGKATAKYFFYSNIMNFFKTEITLANGEIRKRPLIETNGETGEIVWDKGRDFATVRKVLSMPQVNIVKKTEVQTGGFSKESILPKRNSDKLIARKKDWDPKKYGGFDSPTVAYSVLVVAKVEKGKSKKLKSVKELLGITIMERSSFEKNPIDFLEAKGYKEVKKDLIIKLPKYSLFELENGRKRMLASAGELQKGNELALPSKYVNFLYLASHYEKLKGSPEDNEQKQLFVEQHKHYLDEIIEQISEFSKRVILADANLDKVLSAYNKHRDKPIREQAENIIHLFTLTNLGAPAAFKYFDTTIDRKRYTSTKEVLDATLIHQSITGLYETRIDLSQLGGDGGPAPGSSEAAAKGGTLNIEDEYRLHETSKEPDVSLGSTWLSDFPQAWAETGGMGLAVRQAPLIIPLKATSTPVSIKQYPMSQEARLGIKPHIQRLLDQGILVPCQSPWNTPLLPVKKPGTNDYRPVQDLREVNKRVEDIHPTVPNPYNLLSGLPPSHQWYTVLDLKDAFFCLRLHPTSQPLFAFEWRDPEMGISGQLTWTRLPQGFKNSPTLFNEALHRDLADFRIQHPDLILLQYVDDLLLAATSELDCQQGTRALLQTLGNLGYRASAKKAQICQKQVKYLGYLLKEGQRWLTEARKETVMGQPTPKTPRQLREFLGKAGFCRLFIPGFAEMAAPLYPLTKPGTLFNWGPDQQKAYQEIKQALLTAPALGLPDLTKPFELFVDEKQGYAKGVLTQKLGPWRRPVAYLSKKLDPVAAGWPPCLRMVAAIAVLTKDAGKLTMGQPLVILAPHAVEALVKQPPDRWLSNARMTHYQALLLDTDRVQFGPVVALNPATLLPLPEEGLQHNCLDILAEAHGTRPDLTDQPLPDADHTWYTDGSSLLQEGQRKAGAAVTTETEVIWAKALPAGTSAQRAELIALTQALKMAEGKKLNVYTDSRYAFATAHIHGEIYRRRGWLTSEGKEIKNKDEILALLKALFLPKRLSIIHCPGHQKGHSAEARGNRMADQAARKAAITETPDTSTLLIENSSPSGGSKRTADGSEFEAGKRTADGSEFEKRTADGSEFESPKKKAKVE

SEQ ID NO: 2652 - skipped

SEQ ID NO: 2653 - protein, 2111 aa, synthetic construct
MPAAKRVKLDGGDKKYSIGLDIGTNSVGWAVITDEYKVPSKKFKVLGNTDRHSIKKNLIGALLFDSGETAEATRLKRTARRRYTRRKNRICYLQEIFSNEMAKVDDSFFHRLEESFLVEEDKKHERHPIFGNIVDEVAYHEKYPTIYHLRKKLVDSTDKADLRLIYLALAHMIKFRGHFLIEGDLNPDNSDVDKLFIQLVQTYNQLFEENPINASGVDAKAILSARLSKSRRLENLIAQLPGEKKNGLFGNLIALSLGLTPNFKSNFDLAEDAKLQLSKDTYDDDLDNLLAQIGDQYADLFLAAKNLSDAILLSDILRVNTEITKAPLSASMIKRYDEHHQDLTLLKALVRQQLPEKYKEIFFDQSKNGYAGYIDGGASQEEFYKFIKPILEKMDGTEELLVKLNREDLLRKQRTFDNGSIPHQIHLGELHAILRRQEDFYPFLKDNREKIEKILTFRIPYYVGPLARGNSRFAWMTRKSEETITPWNFEEVVDKGASAQSFIERMTNFDKNLPNEKVLPKHSLLYEYFTVYNELTKVKYVTEGMRKPAFLSGEQKKAIVDLLFKTNRKVTVKQLKEDYFKKIECFDSVEISGVEDRFNASLGTYHDLLKIIKDKDFLDNEENEDILEDIVLTLTLFEDREMIEERLKTYAHLFDDKVMKQLKRRRYTGWGRLSRKLINGIRDKQSGKTILDFLKSDGFANRNFMQLIHDDSLTFKEDIQKAQVSGQGDSLHEHIANLAGSPAIKKGILQTVKVVDELVKVMGRHKPENIVIEMARENQTTQKGQKNSRERMKRIEEGIKELGSQILKEHPVENTQLQNEKLYLYYLQNGRDMYVDQELDINRLSDYDVDHIVPQSFLKDDSIDNKVLTRSDKARGKSDNVPSEEVVKKMKNYWRQLLNAKLITQRKFDNLTKAERGGLSELDKAGFIKRQLVETRQITKHVAQILDSRMNTKYDENDKLIREVKVITLKSKLVSDFRKDFQFYKVREINNYHHAHDAYLNAVVGTALIKKYPKLESEFVYGDYKVYDVRKMIAKSEQEIGKATAKYFFYSNIMNFFKTEITLANGEIRKRPLIETNGETGEIVWDKGRDFATVRKVLSMPQVNIVKKTEVQTGGFSKESILPKRNSDKLIARKKDWDPKKYGGFDSPTVAYSVLVVAKVEKGKSKKLKSVKELLGITIMERSSFEKNPIDFLEAKGYKEVKKDLIIKLPKYSLFELENGRKRMLASAGELQKGNELALPSKYVNFLYLASHYEKLKGSPEDNEQKQLFVEQHKHYLDEIIEQISEFSKRVILADANLDKVLSAYNKHRDKPIREQAENIIHLFTLTNLGAPAAFKYFDTTIDRKRYTSTKEVLDATLIHQSITGLYETRIDLSQLGGDGGGGSGGGGGTLNIEDEYRLHETSKEPDVSLGSTWLSDFPQAWAETGGMGLAVRQAPLIIPLKATSTPVSIKQYPMSQEARLGIKPHIQRLLDQGILVPCQSPWNTPLLPVKKPGTNDYRPVQDLREVNKRVEDIHPTVPNPYNLLSGLPPSHQWYTVLDLKDAFFCLRLHPTSQPLFAFEWRDPEMGISGQLTWTRLPQGFKNSPTLFNEALHRDLADFRIQHPDLILLQYVDDLLLAATSELDCQQGTRALLQTLGNLGYRASAKKAQICQKQVKYLGYLLKEGQRWLTEARKETVMGQPTPKTPRQLREFLGKAGFCRLFIPGFAEMAAPLYPLTKPGTLFNWGPDQQKAYQEIKQALLTAPALGLPDLTKPFELFVDEKQGYAKGVLTQKLGPWRRPVAYLSKKLDPVAAGWPPCLRMVAAIAVLTKDAGKLTMGQPLVILAPHAVEALVKQPPDRWLSNARMTHYQALLLDTDRVQFGPVVALNPATLLPLPEEGLQHNCLDILAEAHGTRPDLTDQPLPDADHTWYTDGSSLLQEGQRKAGAAVTTETEVIWAKALPAGTSAQRAELIALTQALKMAEGKKLNVYTDSRYAFATAHIHGEIYRRRGWLTSEGKEIKNKDEILALLKALFLPKRLSIIHCPGHQKGHSAEARGNRMADQAARKAAITETPDTSTLLIENSSPSGGSKRTADGSEFEAGKRTADGSEFEKRTADGSEFESPKKKAKVE

SEQ ID NO: 2654 - protein, 2116 aa, synthetic construct
MPAAKRVKLDGGDKKYSIGLDIGTNSVGWAVITDEYKVPSKKFKVLGNTDRHSIKKNLIGALLFDSGETAEATRLKRTARRRYTRRKNRICYLQEIFSNEMAKVDDSFFHRLEESFLVEEDKKHERHPIFGNIVDEVAYHEKYPTIYHLRKKLVDSTDKADLRLIYLALAHMIKFRGHFLIEGDLNPDNSDVDKLFIQLVQTYNQLFEENPINASGVDAKAILSARLSKSRRLENLIAQLPGEKKNGLFGNLIALSLGLTPNFKSNFDLAEDAKLQLSKDTYDDDLDNLLAQIGDQYADLFLAAKNLSDAILLSDILRVNTEITKAPLSASMIKRYDEHHQDLTLLKALVRQQLPEKYKEIFFDQSKNGYAGYIDGGASQEEFYKFIKPILEKMDGTEELLVKLNREDLLRKQRTFDNGSIPHQIHLGELHAILRRQEDFYPFLKDNREKIEKILTFRIPYYVGPLARGNSRFAWMTRKSEETITPWNFEEVVDKGASAQSFIERMTNFDKNLPNEKVLPKHSLLYEYFTVYNELTKVKYVTEGMRKPAFLSGEQKKAIVDLLFKTNRKVTVKQLKEDYFKKIECFDSVEISGVEDRFNASLGTYHDLLKIIKDKDFLDNEENEDILEDIVLTLTLFEDREMIEERLKTYAHLFDDKVMKQLKRRRYTGWGRLSRKLINGIRDKQSGKTILDFLKSDGFANRNFMQLIHDDSLTFKEDIQKAQVSGQGDSLHEHIANLAGSPAIKKGILQTVKVVDELVKVMGRHKPENIVIEMARENQTTQKGQKNSRERMKRIEEGIKELGSQILKEHPVENTQLQNEKLYLYYLQNGRDMYVDQELDINRLSDYDVDHIVPQSFLKDDSIDNKVLTRSDKARGKSDNVPSEEVVKKMKNYWRQLLNAKLITQRKFDNLTKAERGGLSELDKAGFIKRQLVETRQITKHVAQILDSRMNTKYDENDKLIREVKVITLKSKLVSDFRKDFQFYKVREINNYHHAHDAYLNAVVGTALIKKYPKLESEFVYGDYKVYDVRKMIAKSEQEIGKATAKYFFYSNIMNFFKTEITLANGEIRKRPLIETNGETGEIVWDKGRDFATVRKVLSMPQVNIVKKTEVQTGGFSKESILPKRNSDKLIARKKDWDPKKYGGFDSPTVAYSVLVVAKVEKGKSKKLKSVKELLGITIMERSSFEKNPIDFLEAKGYKEVKKDLIIKLPKYSLFELENGRKRMLASAGELQKGNELALPSKYVNFLYLASHYEKLKGSPEDNEQKQLFVEQHKHYLDEIIEQISEFSKRVILADANLDKVLSAYNKHRDKPIREQAENIIHLFTLTNLGAPAAFKYFDTTIDRKRYTSTKEVLDATLIHQSITGLYETRIDLSQLGGDGGEAAAKGGSPAPGGTLNIEDEYRLHETSKEPDVSLGSTWLSDFPQAWAETGGMGLAVRQAPLIIPLKATSTPVSIKQYPMSQEARLGIKPHIQRLLDQGILVPCQSPWNTPLLPVKKPGTNDYRPVQDLREVNKRVEDIHPTVPNPYNLLSGLPPSHQWYTVLDLKDAFFCLRLHPTSQPLFAFEWRDPEMGISGQLTWTRLPQGFKNSPTLFNEALHRDLADFRIQHPDLILLQYVDDLLLAATSELDCQQGTRALLQTLGNLGYRASAKKAQICQKQVKYLGYLLKEGQRWLTEARKETVMGQPTPKTPRQLREFLGKAGFCRLFIPGFAEMAAPLYPLTKPGTLFNWGPDQQKAYQEIKQALLTAPALGLPDLTKPFELFVDEKQGYAKGVLTQKLGPWRRPVAYLSKKLDPVAAGWPPCLRMVAAIAVLTKDAGKLTMGQPLVILAPHAVEALVKQPPDRWLSNARMTHYQALLLDTDRVQFGPVVALNPATLLPLPEEGLQHNCLDILAEAHGTRPDLTDQPLPDADHTWYTDGSSLLQEGQRKAGAAVTTETEVIWAKALPAGTSAQRAELIALTQALKMAEGKKLNVYTDSRYAFATAHIHGEIYRRRGWLTSEGKEIKNKDEILALLKALFLPKRLSIIHCPGHQKGHSAEARGNRMADQAARKAAITETPDTSTLLIENSSPSGGSKRTADGSEFEAGKRTADGSEFEKRTADGSEFESPKKKAKVE

SEQ ID NO: 2655 - protein, 2108 aa, synthetic construct
MPAAKRVKLDGGDKKYSIGLDIGTNSVGWAVITDEYKVPSKKFKVLGNTDRHSIKKNLIGALLFDSGETAEATRLKRTARRRYTRRKNRICYLQEIFSNEMAKVDDSFFHRLEESFLVEEDKKHERHPIFGNIVDEVAYHEKYPTIYHLRKKLVDSTDKADLRLIYLALAHMIKFRGHFLIEGDLNPDNSDVDKLFIQLVQTYNQLFEENPINASGVDAKAILSARLSKSRRLENLIAQLPGEKKNGLFGNLIALSLGLTPNFKSNFDLAEDAKLQLSKDTYDDDLDNLLAQIGDQYADLFLAAKNLSDAILLSDILRVNTEITKAPLSASMIKRYDEHHQDLTLLKALVRQQLPEKYKEIFFDQSKNGYAGYIDGGASQEEFYKFIKPILEKMDGTEELLVKLNREDLLRKQRTFDNGSIPHQIHLGELHAILRRQEDFYPFLKDNREKIEKILTFRIPYYVGPLARGNSRFAWMTRKSEETITPWNFEEVVDKGASAQSFIERMTNFDKNLPNEKVLPKHSLLYEYFTVYNELTKVKYVTEGMRKPAFLSGEQKKAIVDLLFKTNRKVTVKQLKEDYFKKIECFDSVEISGVEDRFNASLGTYHDLLKIIKDKDFLDNEENEDILEDIVLTLTLFEDREMIEERLKTYAHLFDDKVMKQLKRRRYTGWGRLSRKLINGIRDKQSGKTILDFLKSDGFANRNFMQLIHDDSLTFKEDIQKAQVSGQGDSLHEHIANLAGSPAIKKGILQTVKVVDELVKVMGRHKPENIVIEMARENQTTQKGQKNSRERMKRIEEGIKELGSQILKEHPVENTQLQNEKLYLYYLQNGRDMYVDQELDINRLSDYDVDHIVPQSFLKDDSIDNKVLTRSDKARGKSDNVPSEEVVKKMKNYWRQLLNAKLITQRKFDNLTKAERGGLSELDKAGFIKRQLVETRQITKHVAQILDSRMNTKYDENDKLIREVKVITLKSKLVSDFRKDFQFYKVREINNYHHAHDAYLNAVVGTALIKKYPKLESEFVYGDYKVYDVRKMIAKSEQEIGKATAKYFFYSNIMNFFKTEITLANGEIRKRPLIETNGETGEIVWDKGRDFATVRKVLSMPQVNIVKKTEVQTGGFSKESILPKRNSDKLIARKKDWDPKKYGGFDSPTVAYSVLVVAKVEKGKSKKLKSVKELLGITIMERSSFEKNPIDFLEAKGYKEVKKDLIIKLPKYSLFELENGRKRMLASAGELQKGNELALPSKYVNFLYLASHYEKLKGSPEDNEQKQLFVEQHKHYLDEIIEQISEFSKRVILADANLDKVLSAYNKHRDKPIREQAENIIHLFTLTNLGAPAAFKYFDTTIDRKRYTSTKEVLDATLIHQSITGLYETRIDLSQLGGDGGGSSGGTLNIEDEYRLHETSKEPDVSLGSTWLSDFPQAWAETGGMGLAVRQAPLIIPLKATSTPVSIKQYPMSQEARLGIKPHIQRLLDQGILVPCQSPWNTPLLPVKKPGTNDYRPVQDLREVNKRVEDIHPTVPNPYNLLSGLPPSHQWYTVLDLKDAFFCLRLHPTSQPLFAFEWRDPEMGISGQLTWTRLPQGFKNSPTLFNEALHRDLADFRIQHPDLILLQYVDDLLLAATSELDCQQGTRALLQTLGNLGYRASAKKAQICQKQVKYLGYLLKEGQRWLTEARKETVMGQPTPKTPRQLREFLGKAGFCRLFIPGFAEMAAPLYPLTKPGTLFNWGPDQQKAYQEIKQALLTAPALGLPDLTKPFELFVDEKQGYAKGVLTQKLGPWRRPVAYLSKKLDPVAAGWPPCLRMVAAIAVLTKDAGKLTMGQPLVILAPHAVEALVKQPPDRWLSNARMTHYQALLLDTDRVQFGPVVALNPATLLPLPEEGLQHNCLDILAEAHGTRPDLTDQPLPDADHTWYTDGSSLLQEGQRKAGAAVTTETEVIWAKALPAGTSAQRAELIALTQALKMAEGKKLNVYTDSRYAFATAHIHGEIYRRRGWLTSEGKEIKNKDEILALLKALFLPKRLSIIHCPGHQKGHSAEARGNRMADQAARKAAITETPDTSTLLIENSSPSGGSKRTADGSEFEAGKRTADGSEFEKRTADGSEFESPKKKAKVE

SEQ ID NO: 2656 - protein, 2114 aa, synthetic construct
MPAAKRVKLDGGDKKYSIGLDIGTNSVGWAVITDEYKVPSKKFKVLGNTDRHSIKKNLIGALLFDSGETAEATRLKRTARRRYTRRKNRICYLQEIFSNEMAKVDDSFFHRLEESFLVEEDKKHERHPIFGNIVDEVAYHEKYPTIYHLRKKLVDSTDKADLRLIYLALAHMIKFRGHFLIEGDLNPDNSDVDKLFIQLVQTYNQLFEENPINASGVDAKAILSARLSKSRRLENLIAQLPGEKKNGLFGNLIALSLGLTPNFKSNFDLAEDAKLQLSKDTYDDDLDNLLAQIGDQYADLFLAAKNLSDAILLSDILRVNTEITKAPLSASMIKRYDEHHQDLTLLKALVRQQLPEKYKEIFFDQSKNGYAGYIDGGASQEEFYKFIKPILEKMDGTEELLVKLNREDLLRKQRTFDNGSIPHQIHLGELHAILRRQEDFYPFLKDNREKIEKILTFRIPYYVGPLARGNSRFAWMTRKSEETITPWNFEEVVDKGASAQSFIERMTNFDKNLPNEKVLPKHSLLYEYFTVYNELTKVKYVTEGMRKPAFLSGEQKKAIVDLLFKTNRKVTVKQLKEDYFKKIECFDSVEISGVEDRFNASLGTYHDLLKIIKDKDFLDNEENEDILEDIVLTLTLFEDREMIEERLKTYAHLFDDKVMKQLKRRRYTGWGRLSRKLINGIRDKQSGKTILDFLKSDGFANRNFMQLIHDDSLTFKEDIQKAQVSGQGDSLHEHIANLAGSPAIKKGILQTVKVVDELVKVMGRHKPENIVIEMARENQTTQKGQKNSRERMKRIEEGIKELGSQILKEHPVENTQLQNEKLYLYYLQNGRDMYVDQELDINRLSDYDVDHIVPQSFLKDDSIDNKVLTRSDKARGKSDNVPSEEVVKKMKNYWRQLLNAKLITQRKFDNLTKAERGGLSELDKAGFIKRQLVETRQITKHVAQILDSRMNTKYDENDKLIREVKVITLKSKLVSDFRKDFQFYKVREINNYHHAHDAYLNAVVGTALIKKYPKLESEFVYGDYKVYDVRKMIAKSEQEIGKATAKYFFYSNIMNFFKTEITLANGEIRKRPLIETNGETGEIVWDKGRDFATVRKVLSMPQVNIVKKTEVQTGGFSKESILPKRNSDKLIARKKDWDPKKYGGFDSPTVAYSVLVVAKVEKGKSKKLKSVKELLGITIMERSSFEKNPIDFLEAKGYKEVKKDLIIKLPKYSLFELENGRKRMLASAGELQKGNELALPSKYVNFLYLASHYEKLKGSPEDNEQKQLFVEQHKHYLDEIIEQISEFSKRVILADANLDKVLSAYNKHRDKPIREQAENIIHLFTLTNLGAPAAFKYFDTTIDRKRYTSTKEVLDATLIHQSITGLYETRIDLSQLGGDGGPAPAPAPAPGGTLNIEDEYRLHETSKEPDVSLGSTWLSDFPQAWAETGGMGLAVRQAPLIIPLKATSTPVSIKQYPMSQEARLGIKPHIQRLLDQGILVPCQSPWNTPLLPVKKPGTNDYRPVQDLREVNKRVEDIHPTVPNPYNLLSGLPPSHQWYTVLDLKDAFFCLRLHPTSQPLFAFEWRDPEMGISGQLTWTRLPQGFKNSPTLFNEALHRDLADFRIQHPDLILLQYVDDLLLAATSELDCQQGTRALLQTLGNLGYRASAKKAQICQKQVKYLGYLLKEGQRWLTEARKETVMGQPTPKTPRQLREFLGKAGFCRLFIPGFAEMAAPLYPLTKPGTLFNWGPDQQKAYQEIKQALLTAPALGLPDLTKPFELFVDEKQGYAKGVLTQKLGPWRRPVAYLSKKLDPVAAGWPPCLRMVAAIAVLTKDAGKLTMGQPLVILAPHAVEALVKQPPDRWLSNARMTHYQALLLDTDRVQFGPVVALNPATLLPLPEEGLQHNCLDILAEAHGTRPDLTDQPLPDADHTWYTDGSSLLQEGQRKAGAAVTTETEVIWAKALPAGTSAQRAELIALTQALKMAEGKKLNVYTDSRYAFATAHIHGEIYRRRGWLTSEGKEIKNKDEILALLKALFLPKRLSIIHCPGHQKGHSAEARGNRMADQAARKAAITETPDTSTLLIENSSPSGGSKRTADGSEFEAGKRTADGSEFEKRTADGSEFESPKKKAKVE

SEQ ID NO: 2657 - protein, 2113 aa, synthetic construct
MPAAKRVKLDGGDKKYSIGLDIGTNSVGWAVITDEYKVPSKKFKVLGNTDRHSIKKNLIGALLFDSGETAEATRLKRTARRRYTRRKNRICYLQEIFSNEMAKVDDSFFHRLEESFLVEEDKKHERHPIFGNIVDEVAYHEKYPTIYHLRKKLVDSTDKADLRLIYLALAHMIKFRGHFLIEGDLNPDNSDVDKLFIQLVQTYNQLFEENPINASGVDAKAILSARLSKSRRLENLIAQLPGEKKNGLFGNLIALSLGLTPNFKSNFDLAEDAKLQLSKDTYDDDLDNLLAQIGDQYADLFLAAKNLSDAILLSDILRVNTEITKAPLSASMIKRYDEHHQDLTLLKALVRQQLPEKYKEIFFDQSKNGYAGYIDGGASQEEFYKFIKPILEKMDGTEELLVKLNREDLLRKQRTFDNGSIPHQIHLGELHAILRRQEDFYPFLKDNREKIEKILTFRIPYYVGPLARGNSRFAWMTRKSEETITPWNFEEVVDKGASAQSFIERMTNFDKNLPNEKVLPKHSLLYEYFTVYNELTKVKYVTEGMRKPAFLSGEQKKAIVDLLFKTNRKVTVKQLKEDYFKKIECFDSVEISGVEDRFNASLGTYHDLLKIIKDKDFLDNEENEDILEDIVLTLTLFEDREMIEERLKTYAHLFDDKVMKQLKRRRYTGWGRLSRKLINGIRDKQSGKTILDFLKSDGFANRNFMQLIHDDSLTFKEDIQKAQVSGQGDSLHEHIANLAGSPAIKKGILQTVKVVDELVKVMGRHKPENIVIEMARENQTTQKGQKNSRERMKRIEEGIKELGSQILKEHPVENTQLQNEKLYLYYLQNGRDMYVDQELDINRLSDYDVDHIVPQSFLKDDSIDNKVLTRSDKARGKSDNVPSEEVVKKMKNYWRQLLNAKLITQRKFDNLTKAERGGLSELDKAGFIKRQLVETRQITKHVAQILDSRMNTKYDENDKLIREVKVITLKSKLVSDFRKDFQFYKVREINNYHHAHDAYLNAVVGTALIKKYPKLESEFVYGDYKVYDVRKMIAKSEQEIGKATAKYFFYSNIMNFFKTEITLANGEIRKRPLIETNGETGEIVWDKGRDFATVRKVLSMPQVNIVKKTEVQTGGFSKESILPKRNSDKLIARKKDWDPKKYGGFDSPTVAYSVLVVAKVEKGKSKKLKSVKELLGITIMERSSFEKNPIDFLEAKGYKEVKKDLIIKLPKYSLFELENGRKRMLASAGELQKGNELALPSKYVNFLYLASHYEKLKGSPEDNEQKQLFVEQHKHYLDEIIEQISEFSKRVILADANLDKVLSAYNKHRDKPIREQAENIIHLFTLTNLGAPAAFKYFDTTIDRKRYTSTKEVLDATLIHQSITGLYETRIDLSQLGGDGGEAAAKGGSGGTLNIEDEYRLHETSKEPDVSLGSTWLSDFPQAWAETGGMGLAVRQAPLIIPLKATSTPVSIKQYPMSQEARLGIKPHIQRLLDQGILVPCQSPWNTPLLPVKKPGTNDYRPVQDLREVNKRVEDIHPTVPNPYNLLSGLPPSHQWYTVLDLKDAFFCLRLHPTSQPLFAFEWRDPEMGISGQLTWTRLPQGFKNSPTLFNEALHRDLADFRIQHPDLILLQYVDDLLLAATSELDCQQGTRALLQTLGNLGYRASAKKAQICQKQVKYLGYLLKEGQRWLTEARKETVMGQPTPKTPRQLREFLGKAGFCRLFIPGFAEMAAPLYPLTKPGTLFNWGPDQQKAYQEIKQALLTAPALGLPDLTKPFELFVDEKQGYAKGVLTQKLGPWRRPVAYLSKKLDPVAAGWPPCLRMVAAIAVLTKDAGKLTMGQPLVILAPHAVEALVKQPPDRWLSNARMTHYQALLLDTDRVQFGPVVALNPATLLPLPEEGLQHNCLDILAEAHGTRPDLTDQPLPDADHTWYTDGSSLLQEGQRKAGAAVTTETEVIWAKALPAGTSAQRAELIALTQALKMAEGKKLNVYTDSRYAFATAHIHGEIYRRRGWLTSEGKEIKNKDEILALLKALFLPKRLSIIHCPGHQKGHSAEARGNRMADQAARKAAITETPDTSTLLIENSSPSGGSKRTADGSEFEAGKRTADGSEFEKRTADGSEFESPKKKAKVE

SEQ ID NO: 2658-2659 - skipped (2 entries)

SEQ ID NO: 2660 - protein, 2116 aa, synthetic construct
MPAAKRVKLDGGDKKYSIGLDIGTNSVGWAVITDEYKVPSKKFKVLGNTDRHSIKKNLIGALLFDSGETAEATRLKRTARRRYTRRKNRICYLQEIFSNEMAKVDDSFFHRLEESFLVEEDKKHERHPIFGNIVDEVAYHEKYPTIYHLRKKLVDSTDKADLRLIYLALAHMIKFRGHFLIEGDLNPDNSDVDKLFIQLVQTYNQLFEENPINASGVDAKAILSARLSKSRRLENLIAQLPGEKKNGLFGNLIALSLGLTPNFKSNFDLAEDAKLQLSKDTYDDDLDNLLAQIGDQYADLFLAAKNLSDAILLSDILRVNTEITKAPLSASMIKRYDEHHQDLTLLKALVRQQLPEKYKEIFFDQSKNGYAGYIDGGASQEEFYKFIKPILEKMDGTEELLVKLNREDLLRKQRTFDNGSIPHQIHLGELHAILRRQEDFYPFLKDNREKIEKILTFRIPYYVGPLARGNSRFAWMTRKSEETITPWNFEEVVDKGASAQSFIERMTNFDKNLPNEKVLPKHSLLYEYFTVYNELTKVKYVTEGMRKPAFLSGEQKKAIVDLLFKTNRKVTVKQLKEDYFKKIECFDSVEISGVEDRFNASLGTYHDLLKIIKDKDFLDNEENEDILEDIVLTLTLFEDREMIEERLKTYAHLFDDKVMKQLKRRRYTGWGRLSRKLINGIRDKQSGKTILDFLKSDGFANRNFMQLIHDDSLTFKEDIQKAQVSGQGDSLHEHIANLAGSPAIKKGILQTVKVVDELVKVMGRHKPENIVIEMARENQTTQKGQKNSRERMKRIEEGIKELGSQILKEHPVENTQLQNEKLYLYYLQNGRDMYVDQELDINRLSDYDVDHIVPQSFLKDDSIDNKVLTRSDKARGKSDNVPSEEVVKKMKNYWRQLLNAKLITQRKFDNLTKAERGGLSELDKAGFIKRQLVETRQITKHVAQILDSRMNTKYDENDKLIREVKVITLKSKLVSDFRKDFQFYKVREINNYHHAHDAYLNAVVGTALIKKYPKLESEFVYGDYKVYDVRKMIAKSEQEIGKATAKYFFYSNIMNFFKTEITLANGEIRKRPLIETNGETGEIVWDKGRDFATVRKVLSMPQVNIVKKTEVQTGGFSKESILPKRNSDKLIARKKDWDPKKYGGFDSPTVAYSVLVVAKVEKGKSKKLKSVKELLGITIMERSSFEKNPIDFLEAKGYKEVKKDLIIKLPKYSLFELENGRKRMLASAGELQKGNELALPSKYVNFLYLASHYEKLKGSPEDNEQKQLFVEQHKHYLDEIIEQISEFSKRVILADANLDKVLSAYNKHRDKPIREQAENIIHLFTLTNLGAPAAFKYFDTTIDRKRYTSTKEVLDATLIHQSITGLYETRIDLSQLGGDGGGGSGSSEAAAKGGTLNIEDEYRLHETSKEPDVSLGSTWLSDFPQAWAETGGMGLAVRQAPLIIPLKATSTPVSIKQYPMSQEARLGIKPHIQRLLDQGILVPCQSPWNTPLLPVKKPGTNDYRPVQDLREVNKRVEDIHPTVPNPYNLLSGLPPSHQWYTVLDLKDAFFCLRLHPTSQPLFAFEWRDPEMGISGQLTWTRLPQGFKNSPTLFNEALHRDLADFRIQHPDLILLQYVDDLLLAATSELDCQQGTRALLQTLGNLGYRASAKKAQICQKQVKYLGYLLKEGQRWLTEARKETVMGQPTPKTPRQLREFLGKAGFCRLFIPGFAEMAAPLYPLTKPGTLFNWGPDQQKAYQEIKQALLTAPALGLPDLTKPFELFVDEKQGYAKGVLTQKLGPWRRPVAYLSKKLDPVAAGWPPCLRMVAAIAVLTKDAGKLTMGQPLVILAPHAVEALVKQPPDRWLSNARMTHYQALLLDTDRVQFGPVVALNPATLLPLPEEGLQHNCLDILAEAHGTRPDLTDQPLPDADHTWYTDGSSLLQEGQRKAGAAVTTETEVIWAKALPAGTSAQRAELIALTQALKMAEGKKLNVYTDSRYAFATAHIHGEIYRRRGWLTSEGKEIKNKDEILALLKALFLPKRLSIIHCPGHQKGHSAEARGNRMADQAARKAAITETPDTSTLLIENSSPSGGSKRTADGSEFEAGKRTADGSEFEKRTADGSEFESPKKKAKVE

SEQ ID NO: 2661-2662 - skipped (2 entries)

SEQ ID NO: 2663 - protein, 2121 aa, synthetic construct
MPAAKRVKLDGGDKKYSIGLDIGTNSVGWAVITDEYKVPSKKFKVLGNTDRHSIKKNLIGALLFDSGETAEATRLKRTARRRYTRRKNRICYLQEIFSNEMAKVDDSFFHRLEESFLVEEDKKHERHPIFGNIVDEVAYHEKYPTIYHLRKKLVDSTDKADLRLIYLALAHMIKFRGHFLIEGDLNPDNSDVDKLFIQLVQTYNQLFEENPINASGVDAKAILSARLSKSRRLENLIAQLPGEKKNGLFGNLIALSLGLTPNFKSNFDLAEDAKLQLSKDTYDDDLDNLLAQIGDQYADLFLAAKNLSDAILLSDILRVNTEITKAPLSASMIKRYDEHHQDLTLLKALVRQQLPEKYKEIFFDQSKNGYAGYIDGGASQEEFYKFIKPILEKMDGTEELLVKLNREDLLRKQRTFDNGSIPHQIHLGELHAILRRQEDFYPFLKDNREKIEKILTFRIPYYVGPLARGNSRFAWMTRKSEETITPWNFEEVVDKGASAQSFIERMTNFDKNLPNEKVLPKHSLLYEYFTVYNELTKVKYVTEGMRKPAFLSGEQKKAIVDLLFKTNRKVTVKQLKEDYFKKIECFDSVEISGVEDRFNASLGTYHDLLKIIKDKDFLDNEENEDILEDIVLTLTLFEDREMIEERLKTYAHLFDDKVMKQLKRRRYTGWGRLSRKLINGIRDKQSGKTILDFLKSDGFANRNFMQLIHDDSLTFKEDIQKAQVSGQGDSLHEHIANLAGSPAIKKGILQTVKVVDELVKVMGRHKPENIVIEMARENQTTQKGQKNSRERMKRIEEGIKELGSQILKEHPVENTQLQNEKLYLYYLQNGRDMYVDQELDINRLSDYDVDHIVPQSFLKDDSIDNKVLTRSDKARGKSDNVPSEEVVKKMKNYWRQLLNAKLITQRKFDNLTKAERGGLSELDKAGFIKRQLVETRQITKHVAQILDSRMNTKYDENDKLIREVKVITLKSKLVSDFRKDFQFYKVREINNYHHAHDAYLNAVVGTALIKKYPKLESEFVYGDYKVYDVRKMIAKSEQEIGKATAKYFFYSNIMNFFKTEITLANGEIRKRPLIETNGETGEIVWDKGRDFATVRKVLSMPQVNIVKKTEVQTGGFSKESILPKRNSDKLIARKKDWDPKKYGGFDSPTVAYSVLVVAKVEKGKSKKLKSVKELLGITIMERSSFEKNPIDFLEAKGYKEVKKDLIIKLPKYSLFELENGRKRMLASAGELQKGNELALPSKYVNFLYLASHYEKLKGSPEDNEQKQLFVEQHKHYLDEIIEQISEFSKRVILADANLDKVLSAYNKHRDKPIREQAENIIHLFTLTNLGAPAAFKYFDTTIDRKRYTSTKEVLDATLIHQSITGLYETRIDLSQLGGDGGSGSETPGTSESATPESGGTLNIEDEYRLHETSKEPDVSLGSTWLSDFPQAWAETGGMGLAVRQAPLIIPLKATSTPVSIKQYPMSQEARLGIKPHIQRLLDQGILVPCQSPWNTPLLPVKKPGTNDYRPVQDLREVNKRVEDIHPTVPNPYNLLSGLPPSHQWYTVLDLKDAFFCLRLHPTSQPLFAFEWRDPEMGISGQLTWTRLPQGFKNSPTLFNEALHRDLADFRIQHPDLILLQYVDDLLLAATSELDCQQGTRALLQTLGNLGYRASAKKAQICQKQVKYLGYLLKEGQRWLTEARKETVMGQPTPKTPRQLREFLGKAGFCRLFIPGFAEMAAPLYPLTKPGTLFNWGPDQQKAYQEIKQALLTAPALGLPDLTKPFELFVDEKQGYAKGVLTQKLGPWRRPVAYLSKKLDPVAAGWPPCLRMVAAIAVLTKDAGKLTMGQPLVILAPHAVEALVKQPPDRWLSNARMTHYQALLLDTDRVQFGPVVALNPATLLPLPEEGLQHNCLDILAEAHGTRPDLTDQPLPDADHTWYTDGSSLLQEGQRKAGAAVTTETEVIWAKALPAGTSAQRAELIALTQALKMAEGKKLNVYTDSRYAFATAHIHGEIYRRRGWLTSEGKEIKNKDEILALLKALFLPKRLSIIHCPGHQKGHSAEARGNRMADQAARKAAITETPDTSTLLIENSSPSGGSKRTADGSEFEAGKRTADGSEFEKRTADGSEFESPKKKAKVE

SEQ ID NO: 2664 - skipped

SEQ ID NO: 2665 - protein, 2117 aa, synthetic construct
MPAAKRVKLDGGDKKYSIGLDIGTNSVGWAVITDEYKVPSKKFKVLGNTDRHSIKKNLIGALLFDSGETAEATRLKRTARRRYTRRKNRICYLQEIFSNEMAKVDDSFFHRLEESFLVEEDKKHERHPIFGNIVDEVAYHEKYPTIYHLRKKLVDSTDKADLRLIYLALAHMIKFRGHFLIEGDLNPDNSDVDKLFIQLVQTYNQLFEENPINASGVDAKAILSARLSKSRRLENLIAQLPGEKKNGLFGNLIALSLGLTPNFKSNFDLAEDAKLQLSKDTYDDDLDNLLAQIGDQYADLFLAAKNLSDAILLSDILRVNTEITKAPLSASMIKRYDEHHQDLTLLKALVRQQLPEKYKEIFFDQSKNGYAGYIDGGASQEEFYKFIKPILEKMDGTEELLVKLNREDLLRKQRTFDNGSIPHQIHLGELHAILRRQEDFYPFLKDNREKIEKILTFRIPYYVGPLARGNSRFAWMTRKSEETITPWNFEEVVDKGASAQSFIERMTNFDKNLPNEKVLPKHSLLYEYFTVYNELTKVKYVTEGMRKPAFLSGEQKKAIVDLLFKTNRKVTVKQLKEDYFKKIECFDSVEISGVEDRFNASLGTYHDLLKIIKDKDFLDNEENEDILEDIVLTLTLFEDREMIEERLKTYAHLFDDKVMKQLKRRRYTGWGRLSRKLINGIRDKQSGKTILDFLKSDGFANRNFMQLIHDDSLTFKEDIQKAQVSGQGDSLHEHIANLAGSPAIKKGILQTVKVVDELVKVMGRHKPENIVIEMARENQTTQKGQKNSRERMKRIEEGIKELGSQILKEHPVENTQLQNEKLYLYYLQNGRDMYVDQELDINRLSDYDVDHIVPQSFLKDDSIDNKVLTRSDKARGKSDNVPSEEVVKKMKNYWRQLLNAKLITQRKFDNLTKAERGGLSELDKAGFIKRQLVETRQITKHVAQILDSRMNTKYDENDKLIREVKVITLKSKLVSDFRKDFQFYKVREINNYHHAHDAYLNAVVGTALIKKYPKLESEFVYGDYKVYDVRKMIAKSEQEIGKATAKYFFYSNIMNFFKTEITLANGEIRKRPLIETNGETGEIVWDKGRDFATVRKVLSMPQVNIVKKTEVQTGGFSKESILPKRNSDKLIARKKDWDPKKYGGFDSPTVAYSVLVVAKVEKGKSKKLKSVKELLGITIMERSSFEKNPIDFLEAKGYKEVKKDLIIKLPKYSLFELENGRKRMLASAGELQKGNELALPSKYVNFLYLASHYEKLKGSPEDNEQKQLFVEQHKHYLDEIIEQISEFSKRVILADANLDKVLSAYNKHRDKPIREQAENIIHLFTLTNLGAPAAFKYFDTTIDRKRYTSTKEVLDATLIHQSITGLYETRIDLSQLGGDGGGSSGSSGSSGSSGGTLNIEDEYRLHETSKEPDVSLGSTWLSDFPQAWAETGGMGLAVRQAPLIIPLKATSTPVSIKQYPMSQEARLGIKPHIQRLLDQGILVPCQSPWNTPLLPVKKPGTNDYRPVQDLREVNKRVEDIHPTVPNPYNLLSGLPPSHQWYTVLDLKDAFFCLRLHPTSQPLFAFEWRDPEMGISGQLTWTRLPQGFKNSPTLFNEALHRDLADFRIQHPDLILLQYVDDLLLAATSELDCQQGTRALLQTLGNLGYRASAKKAQICQKQVKYLGYLLKEGQRWLTEARKETVMGQPTPKTPRQLREFLGKAGFCRLFIPGFAEMAAPLYPLTKPGTLFNWGPDQQKAYQEIKQALLTAPALGLPDLTKPFELFVDEKQGYAKGVLTQKLGPWRRPVAYLSKKLDPVAAGWPPCLRMVAAIAVLTKDAGKLTMGQPLVILAPHAVEALVKQPPDRWLSNARMTHYQALLLDTDRVQFGPVVALNPATLLPLPEEGLQHNCLDILAEAHGTRPDLTDQPLPDADHTWYTDGSSLLQEGQRKAGAAVTTETEVIWAKALPAGTSAQRAELIALTQALKMAEGKKLNVYTDSRYAFATAHIHGEIYRRRGWLTSEGKEIKNKDEILALLKALFLPKRLSIIHCPGHQKGHSAEARGNRMADQAARKAAITETPDTSTLLIENSSPSGGSKRTADGSEFEAGKRTADGSEFEKRTADGSEFESPKKKAKVE

SEQ ID NO: 2666 - protein, 2116 aa, synthetic construct
MPAAKRVKLDGGDKKYSIGLDIGTNSVGWAVITDEYKVPSKKFKVLGNTDRHSIKKNLIGALLFDSGETAEATRLKRTARRRYTRRKNRICYLQEIFSNEMAKVDDSFFHRLEESFLVEEDKKHERHPIFGNIVDEVAYHEKYPTIYHLRKKLVDSTDKADLRLIYLALAHMIKFRGHFLIEGDLNPDNSDVDKLFIQLVQTYNQLFEENPINASGVDAKAILSARLSKSRRLENLIAQLPGEKKNGLFGNLIALSLGLTPNFKSNFDLAEDAKLQLSKDTYDDDLDNLLAQIGDQYADLFLAAKNLSDAILLSDILRVNTEITKAPLSASMIKRYDEHHQDLTLLKALVRQQLPEKYKEIFFDQSKNGYAGYIDGGASQEEFYKFIKPILEKMDGTEELLVKLNREDLLRKQRTFDNGSIPHQIHLGELHAILRRQEDFYPFLKDNREKIEKILTFRIPYYVGPLARGNSRFAWMTRKSEETITPWNFEEVVDKGASAQSFIERMTNFDKNLPNEKVLPKHSLLYEYFTVYNELTKVKYVTEGMRKPAFLSGEQKKAIVDLLFKTNRKVTVKQLKEDYFKKIECFDSVEISGVEDRFNASLGTYHDLLKIIKDKDFLDNEENEDILEDIVLTLTLFEDREMIEERLKTYAHLFDDKVMKQLKRRRYTGWGRLSRKLINGIRDKQSGKTILDFLKSDGFANRNFMQLIHDDSLTFKEDIQKAQVSGQGDSLHEHIANLAGSPAIKKGILQTVKVVDELVKVMGRHKPENIVIEMARENQTTQKGQKNSRERMKRIEEGIKELGSQILKEHPVENTQLQNEKLYLYYLQNGRDMYVDQELDINRLSDYDVDHIVPQSFLKDDSIDNKVLTRSDKARGKSDNVPSEEVVKKMKNYWRQLLNAKLITQRKFDNLTKAERGGLSELDKAGFIKRQLVETRQITKHVAQILDSRMNTKYDENDKLIREVKVITLKSKLVSDFRKDFQFYKVREINNYHHAHDAYLNAVVGTALIKKYPKLESEFVYGDYKVYDVRKMIAKSEQEIGKATAKYFFYSNIMNFFKTEITLANGEIRKRPLIETNGETGEIVWDKGRDFATVRKVLSMPQVNIVKKTEVQTGGFSKESILPKRNSDKLIARKKDWDPKKYGGFDSPTVAYSVLVVAKVEKGKSKKLKSVKELLGITIMERSSFEKNPIDFLEAKGYKEVKKDLIIKLPKYSLFELENGRKRMLASAGELQKGNELALPSKYVNFLYLASHYEKLKGSPEDNEQKQLFVEQHKHYLDEIIEQISEFSKRVILADANLDKVLSAYNKHRDKPIREQAENIIHLFTLTNLGAPAAFKYFDTTIDRKRYTSTKEVLDATLIHQSITGLYETRIDLSQLGGDGGEAAAKGGSGSSGGTLNIEDEYRLHETSKEPDVSLGSTWLSDFPQAWAETGGMGLAVRQAPLIIPLKATSTPVSIKQYPMSQEARLGIKPHIQRLLDQGILVPCQSPWNTPLLPVKKPGTNDYRPVQDLREVNKRVEDIHPTVPNPYNLLSGLPPSHQWYTVLDLKDAFFCLRLHPTSQPLFAFEWRDPEMGISGQLTWTRLPQGFKNSPTLFNEALHRDLADFRIQHPDLILLQYVDDLLLAATSELDCQQGTRALLQTLGNLGYRASAKKAQICQKQVKYLGYLLKEGQRWLTEARKETVMGQPTPKTPRQLREFLGKAGFCRLFIPGFAEMAAPLYPLTKPGTLFNWGPDQQKAYQEIKQALLTAPALGLPDLTKPFELFVDEKQGYAKGVLTQKLGPWRRPVAYLSKKLDPVAAGWPPCLRMVAAIAVLTKDAGKLTMGQPLVILAPHAVEALVKQPPDRWLSNARMTHYQALLLDTDRVQFGPVVALNPATLLPLPEEGLQHNCLDILAEAHGTRPDLTDQPLPDADHTWYTDGSSLLQEGQRKAGAAVTTETEVIWAKALPAGTSAQRAELIALTQALKMAEGKKLNVYTDSRYAFATAHIHGEIYRRRGWLTSEGKEIKNKDEILALLKALFLPKRLSIIHCPGHQKGHSAEARGNRMADQAARKAAITETPDTSTLLIENSSPSGGSKRTADGSEFEAGKRTADGSEFEKRTADGSEFESPKKKAKVE

SEQ ID NO: 2667 - protein, 2114 aa, synthetic construct
MPAAKRVKLDGGDKKYSIGLDIGTNSVGWAVITDEYKVPSKKFKVLGNTDRHSIKKNLIGALLFDSGETAEATRLKRTARRRYTRRKNRICYLQEIFSNEMAKVDDSFFHRLEESFLVEEDKKHERHPIFGNIVDEVAYHEKYPTIYHLRKKLVDSTDKADLRLIYLALAHMIKFRGHFLIEGDLNPDNSDVDKLFIQLVQTYNQLFEENPINASGVDAKAILSARLSKSRRLENLIAQLPGEKKNGLFGNLIALSLGLTPNFKSNFDLAEDAKLQLSKDTYDDDLDNLLAQIGDQYADLFLAAKNLSDAILLSDILRVNTEITKAPLSASMIKRYDEHHQDLTLLKALVRQQLPEKYKEIFFDQSKNGYAGYIDGGASQEEFYKFIKPILEKMDGTEELLVKLNREDLLRKQRTFDNGSIPHQIHLGELHAILRRQEDFYPFLKDNREKIEKILTFRIPYYVGPLARGNSRFAWMTRKSEETITPWNFEEVVDKGASAQSFIERMTNFDKNLPNEKVLPKHSLLYEYFTVYNELTKVKYVTEGMRKPAFLSGEQKKAIVDLLFKTNRKVTVKQLKEDYFKKIECFDSVEISGVEDRFNASLGTYHDLLKIIKDKDFLDNEENEDILEDIVLTLTLFEDREMIEERLKTYAHLFDDKVMKQLKRRRYTGWGRLSRKLINGIRDKQSGKTILDFLKSDGFANRNFMQLIHDDSLTFKEDIQKAQVSGQGDSLHEHIANLAGSPAIKKGILQTVKVVDELVKVMGRHKPENIVIEMARENQTTQKGQKNSRERMKRIEEGIKELGSQILKEHPVENTQLQNEKLYLYYLQNGRDMYVDQELDINRLSDYDVDHIVPQSFLKDDSIDNKVLTRSDKARGKSDNVPSEEVVKKMKNYWRQLLNAKLITQRKFDNLTKAERGGLSELDKAGFIKRQLVETRQITKHVAQILDSRMNTKYDENDKLIREVKVITLKSKLVSDFRKDFQFYKVREINNYHHAHDAYLNAVVGTALIKKYPKLESEFVYGDYKVYDVRKMIAKSEQEIGKATAKYFFYSNIMNFFKTEITLANGEIRKRPLIETNGETGEIVWDKGRDFATVRKVLSMPQVNIVKKTEVQTGGFSKESILPKRNSDKLIARKKDWDPKKYGGFDSPTVAYSVLVVAKVEKGKSKKLKSVKELLGITIMERSSFEKNPIDFLEAKGYKEVKKDLIIKLPKYSLFELENGRKRMLASAGELQKGNELALPSKYVNFLYLASHYEKLKGSPEDNEQKQLFVEQHKHYLDEIIEQISEFSKRVILADANLDKVLSAYNKHRDKPIREQAENIIHLFTLTNLGAPAAFKYFDTTIDRKRYTSTKEVLDATLIHQSITGLYETRIDLSQLGGDGGGGSPAPGGGGGTLNIEDEYRLHETSKEPDVSLGSTWLSDFPQAWAETGGMGLAVRQAPLIIPLKATSTPVSIKQYPMSQEARLGIKPHIQRLLDQGILVPCQSPWNTPLLPVKKPGTNDYRPVQDLREVNKRVEDIHPTVPNPYNLLSGLPPSHQWYTVLDLKDAFFCLRLHPTSQPLFAFEWRDPEMGISGQLTWTRLPQGFKNSPTLFNEALHRDLADFRIQHPDLILLQYVDDLLLAATSELDCQQGTRALLQTLGNLGYRASAKKAQICQKQVKYLGYLLKEGQRWLTEARKETVMGQPTPKTPRQLREFLGKAGFCRLFIPGFAEMAAPLYPLTKPGTLFNWGPDQQKAYQEIKQALLTAPALGLPDLTKPFELFVDEKQGYAKGVLTQKLGPWRRPVAYLSKKLDPVAAGWPPCLRMVAAIAVLTKDAGKLTMGQPLVILAPHAVEALVKQPPDRWLSNARMTHYQALLLDTDRVQFGPVVALNPATLLPLPEEGLQHNCLDILAEAHGTRPDLTDQPLPDADHTWYTDGSSLLQEGQRKAGAAVTTETEVIWAKALPAGTSAQRAELIALTQALKMAEGKKLNVYTDSRYAFATAHIHGEIYRRRGWLTSEGKEIKNKDEILALLKALFLPKRLSIIHCPGHQKGHSAEARGNRMADQAARKAAITETPDTSTLLIENSSPSGGSKRTADGSEFEAGKRTADGSEFEKRTADGSEFESPKKKAKVE

SEQ ID NO: 2668 - skipped

SEQ ID NO: 2669 - protein, 2120 aa, synthetic construct
MPAAKRVKLDGGDKKYSIGLDIGTNSVGWAVITDEYKVPSKKFKVLGNTDRHSIKKNLIGALLFDSGETAEATRLKRTARRRYTRRKNRICYLQEIFSNEMAKVDDSFFHRLEESFLVEEDKKHERHPIFGNIVDEVAYHEKYPTIYHLRKKLVDSTDKADLRLIYLALAHMIKFRGHFLIEGDLNPDNSDVDKLFIQLVQTYNQLFEENPINASGVDAKAILSARLSKSRRLENLIAQLPGEKKNGLFGNLIALSLGLTPNFKSNFDLAEDAKLQLSKDTYDDDLDNLLAQIGDQYADLFLAAKNLSDAILLSDILRVNTEITKAPLSASMIKRYDEHHQDLTLLKALVRQQLPEKYKEIFFDQSKNGYAGYIDGGASQEEFYKFIKPILEKMDGTEELLVKLNREDLLRKQRTFDNGSIPHQIHLGELHAILRRQEDFYPFLKDNREKIEKILTFRIPYYVGPLARGNSRFAWMTRKSEETITPWNFEEVVDKGASAQSFIERMTNFDKNLPNEKVLPKHSLLYEYFTVYNELTKVKYVTEGMRKPAFLSGEQKKAIVDLLFKTNRKVTVKQLKEDYFKKIECFDSVEISGVEDRFNASLGTYHDLLKIIKDKDFLDNEENEDILEDIVLTLTLFEDREMIEERLKTYAHLFDDKVMKQLKRRRYTGWGRLSRKLINGIRDKQSGKTILDFLKSDGFANRNFMQLIHDDSLTFKEDIQKAQVSGQGDSLHEHIANLAGSPAIKKGILQTVKVVDELVKVMGRHKPENIVIEMARENQTTQKGQKNSRERMKRIEEGIKELGSQILKEHPVENTQLQNEKLYLYYLQNGRDMYVDQELDINRLSDYDVDHIVPQSFLKDDSIDNKVLTRSDKARGKSDNVPSEEVVKKMKNYWRQLLNAKLITQRKFDNLTKAERGGLSELDKAGFIKRQLVETRQITKHVAQILDSRMNTKYDENDKLIREVKVITLKSKLVSDFRKDFQFYKVREINNYHHAHDAYLNAVVGTALIKKYPKLESEFVYGDYKVYDVRKMIAKSEQEIGKATAKYFFYSNIMNFFKTEITLANGEIRKRPLIETNGETGEIVWDKGRDFATVRKVLSMPQVNIVKKTEVQTGGFSKESILPKRNSDKLIARKKDWDPKKYGGFDSPTVAYSVLVVAKVEKGKSKKLKSVKELLGITIMERSSFEKNPIDFLEAKGYKEVKKDLIIKLPKYSLFELENGRKRMLASAGELQKGNELALPSKYVNFLYLASHYEKLKGSPEDNEQKQLFVEQHKHYLDEIIEQISEFSKRVILADANLDKVLSAYNKHRDKPIREQAENIIHLFTLTNLGAPAAFKYFDTTIDRKRYTSTKEVLDATLIHQSITGLYETRIDLSQLGGDGGGSSGSSGSSGSSGSSGGTLNIEDEYRLHETSKEPDVSLGSTWLSDFPQAWAETGGMGLAVRQAPLIIPLKATSTPVSIKQYPMSQEARLGIKPHIQRLLDQGILVPCQSPWNTPLLPVKKPGTNDYRPVQDLREVNKRVEDIHPTVPNPYNLLSGLPPSHQWYTVLDLKDAFFCLRLHPTSQPLFAFEWRDPEMGISGQLTWTRLPQGFKNSPTLFNEALHRDLADFRIQHPDLILLQYVDDLLLAATSELDCQQGTRALLQTLGNLGYRASAKKAQICQKQVKYLGYLLKEGQRWLTEARKETVMGQPTPKTPRQLREFLGKAGFCRLFIPGFAEMAAPLYPLTKPGTLFNWGPDQQKAYQEIKQALLTAPALGLPDLTKPFELFVDEKQGYAKGVLTQKLGPWRRPVAYLSKKLDPVAAGWPPCLRMVAAIAVLTKDAGKLTMGQPLVILAPHAVEALVKQPPDRWLSNARMTHYQALLLDTDRVQFGPVVALNPATLLPLPEEGLQHNCLDILAEAHGTRPDLTDQPLPDADHTWYTDGSSLLQEGQRKAGAAVTTETEVIWAKALPAGTSAQRAELIALTQALKMAEGKKLNVYTDSRYAFATAHIHGEIYRRRGWLTSEGKEIKNKDEILALLKALFLPKRLSIIHCPGHQKGHSAEARGNRMADQAARKAAITETPDTSTLLIENSSPSGGSKRTADGSEFEAGKRTADGSEFEKRTADGSEFESPKKKAKVE

SEQ ID NO: 2670-2674 - skipped (5 entries)

SEQ ID NO: 2675 - protein, 2114 aa, synthetic construct
MPAAKRVKLDGGDKKYSIGLDIGTNSVGWAVITDEYKVPSKKFKVLGNTDRHSIKKNLIGALLFDSGETAEATRLKRTARRRYTRRKNRICYLQEIFSNEMAKVDDSFFHRLEESFLVEEDKKHERHPIFGNIVDEVAYHEKYPTIYHLRKKLVDSTDKADLRLIYLALAHMIKFRGHFLIEGDLNPDNSDVDKLFIQLVQTYNQLFEENPINASGVDAKAILSARLSKSRRLENLIAQLPGEKKNGLFGNLIALSLGLTPNFKSNFDLAEDAKLQLSKDTYDDDLDNLLAQIGDQYADLFLAAKNLSDAILLSDILRVNTEITKAPLSASMIKRYDEHHQDLTLLKALVRQQLPEKYKEIFFDQSKNGYAGYIDGGASQEEFYKFIKPILEKMDGTEELLVKLNREDLLRKQRTFDNGSIPHQIHLGELHAILRRQEDFYPFLKDNREKIEKILTFRIPYYVGPLARGNSRFAWMTRKSEETITPWNFEEVVDKGASAQSFIERMTNFDKNLPNEKVLPKHSLLYEYFTVYNELTKVKYVTEGMRKPAFLSGEQKKAIVDLLFKTNRKVTVKQLKEDYFKKIECFDSVEISGVEDRFNASLGTYHDLLKIIKDKDFLDNEENEDILEDIVLTLTLFEDREMIEERLKTYAHLFDDKVMKQLKRRRYTGWGRLSRKLINGIRDKQSGKTILDFLKSDGFANRNFMQLIHDDSLTFKEDIQKAQVSGQGDSLHEHIANLAGSPAIKKGILQTVKVVDELVKVMGRHKPENIVIEMARENQTTQKGQKNSRERMKRIEEGIKELGSQILKEHPVENTQLQNEKLYLYYLQNGRDMYVDQELDINRLSDYDVDHIVPQSFLKDDSIDNKVLTRSDKARGKSDNVPSEEVVKKMKNYWRQLLNAKLITQRKFDNLTKAERGGLSELDKAGFIKRQLVETRQITKHVAQILDSRMNTKYDENDKLIREVKVITLKSKLVSDFRKDFQFYKVREINNYHHAHDAYLNAVVGTALIKKYPKLESEFVYGDYKVYDVRKMIAKSEQEIGKATAKYFFYSNIMNFFKTEITLANGEIRKRPLIETNGETGEIVWDKGRDFATVRKVLSMPQVNIVKKTEVQTGGFSKESILPKRNSDKLIARKKDWDPKKYGGFDSPTVAYSVLVVAKVEKGKSKKLKSVKELLGITIMERSSFEKNPIDFLEAKGYKEVKKDLIIKLPKYSLFELENGRKRMLASAGELQKGNELALPSKYVNFLYLASHYEKLKGSPEDNEQKQLFVEQHKHYLDEIIEQISEFSKRVILADANLDKVLSAYNKHRDKPIREQAENIIHLFTLTNLGAPAAFKYFDTTIDRKRYTSTKEVLDATLIHQSITGLYETRIDLSQLGGDGGGGSGSSGGGGGTLNIEDEYRLHETSKEPDVSLGSTWLSDFPQAWAETGGMGLAVRQAPLIIPLKATSTPVSIKQYPMSQEARLGIKPHIQRLLDQGILVPCQSPWNTPLLPVKKPGTNDYRPVQDLREVNKRVEDIHPTVPNPYNLLSGLPPSHQWYTVLDLKDAFFCLRLHPTSQPLFAFEWRDPEMGISGQLTWTRLPQGFKNSPTLFNEALHRDLADFRIQHPDLILLQYVDDLLLAATSELDCQQGTRALLQTLGNLGYRASAKKAQICQKQVKYLGYLLKEGQRWLTEARKETVMGQPTPKTPRQLREFLGKAGFCRLFIPGFAEMAAPLYPLTKPGTLFNWGPDQQKAYQEIKQALLTAPALGLPDLTKPFELFVDEKQGYAKGVLTQKLGPWRRPVAYLSKKLDPVAAGWPPCLRMVAAIAVLTKDAGKLTMGQPLVILAPHAVEALVKQPPDRWLSNARMTHYQALLLDTDRVQFGPVVALNPATLLPLPEEGLQHNCLDILAEAHGTRPDLTDQPLPDADHTWYTDGSSLLQEGQRKAGAAVTTETEVIWAKALPAGTSAQRAELIALTQALKMAEGKKLNVYTDSRYAFATAHIHGEIYRRRGWLTSEGKEIKNKDEILALLKALFLPKRLSIIHCPGHQKGHSAEARGNRMADQAARKAAITETPDTSTLLIENSSPSGGSKRTADGSEFEAGKRTADGSEFEKRTADGSEFESPKKKAKVE

SEQ ID NO: 2676 - protein, 2111 aa, synthetic construct
MPAAKRVKLDGGDKKYSIGLDIGTNSVGWAVITDEYKVPSKKFKVLGNTDRHSIKKNLIGALLFDSGETAEATRLKRTARRRYTRRKNRICYLQEIFSNEMAKVDDSFFHRLEESFLVEEDKKHERHPIFGNIVDEVAYHEKYPTIYHLRKKLVDSTDKADLRLIYLALAHMIKFRGHFLIEGDLNPDNSDVDKLFIQLVQTYNQLFEENPINASGVDAKAILSARLSKSRRLENLIAQLPGEKKNGLFGNLIALSLGLTPNFKSNFDLAEDAKLQLSKDTYDDDLDNLLAQIGDQYADLFLAAKNLSDAILLSDILRVNTEITKAPLSASMIKRYDEHHQDLTLLKALVRQQLPEKYKEIFFDQSKNGYAGYIDGGASQEEFYKFIKPILEKMDGTEELLVKLNREDLLRKQRTFDNGSIPHQIHLGELHAILRRQEDFYPFLKDNREKIEKILTFRIPYYVGPLARGNSRFAWMTRKSEETITPWNFEEVVDKGASAQSFIERMTNFDKNLPNEKVLPKHSLLYEYFTVYNELTKVKYVTEGMRKPAFLSGEQKKAIVDLLFKTNRKVTVKQLKEDYFKKIECFDSVEISGVEDRFNASLGTYHDLLKIIKDKDFLDNEENEDILEDIVLTLTLFEDREMIEERLKTYAHLFDDKVMKQLKRRRYTGWGRLSRKLINGIRDKQSGKTILDFLKSDGFANRNFMQLIHDDSLTFKEDIQKAQVSGQGDSLHEHIANLAGSPAIKKGILQTVKVVDELVKVMGRHKPENIVIEMARENQTTQKGQKNSRERMKRIEEGIKELGSQILKEHPVENTQLQNEKLYLYYLQNGRDMYVDQELDINRLSDYDVDHIVPQSFLKDDSIDNKVLTRSDKARGKSDNVPSEEVVKKMKNYWRQLLNAKLITQRKFDNLTKAERGGLSELDKAGFIKRQLVETRQITKHVAQILDSRMNTKYDENDKLIREVKVITLKSKLVSDFRKDFQFYKVREINNYHHAHDAYLNAVVGTALIKKYPKLESEFVYGDYKVYDVRKMIAKSEQEIGKATAKYFFYSNIMNFFKTEITLANGEIRKRPLIETNGETGEIVWDKGRDFATVRKVLSMPQVNIVKKTEVQTGGFSKESILPKRNSDKLIARKKDWDPKKYGGFDSPTVAYSVLVVAKVEKGKSKKLKSVKELLGITIMERSSFEKNPIDFLEAKGYKEVKKDLIIKLPKYSLFELENGRKRMLASAGELQKGNELALPSKYVNFLYLASHYEKLKGSPEDNEQKQLFVEQHKHYLDEIIEQISEFSKRVILADANLDKVLSAYNKHRDKPIREQAENIIHLFTLTNLGAPAAFKYFDTTIDRKRYTSTKEVLDATLIHQSITGLYETRIDLSQLGGDGGGSSGGGGGTLNIEDEYRLHETSKEPDVSLGSTWLSDFPQAWAETGGMGLAVRQAPLIIPLKATSTPVSIKQYPMSQEARLGIKPHIQRLLDQGILVPCQSPWNTPLLPVKKPGTNDYRPVQDLREVNKRVEDIHPTVPNPYNLLSGLPPSHQWYTVLDLKDAFFCLRLHPTSQPLFAFEWRDPEMGISGQLTWTRLPQGFKNSPTLFNEALHRDLADFRIQHPDLILLQYVDDLLLAATSELDCQQGTRALLQTLGNLGYRASAKKAQICQKQVKYLGYLLKEGQRWLTEARKETVMGQPTPKTPRQLREFLGKAGFCRLFIPGFAEMAAPLYPLTKPGTLFNWGPDQQKAYQEIKQALLTAPALGLPDLTKPFELFVDEKQGYAKGVLTQKLGPWRRPVAYLSKKLDPVAAGWPPCLRMVAAIAVLTKDAGKLTMGQPLVILAPHAVEALVKQPPDRWLSNARMTHYQALLLDTDRVQFGPVVALNPATLLPLPEEGLQHNCLDILAEAHGTRPDLTDQPLPDADHTWYTDGSSLLQEGQRKAGAAVTTETEVIWAKALPAGTSAQRAELIALTQALKMAEGKKLNVYTDSRYAFATAHIHGEIYRRRGWLTSEGKEIKNKDEILALLKALFLPKRLSIIHCPGHQKGHSAEARGNRMADQAARKAAITETPDTSTLLIENSSPSGGSKRTADGSEFEAGKRTADGSEFEKRTADGSEFESPKKKAKVE

SEQ ID NO: 2677 - protein, 2116 aa, synthetic construct
MPAAKRVKLDGGDKKYSIGLDIGTNSVGWAVITDEYKVPSKKFKVLGNTDRHSIKKNLIGALLFDSGETAEATRLKRTARRRYTRRKNRICYLQEIFSNEMAKVDDSFFHRLEESFLVEEDKKHERHPIFGNIVDEVAYHEKYPTIYHLRKKLVDSTDKADLRLIYLALAHMIKFRGHFLIEGDLNPDNSDVDKLFIQLVQTYNQLFEENPINASGVDAKAILSARLSKSRRLENLIAQLPGEKKNGLFGNLIALSLGLTPNFKSNFDLAEDAKLQLSKDTYDDDLDNLLAQIGDQYADLFLAAKNLSDAILLSDILRVNTEITKAPLSASMIKRYDEHHQDLTLLKALVRQQLPEKYKEIFFDQSKNGYAGYIDGGASQEEFYKFIKPILEKMDGTEELLVKLNREDLLRKQRTFDNGSIPHQIHLGELHAILRRQEDFYPFLKDNREKIEKILTFRIPYYVGPLARGNSRFAWMTRKSEETITPWNFEEVVDKGASAQSFIERMTNFDKNLPNEKVLPKHSLLYEYFTVYNELTKVKYVTEGMRKPAFLSGEQKKAIVDLLFKTNRKVTVKQLKEDYFKKIECFDSVEISGVEDRFNASLGTYHDLLKIIKDKDFLDNEENEDILEDIVLTLTLFEDREMIEERLKTYAHLFDDKVMKQLKRRRYTGWGRLSRKLINGIRDKQSGKTILDFLKSDGFANRNFMQLIHDDSLTFKEDIQKAQVSGQGDSLHEHIANLAGSPAIKKGILQTVKVVDELVKVMGRHKPENIVIEMARENQTTQKGQKNSRERMKRIEEGIKELGSQILKEHPVENTQLQNEKLYLYYLQNGRDMYVDQELDINRLSDYDVDHIVPQSFLKDDSIDNKVLTRSDKARGKSDNVPSEEVVKKMKNYWRQLLNAKLITQRKFDNLTKAERGGLSELDKAGFIKRQLVETRQITKHVAQILDSRMNTKYDENDKLIREVKVITLKSKLVSDFRKDFQFYKVREINNYHHAHDAYLNAVVGTALIKKYPKLESEFVYGDYKVYDVRKMIAKSEQEIGKATAKYFFYSNIMNFFKTEITLANGEIRKRPLIETNGETGEIVWDKGRDFATVRKVLSMPQVNIVKKTEVQTGGFSKESILPKRNSDKLIARKKDWDPKKYGGFDSPTVAYSVLVVAKVEKGKSKKLKSVKELLGITIMERSSFEKNPIDFLEAKGYKEVKKDLIIKLPKYSLFELENGRKRMLASAGELQKGNELALPSKYVNFLYLASHYEKLKGSPEDNEQKQLFVEQHKHYLDEIIEQISEFSKRVILADANLDKVLSAYNKHRDKPIREQAENIIHLFTLTNLGAPAAFKYFDTTIDRKRYTSTKEVLDATLIHQSITGLYETRIDLSQLGGDGGGGGEAAAKGSSGGTLNIEDEYRLHETSKEPDVSLGSTWLSDFPQAWAETGGMGLAVRQAPLIIPLKATSTPVSIKQYPMSQEARLGIKPHIQRLLDQGILVPCQSPWNTPLLPVKKPGTNDYRPVQDLREVNKRVEDIHPTVPNPYNLLSGLPPSHQWYTVLDLKDAFFCLRLHPTSQPLFAFEWRDPEMGISGQLTWTRLPQGFKNSPTLFNEALHRDLADFRIQHPDLILLQYVDDLLLAATSELDCQQGTRALLQTLGNLGYRASAKKAQICQKQVKYLGYLLKEGQRWLTEARKETVMGQPTPKTPRQLREFLGKAGFCRLFIPGFAEMAAPLYPLTKPGTLFNWGPDQQKAYQEIKQALLTAPALGLPDLTKPFELFVDEKQGYAKGVLTQKLGPWRRPVAYLSKKLDPVAAGWPPCLRMVAAIAVLTKDAGKLTMGQPLVILAPHAVEALVKQPPDRWLSNARMTHYQALLLDTDRVQFGPVVALNPATLLPLPEEGLQHNCLDILAEAHGTRPDLTDQPLPDADHTWYTDGSSLLQEGQRKAGAAVTTETEVIWAKALPAGTSAQRAELIALTQALKMAEGKKLNVYTDSRYAFATAHIHGEIYRRRGWLTSEGKEIKNKDEILALLKALFLPKRLSIIHCPGHQKGHSAEARGNRMADQAARKAAITETPDTSTLLIENSSPSGGSKRTADGSEFEAGKRTADGSEFEKRTADGSEFESPKKKAKVE

SEQ ID NO: 2678 - protein, 2130 aa, synthetic construct
MPAAKRVKLDGGDKKYSIGLDIGTNSVGWAVITDEYKVPSKKFKVLGNTDRHSIKKNLIGALLFDSGETAEATRLKRTARRRYTRRKNRICYLQEIFSNEMAKVDDSFFHRLEESFLVEEDKKHERHPIFGNIVDEVAYHEKYPTIYHLRKKLVDSTDKADLRLIYLALAHMIKFRGHFLIEGDLNPDNSDVDKLFIQLVQTYNQLFEENPINASGVDAKAILSARLSKSRRLENLIAQLPGEKKNGLFGNLIALSLGLTPNFKSNFDLAEDAKLQLSKDTYDDDLDNLLAQIGDQYADLFLAAKNLSDAILLSDILRVNTEITKAPLSASMIKRYDEHHQDLTLLKALVRQQLPEKYKEIFFDQSKNGYAGYIDGGASQEEFYKFIKPILEKMDGTEELLVKLNREDLLRKQRTFDNGSIPHQIHLGELHAILRRQEDFYPFLKDNREKIEKILTFRIPYYVGPLARGNSRFAWMTRKSEETITPWNFEEVVDKGASAQSFIERMTNFDKNLPNEKVLPKHSLLYEYFTVYNELTKVKYVTEGMRKPAFLSGEQKKAIVDLLFKTNRKVTVKQLKEDYFKKIECFDSVEISGVEDRFNASLGTYHDLLKIIKDKDFLDNEENEDILEDIVLTLTLFEDREMIEERLKTYAHLFDDKVMKQLKRRRYTGWGRLSRKLINGIRDKQSGKTILDFLKSDGFANRNFMQLIHDDSLTFKEDIQKAQVSGQGDSLHEHIANLAGSPAIKKGILQTVKVVDELVKVMGRHKPENIVIEMARENQTTQKGQKNSRERMKRIEEGIKELGSQILKEHPVENTQLQNEKLYLYYLQNGRDMYVDQELDINRLSDYDVDHIVPQSFLKDDSIDNKVLTRSDKARGKSDNVPSEEVVKKMKNYWRQLLNAKLITQRKFDNLTKAERGGLSELDKAGFIKRQLVETRQITKHVAQILDSRMNTKYDENDKLIREVKVITLKSKLVSDFRKDFQFYKVREINNYHHAHDAYLNAVVGTALIKKYPKLESEFVYGDYKVYDVRKMIAKSEQEIGKATAKYFFYSNIMNFFKTEITLANGEIRKRPLIETNGETGEIVWDKGRDFATVRKVLSMPQVNIVKKTEVQTGGFSKESILPKRNSDKLIARKKDWDPKKYGGFDSPTVAYSVLVVAKVEKGKSKKLKSVKELLGITIMERSSFEKNPIDFLEAKGYKEVKKDLIIKLPKYSLFELENGRKRMLASAGELQKGNELALPSKYVNFLYLASHYEKLKGSPEDNEQKQLFVEQHKHYLDEIIEQISEFSKRVILADANLDKVLSAYNKHRDKPIREQAENIIHLFTLTNLGAPAAFKYFDTTIDRKRYTSTKEVLDATLIHQSITGLYETRIDLSQLGGDGGEAAAKEAAAKEAAAKEAAAKEAAAKGGTLNIEDEYRLHETSKEPDVSLGSTWLSDFPQAWAETGGMGLAVRQAPLIIPLKATSTPVSIKQYPMSQEARLGIKPHIQRLLDQGILVPCQSPWNTPLLPVKKPGTNDYRPVQDLREVNKRVEDIHPTVPNPYNLLSGLPPSHQWYTVLDLKDAFFCLRLHPTSQPLFAFEWRDPEMGISGQLTWTRLPQGFKNSPTLFNEALHRDLADFRIQHPDLILLQYVDDLLLAATSELDCQQGTRALLQTLGNLGYRASAKKAQICQKQVKYLGYLLKEGQRWLTEARKETVMGQPTPKTPRQLREFLGKAGFCRLFIPGFAEMAAPLYPLTKPGTLFNWGPDQQKAYQEIKQALLTAPALGLPDLTKPFELFVDEKQGYAKGVLTQKLGPWRRPVAYLSKKLDPVAAGWPPCLRMVAAIAVLTKDAGKLTMGQPLVILAPHAVEALVKQPPDRWLSNARMTHYQALLLDTDRVQFGPVVALNPATLLPLPEEGLQHNCLDILAEAHGTRPDLTDQPLPDADHTWYTDGSSLLQEGQRKAGAAVTTETEVIWAKALPAGTSAQRAELIALTQALKMAEGKKLNVYTDSRYAFATAHIHGEIYRRRGWLTSEGKEIKNKDEILALLKALFLPKRLSIIHCPGHQKGHSAEARGNRMADQAARKAAITETPDTSTLLIENSSPSGGSKRTADGSEFEAGKRTADGSEFEKRTADGSEFESPKKKAKVE

SEQ ID NO: 2679-2680 - skipped (2 entries)

SEQ ID NO: 2681 - protein, 2116 aa, synthetic construct
MPAAKRVKLDGGDKKYSIGLDIGTNSVGWAVITDEYKVPSKKFKVLGNTDRHSIKKNLIGALLFDSGETAEATRLKRTARRRYTRRKNRICYLQEIFSNEMAKVDDSFFHRLEESFLVEEDKKHERHPIFGNIVDEVAYHEKYPTIYHLRKKLVDSTDKADLRLIYLALAHMIKFRGHFLIEGDLNPDNSDVDKLFIQLVQTYNQLFEENPINASGVDAKAILSARLSKSRRLENLIAQLPGEKKNGLFGNLIALSLGLTPNFKSNFDLAEDAKLQLSKDTYDDDLDNLLAQIGDQYADLFLAAKNLSDAILLSDILRVNTEITKAPLSASMIKRYDEHHQDLTLLKALVRQQLPEKYKEIFFDQSKNGYAGYIDGGASQEEFYKFIKPILEKMDGTEELLVKLNREDLLRKQRTFDNGSIPHQIHLGELHAILRRQEDFYPFLKDNREKIEKILTFRIPYYVGPLARGNSRFAWMTRKSEETITPWNFEEVVDKGASAQSFIERMTNFDKNLPNEKVLPKHSLLYEYFTVYNELTKVKYVTEGMRKPAFLSGEQKKAIVDLLFKTNRKVTVKQLKEDYFKKIECFDSVEISGVEDRFNASLGTYHDLLKIIKDKDFLDNEENEDILEDIVLTLTLFEDREMIEERLKTYAHLFDDKVMKQLKRRRYTGWGRLSRKLINGIRDKQSGKTILDFLKSDGFANRNFMQLIHDDSLTFKEDIQKAQVSGQGDSLHEHIANLAGSPAIKKGILQTVKVVDELVKVMGRHKPENIVIEMARENQTTQKGQKNSRERMKRIEEGIKELGSQILKEHPVENTQLQNEKLYLYYLQNGRDMYVDQELDINRLSDYDVDHIVPQSFLKDDSIDNKVLTRSDKARGKSDNVPSEEVVKKMKNYWRQLLNAKLITQRKFDNLTKAERGGLSELDKAGFIKRQLVETRQITKHVAQILDSRMNTKYDENDKLIREVKVITLKSKLVSDFRKDFQFYKVREINNYHHAHDAYLNAVVGTALIKKYPKLESEFVYGDYKVYDVRKMIAKSEQEIGKATAKYFFYSNIMNFFKTEITLANGEIRKRPLIETNGETGEIVWDKGRDFATVRKVLSMPQVNIVKKTEVQTGGFSKESILPKRNSDKLIARKKDWDPKKYGGFDSPTVAYSVLVVAKVEKGKSKKLKSVKELLGITIMERSSFEKNPIDFLEAKGYKEVKKDLIIKLPKYSLFELENGRKRMLASAGELQKGNELALPSKYVNFLYLASHYEKLKGSPEDNEQKQLFVEQHKHYLDEIIEQISEFSKRVILADANLDKVLSAYNKHRDKPIREQAENIIHLFTLTNLGAPAAFKYFDTTIDRKRYTSTKEVLDATLIHQSITGLYETRIDLSQLGGDGGEAAAKPAPGGGGGTLNIEDEYRLHETSKEPDVSLGSTWLSDFPQAWAETGGMGLAVRQAPLIIPLKATSTPVSIKQYPMSQEARLGIKPHIQRLLDQGILVPCQSPWNTPLLPVKKPGTNDYRPVQDLREVNKRVEDIHPTVPNPYNLLSGLPPSHQWYTVLDLKDAFFCLRLHPTSQPLFAFEWRDPEMGISGQLTWTRLPQGFKNSPTLFNEALHRDLADFRIQHPDLILLQYVDDLLLAATSELDCQQGTRALLQTLGNLGYRASAKKAQICQKQVKYLGYLLKEGQRWLTEARKETVMGQPTPKTPRQLREFLGKAGFCRLFIPGFAEMAAPLYPLTKPGTLFNWGPDQQKAYQEIKQALLTAPALGLPDLTKPFELFVDEKQGYAKGVLTQKLGPWRRPVAYLSKKLDPVAAGWPPCLRMVAAIAVLTKDAGKLTMGQPLVILAPHAVEALVKQPPDRWLSNARMTHYQALLLDTDRVQFGPVVALNPATLLPLPEEGLQHNCLDILAEAHGTRPDLTDQPLPDADHTWYTDGSSLLQEGQRKAGAAVTTETEVIWAKALPAGTSAQRAELIALTQALKMAEGKKLNVYTDSRYAFATAHIHGEIYRRRGWLTSEGKEIKNKDEILALLKALFLPKRLSIIHCPGHQKGHSAEARGNRMADQAARKAAITETPDTSTLLIENSSPSGGSKRTADGSEFEAGKRTADGSEFEKRTADGSEFESPKKKAKVE

SEQ ID NO: 2682-2683 - skipped (2 entries)

SEQ ID NO: 2684 - protein, 2114 aa, synthetic construct
MPAAKRVKLDGGDKKYSIGLDIGTNSVGWAVITDEYKVPSKKFKVLGNTDRHSIKKNLIGALLFDSGETAEATRLKRTARRRYTRRKNRICYLQEIFSNEMAKVDDSFFHRLEESFLVEEDKKHERHPIFGNIVDEVAYHEKYPTIYHLRKKLVDSTDKADLRLIYLALAHMIKFRGHFLIEGDLNPDNSDVDKLFIQLVQTYNQLFEENPINASGVDAKAILSARLSKSRRLENLIAQLPGEKKNGLFGNLIALSLGLTPNFKSNFDLAEDAKLQLSKDTYDDDLDNLLAQIGDQYADLFLAAKNLSDAILLSDILRVNTEITKAPLSASMIKRYDEHHQDLTLLKALVRQQLPEKYKEIFFDQSKNGYAGYIDGGASQEEFYKFIKPILEKMDGTEELLVKLNREDLLRKQRTFDNGSIPHQIHLGELHAILRRQEDFYPFLKDNREKIEKILTFRIPYYVGPLARGNSRFAWMTRKSEETITPWNFEEVVDKGASAQSFIERMTNFDKNLPNEKVLPKHSLLYEYFTVYNELTKVKYVTEGMRKPAFLSGEQKKAIVDLLFKTNRKVTVKQLKEDYFKKIECFDSVEISGVEDRFNASLGTYHDLLKIIKDKDFLDNEENEDILEDIVLTLTLFEDREMIEERLKTYAHLFDDKVMKQLKRRRYTGWGRLSRKLINGIRDKQSGKTILDFLKSDGFANRNFMQLIHDDSLTFKEDIQKAQVSGQGDSLHEHIANLAGSPAIKKGILQTVKVVDELVKVMGRHKPENIVIEMARENQTTQKGQKNSRERMKRIEEGIKELGSQILKEHPVENTQLQNEKLYLYYLQNGRDMYVDQELDINRLSDYDVDHIVPQSFLKDDSIDNKVLTRSDKARGKSDNVPSEEVVKKMKNYWRQLLNAKLITQRKFDNLTKAERGGLSELDKAGFIKRQLVETRQITKHVAQILDSRMNTKYDENDKLIREVKVITLKSKLVSDFRKDFQFYKVREINNYHHAHDAYLNAVVGTALIKKYPKLESEFVYGDYKVYDVRKMIAKSEQEIGKATAKYFFYSNIMNFFKTEITLANGEIRKRPLIETNGETGEIVWDKGRDFATVRKVLSMPQVNIVKKTEVQTGGFSKESILPKRNSDKLIARKKDWDPKKYGGFDSPTVAYSVLVVAKVEKGKSKKLKSVKELLGITIMERSSFEKNPIDFLEAKGYKEVKKDLIIKLPKYSLFELENGRKRMLASAGELQKGNELALPSKYVNFLYLASHYEKLKGSPEDNEQKQLFVEQHKHYLDEIIEQISEFSKRVILADANLDKVLSAYNKHRDKPIREQAENIIHLFTLTNLGAPAAFKYFDTTIDRKRYTSTKEVLDATLIHQSITGLYETRIDLSQLGGDGGGGSPAPGSSGGTLNIEDEYRLHETSKEPDVSLGSTWLSDFPQAWAETGGMGLAVRQAPLIIPLKATSTPVSIKQYPMSQEARLGIKPHIQRLLDQGILVPCQSPWNTPLLPVKKPGTNDYRPVQDLREVNKRVEDIHPTVPNPYNLLSGLPPSHQWYTVLDLKDAFFCLRLHPTSQPLFAFEWRDPEMGISGQLTWTRLPQGFKNSPTLFNEALHRDLADFRIQHPDLILLQYVDDLLLAATSELDCQQGTRALLQTLGNLGYRASAKKAQICQKQVKYLGYLLKEGQRWLTEARKETVMGQPTPKTPRQLREFLGKAGFCRLFIPGFAEMAAPLYPLTKPGTLFNWGPDQQKAYQEIKQALLTAPALGLPDLTKPFELFVDEKQGYAKGVLTQKLGPWRRPVAYLSKKLDPVAAGWPPCLRMVAAIAVLTKDAGKLTMGQPLVILAPHAVEALVKQPPDRWLSNARMTHYQALLLDTDRVQFGPVVALNPATLLPLPEEGLQHNCLDILAEAHGTRPDLTDQPLPDADHTWYTDGSSLLQEGQRKAGAAVTTETEVIWAKALPAGTSAQRAELIALTQALKMAEGKKLNVYTDSRYAFATAHIHGEIYRRRGWLTSEGKEIKNKDEILALLKALFLPKRLSIIHCPGHQKGHSAEARGNRMADQAARKAAITETPDTSTLLIENSSPSGGSKRTADGSEFEAGKRTADGSEFEKRTADGSEFESPKKKAKVE

SEQ ID NO: 2685-2687 - skipped (3 entries)

SEQ ID NO: 2688 - protein, 2116 aa, synthetic construct
MPAAKRVKLDGGDKKYSIGLDIGTNSVGWAVITDEYKVPSKKFKVLGNTDRHSIKKNLIGALLFDSGETAEATRLKRTARRRYTRRKNRICYLQEIFSNEMAKVDDSFFHRLEESFLVEEDKKHERHPIFGNIVDEVAYHEKYPTIYHLRKKLVDSTDKADLRLIYLALAHMIKFRGHFLIEGDLNPDNSDVDKLFIQLVQTYNQLFEENPINASGVDAKAILSARLSKSRRLENLIAQLPGEKKNGLFGNLIALSLGLTPNFKSNFDLAEDAKLQLSKDTYDDDLDNLLAQIGDQYADLFLAAKNLSDAILLSDILRVNTEITKAPLSASMIKRYDEHHQDLTLLKALVRQQLPEKYKEIFFDQSKNGYAGYIDGGASQEEFYKFIKPILEKMDGTEELLVKLNREDLLRKQRTFDNGSIPHQIHLGELHAILRRQEDFYPFLKDNREKIEKILTFRIPYYVGPLARGNSRFAWMTRKSEETITPWNFEEVVDKGASAQSFIERMTNFDKNLPNEKVLPKHSLLYEYFTVYNELTKVKYVTEGMRKPAFLSGEQKKAIVDLLFKTNRKVTVKQLKEDYFKKIECFDSVEISGVEDRFNASLGTYHDLLKIIKDKDFLDNEENEDILEDIVLTLTLFEDREMIEERLKTYAHLFDDKVMKQLKRRRYTGWGRLSRKLINGIRDKQSGKTILDFLKSDGFANRNFMQLIHDDSLTFKEDIQKAQVSGQGDSLHEHIANLAGSPAIKKGILQTVKVVDELVKVMGRHKPENIVIEMARENQTTQKGQKNSRERMKRIEEGIKELGSQILKEHPVENTQLQNEKLYLYYLQNGRDMYVDQELDINRLSDYDVDHIVPQSFLKDDSIDNKVLTRSDKARGKSDNVPSEEVVKKMKNYWRQLLNAKLITQRKFDNLTKAERGGLSELDKAGFIKRQLVETRQITKHVAQILDSRMNTKYDENDKLIREVKVITLKSKLVSDFRKDFQFYKVREINNYHHAHDAYLNAVVGTALIKKYPKLESEFVYGDYKVYDVRKMIAKSEQEIGKATAKYFFYSNIMNFFKTEITLANGEIRKRPLIETNGETGEIVWDKGRDFATVRKVLSMPQVNIVKKTEVQTGGFSKESILPKRNSDKLIARKKDWDPKKYGGFDSPTVAYSVLVVAKVEKGKSKKLKSVKELLGITIMERSSFEKNPIDFLEAKGYKEVKKDLIIKLPKYSLFELENGRKRMLASAGELQKGNELALPSKYVNFLYLASHYEKLKGSPEDNEQKQLFVEQHKHYLDEIIEQISEFSKRVILADANLDKVLSAYNKHRDKPIREQAENIIHLFTLTNLGAPAAFKYFDTTIDRKRYTSTKEVLDATLIHQSITGLYETRIDLSQLGGDGGGGGGSSEAAAKGGTLNIEDEYRLHETSKEPDVSLGSTWLSDFPQAWAETGGMGLAVRQAPLIIPLKATSTPVSIKQYPMSQEARLGIKPHIQRLLDQGILVPCQSPWNTPLLPVKKPGTNDYRPVQDLREVNKRVEDIHPTVPNPYNLLSGLPPSHQWYTVLDLKDAFFCLRLHPTSQPLFAFEWRDPEMGISGQLTWTRLPQGFKNSPTLFNEALHRDLADFRIQHPDLILLQYVDDLLLAATSELDCQQGTRALLQTLGNLGYRASAKKAQICQKQVKYLGYLLKEGQRWLTEARKETVMGQPTPKTPRQLREFLGKAGFCRLFIPGFAEMAAPLYPLTKPGTLFNWGPDQQKAYQEIKQALLTAPALGLPDLTKPFELFVDEKQGYAKGVLTQKLGPWRRPVAYLSKKLDPVAAGWPPCLRMVAAIAVLTKDAGKLTMGQPLVILAPHAVEALVKQPPDRWLSNARMTHYQALLLDTDRVQFGPVVALNPATLLPLPEEGLQHNCLDILAEAHGTRPDLTDQPLPDADHTWYTDGSSLLQEGQRKAGAAVTTETEVIWAKALPAGTSAQRAELIALTQALKMAEGKKLNVYTDSRYAFATAHIHGEIYRRRGWLTSEGKEIKNKDEILALLKALFLPKRLSIIHCPGHQKGHSAEARGNRMADQAARKAAITETPDTSTLLIENSSPSGGSKRTADGSEFEAGKRTADGSEFEKRTADGSEFESPKKKAKVE

SEQ ID NO: 2689-2691 - skipped (3 entries)

SEQ ID NO: 2692 - protein, 2116 aa, synthetic construct
MPAAKRVKLDGGDKKYSIGLDIGTNSVGWAVITDEYKVPSKKFKVLGNTDRHSIKKNLIGALLFDSGETAEATRLKRTARRRYTRRKNRICYLQEIFSNEMAKVDDSFFHRLEESFLVEEDKKHERHPIFGNIVDEVAYHEKYPTIYHLRKKLVDSTDKADLRLIYLALAHMIKFRGHFLIEGDLNPDNSDVDKLFIQLVQTYNQLFEENPINASGVDAKAILSARLSKSRRLENLIAQLPGEKKNGLFGNLIALSLGLTPNFKSNFDLAEDAKLQLSKDTYDDDLDNLLAQIGDQYADLFLAAKNLSDAILLSDILRVNTEITKAPLSASMIKRYDEHHQDLTLLKALVRQQLPEKYKEIFFDQSKNGYAGYIDGGASQEEFYKFIKPILEKMDGTEELLVKLNREDLLRKQRTFDNGSIPHQIHLGELHAILRRQEDFYPFLKDNREKIEKILTFRIPYYVGPLARGNSRFAWMTRKSEETITPWNFEEVVDKGASAQSFIERMTNFDKNLPNEKVLPKHSLLYEYFTVYNELTKVKYVTEGMRKPAFLSGEQKKAIVDLLFKTNRKVTVKQLKEDYFKKIECFDSVEISGVEDRFNASLGTYHDLLKIIKDKDFLDNEENEDILEDIVLTLTLFEDREMIEERLKTYAHLFDDKVMKQLKRRRYTGWGRLSRKLINGIRDKQSGKTILDFLKSDGFANRNFMQLIHDDSLTFKEDIQKAQVSGQGDSLHEHIANLAGSPAIKKGILQTVKVVDELVKVMGRHKPENIVIEMARENQTTQKGQKNSRERMKRIEEGIKELGSQILKEHPVENTQLQNEKLYLYYLQNGRDMYVDQELDINRLSDYDVDHIVPQSFLKDDSIDNKVLTRSDKARGKSDNVPSEEVVKKMKNYWRQLLNAKLITQRKFDNLTKAERGGLSELDKAGFIKRQLVETRQITKHVAQILDSRMNTKYDENDKLIREVKVITLKSKLVSDFRKDFQFYKVREINNYHHAHDAYLNAVVGTALIKKYPKLESEFVYGDYKVYDVRKMIAKSEQEIGKATAKYFFYSNIMNFFKTEITLANGEIRKRPLIETNGETGEIVWDKGRDFATVRKVLSMPQVNIVKKTEVQTGGFSKESILPKRNSDKLIARKKDWDPKKYGGFDSPTVAYSVLVVAKVEKGKSKKLKSVKELLGITIMERSSFEKNPIDFLEAKGYKEVKKDLIIKLPKYSLFELENGRKRMLASAGELQKGNELALPSKYVNFLYLASHYEKLKGSPEDNEQKQLFVEQHKHYLDEIIEQISEFSKRVILADANLDKVLSAYNKHRDKPIREQAENIIHLFTLTNLGAPAAFKYFDTTIDRKRYTSTKEVLDATLIHQSITGLYETRIDLSQLGGDGGGGSGGGEAAAKGGTLNIEDEYRLHETSKEPDVSLGSTWLSDFPQAWAETGGMGLAVRQAPLIIPLKATSTPVSIKQYPMSQEARLGIKPHIQRLLDQGILVPCQSPWNTPLLPVKKPGTNDYRPVQDLREVNKRVEDIHPTVPNPYNLLSGLPPSHQWYTVLDLKDAFFCLRLHPTSQPLFAFEWRDPEMGISGQLTWTRLPQGFKNSPTLFNEALHRDLADFRIQHPDLILLQYVDDLLLAATSELDCQQGTRALLQTLGNLGYRASAKKAQICQKQVKYLGYLLKEGQRWLTEARKETVMGQPTPKTPRQLREFLGKAGFCRLFIPGFAEMAAPLYPLTKPGTLFNWGPDQQKAYQEIKQALLTAPALGLPDLTKPFELFVDEKQGYAKGVLTQKLGPWRRPVAYLSKKLDPVAAGWPPCLRMVAAIAVLTKDAGKLTMGQPLVILAPHAVEALVKQPPDRWLSNARMTHYQALLLDTDRVQFGPVVALNPATLLPLPEEGLQHNCLDILAEAHGTRPDLTDQPLPDADHTWYTDGSSLLQEGQRKAGAAVTTETEVIWAKALPAGTSAQRAELIALTQALKMAEGKKLNVYTDSRYAFATAHIHGEIYRRRGWLTSEGKEIKNKDEILALLKALFLPKRLSIIHCPGHQKGHSAEARGNRMADQAARKAAITETPDTSTLLIENSSPSGGSKRTADGSEFEAGKRTADGSEFEKRTADGSEFESPKKKAKVE

SEQ ID NO: 2693-2695 - skipped (3 entries)

SEQ ID NO: 2696 - protein, 2117 aa, synthetic construct
MPAAKRVKLDGGDKKYSIGLDIGTNSVGWAVITDEYKVPSKKFKVLGNTDRHSIKKNLIGALLFDSGETAEATRLKRTARRRYTRRKNRICYLQEIFSNEMAKVDDSFFHRLEESFLVEEDKKHERHPIFGNIVDEVAYHEKYPTIYHLRKKLVDSTDKADLRLIYLALAHMIKFRGHFLIEGDLNPDNSDVDKLFIQLVQTYNQLFEENPINASGVDAKAILSARLSKSRRLENLIAQLPGEKKNGLFGNLIALSLGLTPNFKSNFDLAEDAKLQLSKDTYDDDLDNLLAQIGDQYADLFLAAKNLSDAILLSDILRVNTEITKAPLSASMIKRYDEHHQDLTLLKALVRQQLPEKYKEIFFDQSKNGYAGYIDGGASQEEFYKFIKPILEKMDGTEELLVKLNREDLLRKQRTFDNGSIPHQIHLGELHAILRRQEDFYPFLKDNREKIEKILTFRIPYYVGPLARGNSRFAWMTRKSEETITPWNFEEVVDKGASAQSFIERMTNFDKNLPNEKVLPKHSLLYEYFTVYNELTKVKYVTEGMRKPAFLSGEQKKAIVDLLFKTNRKVTVKQLKEDYFKKIECFDSVEISGVEDRFNASLGTYHDLLKIIKDKDFLDNEENEDILEDIVLTLTLFEDREMIEERLKTYAHLFDDKVMKQLKRRRYTGWGRLSRKLINGIRDKQSGKTILDFLKSDGFANRNFMQLIHDDSLTFKEDIQKAQVSGQGDSLHEHIANLAGSPAIKKGILQTVKVVDELVKVMGRHKPENIVIEMARENQTTQKGQKNSRERMKRIEEGIKELGSQILKEHPVENTQLQNEKLYLYYLQNGRDMYVDQELDINRLSDYDVDHIVPQSFLKDDSIDNKVLTRSDKARGKSDNVPSEEVVKKMKNYWRQLLNAKLITQRKFDNLTKAERGGLSELDKAGFIKRQLVETRQITKHVAQILDSRMNTKYDENDKLIREVKVITLKSKLVSDFRKDFQFYKVREINNYHHAHDAYLNAVVGTALIKKYPKLESEFVYGDYKVYDVRKMIAKSEQEIGKATAKYFFYSNIMNFFKTEITLANGEIRKRPLIETNGETGEIVWDKGRDFATVRKVLSMPQVNIVKKTEVQTGGFSKESILPKRNSDKLIARKKDWDPKKYGGFDSPTVAYSVLVVAKVEKGKSKKLKSVKELLGITIMERSSFEKNPIDFLEAKGYKEVKKDLIIKLPKYSLFELENGRKRMLASAGELQKGNELALPSKYVNFLYLASHYEKLKGSPEDNEQKQLFVEQHKHYLDEIIEQISEFSKRVILADANLDKVLSAYNKHRDKPIREQAENIIHLFTLTNLGAPAAFKYFDTTIDRKRYTSTKEVLDATLIHQSITGLYETRIDLSQLGGDGGGSAGSAAGSGEFGGTLNIEDEYRLHETSKEPDVSLGSTWLSDFPQAWAETGGMGLAVRQAPLIIPLKATSTPVSIKQYPMSQEARLGIKPHIQRLLDQGILVPCQSPWNTPLLPVKKPGTNDYRPVQDLREVNKRVEDIHPTVPNPYNLLSGLPPSHQWYTVLDLKDAFFCLRLHPTSQPLFAFEWRDPEMGISGQLTWTRLPQGFKNSPTLFNEALHRDLADFRIQHPDLILLQYVDDLLLAATSELDCQQGTRALLQTLGNLGYRASAKKAQICQKQVKYLGYLLKEGQRWLTEARKETVMGQPTPKTPRQLREFLGKAGFCRLFIPGFAEMAAPLYPLTKPGTLFNWGPDQQKAYQEIKQALLTAPALGLPDLTKPFELFVDEKQGYAKGVLTQKLGPWRRPVAYLSKKLDPVAAGWPPCLRMVAAIAVLTKDAGKLTMGQPLVILAPHAVEALVKQPPDRWLSNARMTHYQALLLDTDRVQFGPVVALNPATLLPLPEEGLQHNCLDILAEAHGTRPDLTDQPLPDADHTWYTDGSSLLQEGQRKAGAAVTTETEVIWAKALPAGTSAQRAELIALTQALKMAEGKKLNVYTDSRYAFATAHIHGEIYRRRGWLTSEGKEIKNKDEILALLKALFLPKRLSIIHCPGHQKGHSAEARGNRMADQAARKAAITETPDTSTLLIENSSPSGGSKRTADGSEFEAGKRTADGSEFEKRTADGSEFESPKKKAKVE

SEQ ID NO: 2697-2699 - skipped (3 entries)

SEQ ID NO: 2700 - protein, 2113 aa, synthetic construct
MPAAKRVKLDGGDKKYSIGLDIGTNSVGWAVITDEYKVPSKKFKVLGNTDRHSIKKNLIGALLFDSGETAEATRLKRTARRRYTRRKNRICYLQEIFSNEMAKVDDSFFHRLEESFLVEEDKKHERHPIFGNIVDEVAYHEKYPTIYHLRKKLVDSTDKADLRLIYLALAHMIKFRGHFLIEGDLNPDNSDVDKLFIQLVQTYNQLFEENPINASGVDAKAILSARLSKSRRLENLIAQLPGEKKNGLFGNLIALSLGLTPNFKSNFDLAEDAKLQLSKDTYDDDLDNLLAQIGDQYADLFLAAKNLSDAILLSDILRVNTEITKAPLSASMIKRYDEHHQDLTLLKALVRQQLPEKYKEIFFDQSKNGYAGYIDGGASQEEFYKFIKPILEKMDGTEELLVKLNREDLLRKQRTFDNGSIPHQIHLGELHAILRRQEDFYPFLKDNREKIEKILTFRIPYYVGPLARGNSRFAWMTRKSEETITPWNFEEVVDKGASAQSFIERMTNFDKNLPNEKVLPKHSLLYEYFTVYNELTKVKYVTEGMRKPAFLSGEQKKAIVDLLFKTNRKVTVKQLKEDYFKKIECFDSVEISGVEDRFNASLGTYHDLLKIIKDKDFLDNEENEDILEDIVLTLTLFEDREMIEERLKTYAHLFDDKVMKQLKRRRYTGWGRLSRKLINGIRDKQSGKTILDFLKSDGFANRNFMQLIHDDSLTFKEDIQKAQVSGQGDSLHEHIANLAGSPAIKKGILQTVKVVDELVKVMGRHKPENIVIEMARENQTTQKGQKNSRERMKRIEEGIKELGSQILKEHPVENTQLQNEKLYLYYLQNGRDMYVDQELDINRLSDYDVDHIVPQSFLKDDSIDNKVLTRSDKARGKSDNVPSEEVVKKMKNYWRQLLNAKLITQRKFDNLTKAERGGLSELDKAGFIKRQLVETRQITKHVAQILDSRMNTKYDENDKLIREVKVITLKSKLVSDFRKDFQFYKVREINNYHHAHDAYLNAVVGTALIKKYPKLESEFVYGDYKVYDVRKMIAKSEQEIGKATAKYFFYSNIMNFFKTEITLANGEIRKRPLIETNGETGEIVWDKGRDFATVRKVLSMPQVNIVKKTEVQTGGFSKESILPKRNSDKLIARKKDWDPKKYGGFDSPTVAYSVLVVAKVEKGKSKKLKSVKELLGITIMERSSFEKNPIDFLEAKGYKEVKKDLIIKLPKYSLFELENGRKRMLASAGELQKGNELALPSKYVNFLYLASHYEKLKGSPEDNEQKQLFVEQHKHYLDEIIEQISEFSKRVILADANLDKVLSAYNKHRDKPIREQAENIIHLFTLTNLGAPAAFKYFDTTIDRKRYTSTKEVLDATLIHQSITGLYETRIDLSQLGGDGGGGSEAAAKGGTLNIEDEYRLHETSKEPDVSLGSTWLSDFPQAWAETGGMGLAVRQAPLIIPLKATSTPVSIKQYPMSQEARLGIKPHIQRLLDQGILVPCQSPWNTPLLPVKKPGTNDYRPVQDLREVNKRVEDIHPTVPNPYNLLSGLPPSHQWYTVLDLKDAFFCLRLHPTSQPLFAFEWRDPEMGISGQLTWTRLPQGFKNSPTLFNEALHRDLADFRIQHPDLILLQYVDDLLLAATSELDCQQGTRALLQTLGNLGYRASAKKAQICQKQVKYLGYLLKEGQRWLTEARKETVMGQPTPKTPRQLREFLGKAGFCRLFIPGFAEMAAPLYPLTKPGTLFNWGPDQQKAYQEIKQALLTAPALGLPDLTKPFELFVDEKQGYAKGVLTQKLGPWRRPVAYLSKKLDPVAAGWPPCLRMVAAIAVLTKDAGKLTMGQPLVILAPHAVEALVKQPPDRWLSNARMTHYQALLLDTDRVQFGPVVALNPATLLPLPEEGLQHNCLDILAEAHGTRPDLTDQPLPDADHTWYTDGSSLLQEGQRKAGAAVTTETEVIWAKALPAGTSAQRAELIALTQALKMAEGKKLNVYTDSRYAFATAHIHGEIYRRRGWLTSEGKEIKNKDEILALLKALFLPKRLSIIHCPGHQKGHSAEARGNRMADQAARKAAITETPDTSTLLIENSSPSGGSKRTADGSEFEAGKRTADGSEFEKRTADGSEFESPKKKAKVE

SEQ ID NO: 2701 - protein, 2116 aa, synthetic construct
MPAAKRVKLDGGDKKYSIGLDIGTNSVGWAVITDEYKVPSKKFKVLGNTDRHSIKKNLIGALLFDSGETAEATRLKRTARRRYTRRKNRICYLQEIFSNEMAKVDDSFFHRLEESFLVEEDKKHERHPIFGNIVDEVAYHEKYPTIYHLRKKLVDSTDKADLRLIYLALAHMIKFRGHFLIEGDLNPDNSDVDKLFIQLVQTYNQLFEENPINASGVDAKAILSARLSKSRRLENLIAQLPGEKKNGLFGNLIALSLGLTPNFKSNFDLAEDAKLQLSKDTYDDDLDNLLAQIGDQYADLFLAAKNLSDAILLSDILRVNTEITKAPLSASMIKRYDEHHQDLTLLKALVRQQLPEKYKEIFFDQSKNGYAGYIDGGASQEEFYKFIKPILEKMDGTEELLVKLNREDLLRKQRTFDNGSIPHQIHLGELHAILRRQEDFYPFLKDNREKIEKILTFRIPYYVGPLARGNSRFAWMTRKSEETITPWNFEEVVDKGASAQSFIERMTNFDKNLPNEKVLPKHSLLYEYFTVYNELTKVKYVTEGMRKPAFLSGEQKKAIVDLLFKTNRKVTVKQLKEDYFKKIECFDSVEISGVEDRFNASLGTYHDLLKIIKDKDFLDNEENEDILEDIVLTLTLFEDREMIEERLKTYAHLFDDKVMKQLKRRRYTGWGRLSRKLINGIRDKQSGKTILDFLKSDGFANRNFMQLIHDDSLTFKEDIQKAQVSGQGDSLHEHIANLAGSPAIKKGILQTVKVVDELVKVMGRHKPENIVIEMARENQTTQKGQKNSRERMKRIEEGIKELGSQILKEHPVENTQLQNEKLYLYYLQNGRDMYVDQELDINRLSDYDVDHIVPQSFLKDDSIDNKVLTRSDKARGKSDNVPSEEVVKKMKNYWRQLLNAKLITQRKFDNLTKAERGGLSELDKAGFIKRQLVETRQITKHVAQILDSRMNTKYDENDKLIREVKVITLKSKLVSDFRKDFQFYKVREINNYHHAHDAYLNAVVGTALIKKYPKLESEFVYGDYKVYDVRKMIAKSEQEIGKATAKYFFYSNIMNFFKTEITLANGEIRKRPLIETNGETGEIVWDKGRDFATVRKVLSMPQVNIVKKTEVQTGGFSKESILPKRNSDKLIARKKDWDPKKYGGFDSPTVAYSVLVVAKVEKGKSKKLKSVKELLGITIMERSSFEKNPIDFLEAKGYKEVKKDLIIKLPKYSLFELENGRKRMLASAGELQKGNELALPSKYVNFLYLASHYEKLKGSPEDNEQKQLFVEQHKHYLDEIIEQISEFSKRVILADANLDKVLSAYNKHRDKPIREQAENIIHLFTLTNLGAPAAFKYFDTTIDRKRYTSTKEVLDATLIHQSITGLYETRIDLSQLGGDGGGGSPAPEAAAKGGTLNIEDEYRLHETSKEPDVSLGSTWLSDFPQAWAETGGMGLAVRQAPLIIPLKATSTPVSIKQYPMSQEARLGIKPHIQRLLDQGILVPCQSPWNTPLLPVKKPGTNDYRPVQDLREVNKRVEDIHPTVPNPYNLLSGLPPSHQWYTVLDLKDAFFCLRLHPTSQPLFAFEWRDPEMGISGQLTWTRLPQGFKNSPTLFNEALHRDLADFRIQHPDLILLQYVDDLLLAATSELDCQQGTRALLQTLGNLGYRASAKKAQICQKQVKYLGYLLKEGQRWLTEARKETVMGQPTPKTPRQLREFLGKAGFCRLFIPGFAEMAAPLYPLTKPGTLFNWGPDQQKAYQEIKQALLTAPALGLPDLTKPFELFVDEKQGYAKGVLTQKLGPWRRPVAYLSKKLDPVAAGWPPCLRMVAAIAVLTKDAGKLTMGQPLVILAPHAVEALVKQPPDRWLSNARMTHYQALLLDTDRVQFGPVVALNPATLLPLPEEGLQHNCLDILAEAHGTRPDLTDQPLPDADHTWYTDGSSLLQEGQRKAGAAVTTETEVIWAKALPAGTSAQRAELIALTQALKMAEGKKLNVYTDSRYAFATAHIHGEIYRRRGWLTSEGKEIKNKDEILALLKALFLPKRLSIIHCPGHQKGHSAEARGNRMADQAARKAAITETPDTSTLLIENSSPSGGSKRTADGSEFEAGKRTADGSEFEKRTADGSEFESPKKKAKVE

SEQ ID NO: 2702-2710 - skipped (9 entries)

SEQ ID NO: 2711 - protein, 2131 aa, synthetic construct
MPAAKRVKLDGGDKKYSIGLDIGTNSVGWAVITDEYKVPSKKFKVLGNTDRHSIKKNLIGALLFDSGETAEATRLKRTARRRYTRRKNRICYLQEIFSNEMAKVDDSFFHRLEESFLVEEDKKHERHPIFGNIVDEVAYHEKYPTIYHLRKKLVDSTDKADLRLIYLALAHMIKFRGHFLIEGDLNPDNSDVDKLFIQLVQTYNQLFEENPINASGVDAKAILSARLSKSRRLENLIAQLPGEKKNGLFGNLIALSLGLTPNFKSNFDLAEDAKLQLSKDTYDDDLDNLLAQIGDQYADLFLAAKNLSDAILLSDILRVNTEITKAPLSASMIKRYDEHHQDLTLLKALVRQQLPEKYKEIFFDQSKNGYAGYIDGGASQEEFYKFIKPILEKMDGTEELLVKLNREDLLRKQRTFDNGSIPHQIHLGELHAILRRQEDFYPFLKDNREKIEKILTFRIPYYVGPLARGNSRFAWMTRKSEETITPWNFEEVVDKGASAQSFIERMTNFDKNLPNEKVLPKHSLLYEYFTVYNELTKVKYVTEGMRKPAFLSGEQKKAIVDLLFKTNRKVTVKQLKEDYFKKIECFDSVEISGVEDRFNASLGTYHDLLKIIKDKDFLDNEENEDILEDIVLTLTLFEDREMIEERLKTYAHLFDDKVMKQLKRRRYTGWGRLSRKLINGIRDKQSGKTILDFLKSDGFANRNFMQLIHDDSLTFKEDIQKAQVSGQGDSLHEHIANLAGSPAIKKGILQTVKVVDELVKVMGRHKPENIVIEMARENQTTQKGQKNSRERMKRIEEGIKELGSQILKEHPVENTQLQNEKLYLYYLQNGRDMYVDQELDINRLSDYDVDHIVPQSFLKDDSIDNKVLTRSDKARGKSDNVPSEEVVKKMKNYWRQLLNAKLITQRKFDNLTKAERGGLSELDKAGFIKRQLVETRQITKHVAQILDSRMNTKYDENDKLIREVKVITLKSKLVSDFRKDFQFYKVREINNYHHAHDAYLNAVVGTALIKKYPKLESEFVYGDYKVYDVRKMIAKSEQEIGKATAKYFFYSNIMNFFKTEITLANGEIRKRPLIETNGETGEIVWDKGRDFATVRKVLSMPQVNIVKKTEVQTGGFSKESILPKRNSDKLIARKKDWDPKKYGGFDSPTVAYSVLVVAKVEKGKSKKLKSVKELLGITIMERSSFEKNPIDFLEAKGYKEVKKDLIIKLPKYSLFELENGRKRMLASAGELQKGNELALPSKYVNFLYLASHYEKLKGSPEDNEQKQLFVEQHKHYLDEIIEQISEFSKRVILADANLDKVLSAYNKHRDKPIREQAENIIHLFTLTNLGAPAAFKYFDTTIDRKRYTSTKEVLDATLIHQSITGLYETRIDLSQLGGDGGAEAAAKEAAAKEAAAKEAAAKALEAEAAAKEAAAKEAAAKEAAAKAGGTLNIEDEHRLHETSKEPDVSLGSTWLSDFPQAWAETGGMGLAVRQAPLIIPLKATSTPVSIKQYPMSQEARLGIKPHIQRLLDQGILVPCQSPWNTPLLPVKKPGTNDYRPVQDLREVNKRVEDIHPTVPNPYNLLSGLPPSHQWYTVLDLKDAFFCLRLHPTSQPLFAFEWRDPEMGISGQLTWTRLPQGFKNSPTLFNEALHRDLADFRIQHPDLILLQYVDDLLLAATSELDCQQGTRALLQTLGNLGYRASAKKAQICQKQVKYLGYLLKEGQRWLTEARKETVMGQPTPKTPRQLREFLGTAGFCRLWIPGFAEMAAPLYPLTKPGTLFNWGPDQQKAYQEIKQALLTAPALGLPDLTKPFELFVDEKQGYAKGVLTQKLGPWRRPVAYLSKKLDPVAAGWPPCLRMVAAIAVLTKDAGKLTMGQPLVILAPHAVEALVKQPPDRWLSNARMTHYQALLLDTDRVQFGPVVALNPATLLPLPEEGLQHNCLDILAEAHGTRPDLTDQPLPDADHTWYTDGSSLLQEGQRKAGAAVTTETEVIWAKALPAGTSAQRAELIALTQALKMAEGKKLNVYTDSRYAFATAHIHGEIYRRRGWLTSEGKEIKNKDEILALLKALFLPKRLSIIHCPGHQKGHSAEARGNRMADQAARKAAITETPDTSTLLAGKRTADGSEFEKRTADGSEFESPKKKAKVE

SEQ ID NO: 2712 - protein, 2100 aa, synthetic construct
MPAAKRVKLDGGDKKYSIGLDIGTNSVGWAVITDEYKVPSKKFKVLGNTDRHSIKKNLIGALLFDSGETAEATRLKRTARRRYTRRKNRICYLQEIFSNEMAKVDDSFFHRLEESFLVEEDKKHERHPIFGNIVDEVAYHEKYPTIYHLRKKLVDSTDKADLRLIYLALAHMIKFRGHFLIEGDLNPDNSDVDKLFIQLVQTYNQLFEENPINASGVDAKAILSARLSKSRRLENLIAQLPGEKKNGLFGNLIALSLGLTPNFKSNFDLAEDAKLQLSKDTYDDDLDNLLAQIGDQYADLFLAAKNLSDAILLSDILRVNTEITKAPLSASMIKRYDEHHQDLTLLKALVRQQLPEKYKEIFFDQSKNGYAGYIDGGASQEEFYKFIKPILEKMDGTEELLVKLNREDLLRKQRTFDNGSIPHQIHLGELHAILRRQEDFYPFLKDNREKIEKILTFRIPYYVGPLARGNSRFAWMTRKSEETITPWNFEEVVDKGASAQSFIERMTNFDKNLPNEKVLPKHSLLYEYFTVYNELTKVKYVTEGMRKPAFLSGEQKKAIVDLLFKTNRKVTVKQLKEDYFKKIECFDSVEISGVEDRFNASLGTYHDLLKIIKDKDFLDNEENEDILEDIVLTLTLFEDREMIEERLKTYAHLFDDKVMKQLKRRRYTGWGRLSRKLINGIRDKQSGKTILDFLKSDGFANRNFMQLIHDDSLTFKEDIQKAQVSGQGDSLHEHIANLAGSPAIKKGILQTVKVVDELVKVMGRHKPENIVIEMARENQTTQKGQKNSRERMKRIEEGIKELGSQILKEHPVENTQLQNEKLYLYYLQNGRDMYVDQELDINRLSDYDVDHIVPQSFLKDDSIDNKVLTRSDKARGKSDNVPSEEVVKKMKNYWRQLLNAKLITQRKFDNLTKAERGGLSELDKAGFIKRQLVETRQITKHVAQILDSRMNTKYDENDKLIREVKVITLKSKLVSDFRKDFQFYKVREINNYHHAHDAYLNAVVGTALIKKYPKLESEFVYGDYKVYDVRKMIAKSEQEIGKATAKYFFYSNIMNFFKTEITLANGEIRKRPLIETNGETGEIVWDKGRDFATVRKVLSMPQVNIVKKTEVQTGGFSKESILPKRNSDKLIARKKDWDPKKYGGFDSPTVAYSVLVVAKVEKGKSKKLKSVKELLGITIMERSSFEKNPIDFLEAKGYKEVKKDLIIKLPKYSLFELENGRKRMLASAGELQKGNELALPSKYVNFLYLASHYEKLKGSPEDNEQKQLFVEQHKHYLDEIIEQISEFSKRVILADANLDKVLSAYNKHRDKPIREQAENIIHLFTLTNLGAPAAFKYFDTTIDRKRYTSTKEVLDATLIHQSITGLYETRIDLSQLGGDGGEAAAKGGGGSEAAAKGGTLNIEDEHRLHETSKEPDVSLGSTWLSDFPQAWAETGGMGLAVRQAPLIIPLKATSTPVSIKQYPMSQEARLGIKPHIQRLLDQGILVPCQSPWNTPLLPVKKPGTNDYRPVQDLREVNKRVEDIHPTVPNPYNLLSGLPPSHQWYTVLDLKDAFFCLRLHPTSQPLFAFEWRDPEMGISGQLTWTRLPQGFKNSPTLFNEALHRDLADFRIQHPDLILLQYVDDLLLAATSELDCQQGTRALLQTLGNLGYRASAKKAQICQKQVKYLGYLLKEGQRWLTEARKETVMGQPTPKTPRQLREFLGTAGFCRLWIPGFAEMAAPLYPLTKPGTLFNWGPDQQKAYQEIKQALLTAPALGLPDLTKPFELFVDEKQGYAKGVLTQKLGPWRRPVAYLSKKLDPVAAGWPPCLRMVAAIAVLTKDAGKLTMGQPLVILAPHAVEALVKQPPDRWLSNARMTHYQALLLDTDRVQFGPVVALNPATLLPLPEEGLQHNCLDILAEAHGTRPDLTDQPLPDADHTWYTDGSSLLQEGQRKAGAAVTTETEVIWAKALPAGTSAQRAELIALTQALKMAEGKKLNVYTDSRYAFATAHIHGEIYRRRGWLTSEGKEIKNKDEILALLKALFLPKRLSIIHCPGHQKGHSAEARGNRMADQAARKAAITETPDTSTLLAGKRTADGSEFEKRTADGSEFESPKKKAKVE

SEQ ID NO: 2713 - protein, 2096 aa, synthetic construct
MPAAKRVKLDGGDKKYSIGLDIGTNSVGWAVITDEYKVPSKKFKVLGNTDRHSIKKNLIGALLFDSGETAEATRLKRTARRRYTRRKNRICYLQEIFSNEMAKVDDSFFHRLEESFLVEEDKKHERHPIFGNIVDEVAYHEKYPTIYHLRKKLVDSTDKADLRLIYLALAHMIKFRGHFLIEGDLNPDNSDVDKLFIQLVQTYNQLFEENPINASGVDAKAILSARLSKSRRLENLIAQLPGEKKNGLFGNLIALSLGLTPNFKSNFDLAEDAKLQLSKDTYDDDLDNLLAQIGDQYADLFLAAKNLSDAILLSDILRVNTEITKAPLSASMIKRYDEHHQDLTLLKALVRQQLPEKYKEIFFDQSKNGYAGYIDGGASQEEFYKFIKPILEKMDGTEELLVKLNREDLLRKQRTFDNGSIPHQIHLGELHAILRRQEDFYPFLKDNREKIEKILTFRIPYYVGPLARGNSRFAWMTRKSEETITPWNFEEVVDKGASAQSFIERMTNFDKNLPNEKVLPKHSLLYEYFTVYNELTKVKYVTEGMRKPAFLSGEQKKAIVDLLFKTNRKVTVKQLKEDYFKKIECFDSVEISGVEDRFNASLGTYHDLLKIIKDKDFLDNEENEDILEDIVLTLTLFEDREMIEERLKTYAHLFDDKVMKQLKRRRYTGWGRLSRKLINGIRDKQSGKTILDFLKSDGFANRNFMQLIHDDSLTFKEDIQKAQVSGQGDSLHEHIANLAGSPAIKKGILQTVKVVDELVKVMGRHKPENIVIEMARENQTTQKGQKNSRERMKRIEEGIKELGSQILKEHPVENTQLQNEKLYLYYLQNGRDMYVDQELDINRLSDYDVDHIVPQSFLKDDSIDNKVLTRSDKARGKSDNVPSEEVVKKMKNYWRQLLNAKLITQRKFDNLTKAERGGLSELDKAGFIKRQLVETRQITKHVAQILDSRMNTKYDENDKLIREVKVITLKSKLVSDFRKDFQFYKVREINNYHHAHDAYLNAVVGTALIKKYPKLESEFVYGDYKVYDVRKMIAKSEQEIGKATAKYFFYSNIMNFFKTEITLANGEIRKRPLIETNGETGEIVWDKGRDFATVRKVLSMPQVNIVKKTEVQTGGFSKESILPKRNSDKLIARKKDWDPKKYGGFDSPTVAYSVLVVAKVEKGKSKKLKSVKELLGITIMERSSFEKNPIDFLEAKGYKEVKKDLIIKLPKYSLFELENGRKRMLASAGELQKGNELALPSKYVNFLYLASHYEKLKGSPEDNEQKQLFVEQHKHYLDEIIEQISEFSKRVILADANLDKVLSAYNKHRDKPIREQAENIIHLFTLTNLGAPAAFKYFDTTIDRKRYTSTKEVLDATLIHQSITGLYETRIDLSQLGGDGGGGSEAAAKGGGGGTLNIEDEHRLHETSKEPDVSLGSTWLSDFPQAWAETGGMGLAVRQAPLIIPLKATSTPVSIKQYPMSQEARLGIKPHIQRLLDQGILVPCQSPWNTPLLPVKKPGTNDYRPVQDLREVNKRVEDIHPTVPNPYNLLSGLPPSHQWYTVLDLKDAFFCLRLHPTSQPLFAFEWRDPEMGISGQLTWTRLPQGFKNSPTLFNEALHRDLADFRIQHPDLILLQYVDDLLLAATSELDCQQGTRALLQTLGNLGYRASAKKAQICQKQVKYLGYLLKEGQRWLTEARKETVMGQPTPKTPRQLREFLGTAGFCRLWIPGFAEMAAPLYPLTKPGTLFNWGPDQQKAYQEIKQALLTAPALGLPDLTKPFELFVDEKQGYAKGVLTQKLGPWRRPVAYLSKKLDPVAAGWPPCLRMVAAIAVLTKDAGKLTMGQPLVILAPHAVEALVKQPPDRWLSNARMTHYQALLLDTDRVQFGPVVALNPATLLPLPEEGLQHNCLDILAEAHGTRPDLTDQPLPDADHTWYTDGSSLLQEGQRKAGAAVTTETEVIWAKALPAGTSAQRAELIALTQALKMAEGKKLNVYTDSRYAFATAHIHGEIYRRRGWLTSEGKEIKNKDEILALLKALFLPKRLSIIHCPGHQKGHSAEARGNRMADQAARKAAITETPDTSTLLAGKRTADGSEFEKRTADGSEFESPKKKAKVE

SEQ ID NO: 2714 - protein, 2096 aa, synthetic construct
MPAAKRVKLDGGDKKYSIGLDIGTNSVGWAVITDEYKVPSKKFKVLGNTDRHSIKKNLIGALLFDSGETAEATRLKRTARRRYTRRKNRICYLQEIFSNEMAKVDDSFFHRLEESFLVEEDKKHERHPIFGNIVDEVAYHEKYPTIYHLRKKLVDSTDKADLRLIYLALAHMIKFRGHFLIEGDLNPDNSDVDKLFIQLVQTYNQLFEENPINASGVDAKAILSARLSKSRRLENLIAQLPGEKKNGLFGNLIALSLGLTPNFKSNFDLAEDAKLQLSKDTYDDDLDNLLAQIGDQYADLFLAAKNLSDAILLSDILRVNTEITKAPLSASMIKRYDEHHQDLTLLKALVRQQLPEKYKEIFFDQSKNGYAGYIDGGASQEEFYKFIKPILEKMDGTEELLVKLNREDLLRKQRTFDNGSIPHQIHLGELHAILRRQEDFYPFLKDNREKIEKILTFRIPYYVGPLARGNSRFAWMTRKSEETITPWNFEEVVDKGASAQSFIERMTNFDKNLPNEKVLPKHSLLYEYFTVYNELTKVKYVTEGMRKPAFLSGEQKKAIVDLLFKTNRKVTVKQLKEDYFKKIECFDSVEISGVEDRFNASLGTYHDLLKIIKDKDFLDNEENEDILEDIVLTLTLFEDREMIEERLKTYAHLFDDKVMKQLKRRRYTGWGRLSRKLINGIRDKQSGKTILDFLKSDGFANRNFMQLIHDDSLTFKEDIQKAQVSGQGDSLHEHIANLAGSPAIKKGILQTVKVVDELVKVMGRHKPENIVIEMARENQTTQKGQKNSRERMKRIEEGIKELGSQILKEHPVENTQLQNEKLYLYYLQNGRDMYVDQELDINRLSDYDVDHIVPQSFLKDDSIDNKVLTRSDKARGKSDNVPSEEVVKKMKNYWRQLLNAKLITQRKFDNLTKAERGGLSELDKAGFIKRQLVETRQITKHVAQILDSRMNTKYDENDKLIREVKVITLKSKLVSDFRKDFQFYKVREINNYHHAHDAYLNAVVGTALIKKYPKLESEFVYGDYKVYDVRKMIAKSEQEIGKATAKYFFYSNIMNFFKTEITLANGEIRKRPLIETNGETGEIVWDKGRDFATVRKVLSMPQVNIVKKTEVQTGGFSKESILPKRNSDKLIARKKDWDPKKYGGFDSPTVAYSVLVVAKVEKGKSKKLKSVKELLGITIMERSSFEKNPIDFLEAKGYKEVKKDLIIKLPKYSLFELENGRKRMLASAGELQKGNELALPSKYVNFLYLASHYEKLKGSPEDNEQKQLFVEQHKHYLDEIIEQISEFSKRVILADANLDKVLSAYNKHRDKPIREQAENIIHLFTLTNLGAPAAFKYFDTTIDRKRYTSTKEVLDATLIHQSITGLYETRIDLSQLGGDGGEAAAKPAPGGSGGTLNIEDEHRLHETSKEPDVSLGSTWLSDFPQAWAETGGMGLAVRQAPLIIPLKATSTPVSIKQYPMSQEARLGIKPHIQRLLDQGILVPCQSPWNTPLLPVKKPGTNDYRPVQDLREVNKRVEDIHPTVPNPYNLLSGLPPSHQWYTVLDLKDAFFCLRLHPTSQPLFAFEWRDPEMGISGQLTWTRLPQGFKNSPTLFNEALHRDLADFRIQHPDLILLQYVDDLLLAATSELDCQQGTRALLQTLGNLGYRASAKKAQICQKQVKYLGYLLKEGQRWLTEARKETVMGQPTPKTPRQLREFLGTAGFCRLWIPGFAEMAAPLYPLTKPGTLFNWGPDQQKAYQEIKQALLTAPALGLPDLTKPFELFVDEKQGYAKGVLTQKLGPWRRPVAYLSKKLDPVAAGWPPCLRMVAAIAVLTKDAGKLTMGQPLVILAPHAVEALVKQPPDRWLSNARMTHYQALLLDTDRVQFGPVVALNPATLLPLPEEGLQHNCLDILAEAHGTRPDLTDQPLPDADHTWYTDGSSLLQEGQRKAGAAVTTETEVIWAKALPAGTSAQRAELIALTQALKMAEGKKLNVYTDSRYAFATAHIHGEIYRRRGWLTSEGKEIKNKDEILALLKALFLPKRLSIIHCPGHQKGHSAEARGNRMADQAARKAAITETPDTSTLLAGKRTADGSEFEKRTADGSEFESPKKKAKVE

SEQ ID NO: 2715 - protein, 2094 aa, synthetic construct
MPAAKRVKLDGGDKKYSIGLDIGTNSVGWAVITDEYKVPSKKFKVLGNTDRHSIKKNLIGALLFDSGETAEATRLKRTARRRYTRRKNRICYLQEIFSNEMAKVDDSFFHRLEESFLVEEDKKHERHPIFGNIVDEVAYHEKYPTIYHLRKKLVDSTDKADLRLIYLALAHMIKFRGHFLIEGDLNPDNSDVDKLFIQLVQTYNQLFEENPINASGVDAKAILSARLSKSRRLENLIAQLPGEKKNGLFGNLIALSLGLTPNFKSNFDLAEDAKLQLSKDTYDDDLDNLLAQIGDQYADLFLAAKNLSDAILLSDILRVNTEITKAPLSASMIKRYDEHHQDLTLLKALVRQQLPEKYKEIFFDQSKNGYAGYIDGGASQEEFYKFIKPILEKMDGTEELLVKLNREDLLRKQRTFDNGSIPHQIHLGELHAILRRQEDFYPFLKDNREKIEKILTFRIPYYVGPLARGNSRFAWMTRKSEETITPWNFEEVVDKGASAQSFIERMTNFDKNLPNEKVLPKHSLLYEYFTVYNELTKVKYVTEGMRKPAFLSGEQKKAIVDLLFKTNRKVTVKQLKEDYFKKIECFDSVEISGVEDRFNASLGTYHDLLKIIKDKDFLDNEENEDILEDIVLTLTLFEDREMIEERLKTYAHLFDDKVMKQLKRRRYTGWGRLSRKLINGIRDKQSGKTILDFLKSDGFANRNFMQLIHDDSLTFKEDIQKAQVSGQGDSLHEHIANLAGSPAIKKGILQTVKVVDELVKVMGRHKPENIVIEMARENQTTQKGQKNSRERMKRIEEGIKELGSQILKEHPVENTQLQNEKLYLYYLQNGRDMYVDQELDINRLSDYDVDHIVPQSFLKDDSIDNKVLTRSDKARGKSDNVPSEEVVKKMKNYWRQLLNAKLITQRKFDNLTKAERGGLSELDKAGFIKRQLVETRQITKHVAQILDSRMNTKYDENDKLIREVKVITLKSKLVSDFRKDFQFYKVREINNYHHAHDAYLNAVVGTALIKKYPKLESEFVYGDYKVYDVRKMIAKSEQEIGKATAKYFFYSNIMNFFKTEITLANGEIRKRPLIETNGETGEIVWDKGRDFATVRKVLSMPQVNIVKKTEVQTGGFSKESILPKRNSDKLIARKKDWDPKKYGGFDSPTVAYSVLVVAKVEKGKSKKLKSVKELLGITIMERSSFEKNPIDFLEAKGYKEVKKDLIIKLPKYSLFELENGRKRMLASAGELQKGNELALPSKYVNFLYLASHYEKLKGSPEDNEQKQLFVEQHKHYLDEIIEQISEFSKRVILADANLDKVLSAYNKHRDKPIREQAENIIHLFTLTNLGAPAAFKYFDTTIDRKRYTSTKEVLDATLIHQSITGLYETRIDLSQLGGDGGGSSGGGGGSGGTLNIEDEHRLHETSKEPDVSLGSTWLSDFPQAWAETGGMGLAVRQAPLIIPLKATSTPVSIKQYPMSQEARLGIKPHIQRLLDQGILVPCQSPWNTPLLPVKKPGTNDYRPVQDLREVNKRVEDIHPTVPNPYNLLSGLPPSHQWYTVLDLKDAFFCLRLHPTSQPLFAFEWRDPEMGISGQLTWTRLPQGFKNSPTLFNEALHRDLADFRIQHPDLILLQYVDDLLLAATSELDCQQGTRALLQTLGNLGYRASAKKAQICQKQVKYLGYLLKEGQRWLTEARKETVMGQPTPKTPRQLREFLGTAGFCRLWIPGFAEMAAPLYPLTKPGTLFNWGPDQQKAYQEIKQALLTAPALGLPDLTKPFELFVDEKQGYAKGVLTQKLGPWRRPVAYLSKKLDPVAAGWPPCLRMVAAIAVLTKDAGKLTMGQPLVILAPHAVEALVKQPPDRWLSNARMTHYQALLLDTDRVQFGPVVALNPATLLPLPEEGLQHNCLDILAEAHGTRPDLTDQPLPDADHTWYTDGSSLLQEGQRKAGAAVTTETEVIWAKALPAGTSAQRAELIALTQALKMAEGKKLNVYTDSRYAFATAHIHGEIYRRRGWLTSEGKEIKNKDEILALLKALFLPKRLSIIHCPGHQKGHSAEARGNRMADQAARKAAITETPDTSTLLAGKRTADGSEFEKRTADGSEFESPKKKAKVE

SEQ ID NO: 2716 - protein, 2110 aa, synthetic construct
MPAAKRVKLDGGDKKYSIGLDIGTNSVGWAVITDEYKVPSKKFKVLGNTDRHSIKKNLIGALLFDSGETAEATRLKRTARRRYTRRKNRICYLQEIFSNEMAKVDDSFFHRLEESFLVEEDKKHERHPIFGNIVDEVAYHEKYPTIYHLRKKLVDSTDKADLRLIYLALAHMIKFRGHFLIEGDLNPDNSDVDKLFIQLVQTYNQLFEENPINASGVDAKAILSARLSKSRRLENLIAQLPGEKKNGLFGNLIALSLGLTPNFKSNFDLAEDAKLQLSKDTYDDDLDNLLAQIGDQYADLFLAAKNLSDAILLSDILRVNTEITKAPLSASMIKRYDEHHQDLTLLKALVRQQLPEKYKEIFFDQSKNGYAGYIDGGASQEEFYKFIKPILEKMDGTEELLVKLNREDLLRKQRTFDNGSIPHQIHLGELHAILRRQEDFYPFLKDNREKIEKILTFRIPYYVGPLARGNSRFAWMTRKSEETITPWNFEEVVDKGASAQSFIERMTNFDKNLPNEKVLPKHSLLYEYFTVYNELTKVKYVTEGMRKPAFLSGEQKKAIVDLLFKTNRKVTVKQLKEDYFKKIECFDSVEISGVEDRFNASLGTYHDLLKIIKDKDFLDNEENEDILEDIVLTLTLFEDREMIEERLKTYAHLFDDKVMKQLKRRRYTGWGRLSRKLINGIRDKQSGKTILDFLKSDGFANRNFMQLIHDDSLTFKEDIQKAQVSGQGDSLHEHIANLAGSPAIKKGILQTVKVVDELVKVMGRHKPENIVIEMARENQTTQKGQKNSRERMKRIEEGIKELGSQILKEHPVENTQLQNEKLYLYYLQNGRDMYVDQELDINRLSDYDVDHIVPQSFLKDDSIDNKVLTRSDKARGKSDNVPSEEVVKKMKNYWRQLLNAKLITQRKFDNLTKAERGGLSELDKAGFIKRQLVETRQITKHVAQILDSRMNTKYDENDKLIREVKVITLKSKLVSDFRKDFQFYKVREINNYHHAHDAYLNAVVGTALIKKYPKLESEFVYGDYKVYDVRKMIAKSEQEIGKATAKYFFYSNIMNFFKTEITLANGEIRKRPLIETNGETGEIVWDKGRDFATVRKVLSMPQVNIVKKTEVQTGGFSKESILPKRNSDKLIARKKDWDPKKYGGFDSPTVAYSVLVVAKVEKGKSKKLKSVKELLGITIMERSSFEKNPIDFLEAKGYKEVKKDLIIKLPKYSLFELENGRKRMLASAGELQKGNELALPSKYVNFLYLASHYEKLKGSPEDNEQKQLFVEQHKHYLDEIIEQISEFSKRVILADANLDKVLSAYNKHRDKPIREQAENIIHLFTLTNLGAPAAFKYFDTTIDRKRYTSTKEVLDATLIHQSITGLYETRIDLSQLGGDGGEAAAKEAAAKEAAAKEAAAKEAAAKGGTLNIEDEHRLHETSKEPDVSLGSTWLSDFPQAWAETGGMGLAVRQAPLIIPLKATSTPVSIKQYPMSQEARLGIKPHIQRLLDQGILVPCQSPWNTPLLPVKKPGTNDYRPVQDLREVNKRVEDIHPTVPNPYNLLSGLPPSHQWYTVLDLKDAFFCLRLHPTSQPLFAFEWRDPEMGISGQLTWTRLPQGFKNSPTLFNEALHRDLADFRIQHPDLILLQYVDDLLLAATSELDCQQGTRALLQTLGNLGYRASAKKAQICQKQVKYLGYLLKEGQRWLTEARKETVMGQPTPKTPRQLREFLGTAGFCRLWIPGFAEMAAPLYPLTKPGTLFNWGPDQQKAYQEIKQALLTAPALGLPDLTKPFELFVDEKQGYAKGVLTQKLGPWRRPVAYLSKKLDPVAAGWPPCLRMVAAIAVLTKDAGKLTMGQPLVILAPHAVEALVKQPPDRWLSNARMTHYQALLLDTDRVQFGPVVALNPATLLPLPEEGLQHNCLDILAEAHGTRPDLTDQPLPDADHTWYTDGSSLLQEGQRKAGAAVTTETEVIWAKALPAGTSAQRAELIALTQALKMAEGKKLNVYTDSRYAFATAHIHGEIYRRRGWLTSEGKEIKNKDEILALLKALFLPKRLSIIHCPGHQKGHSAEARGNRMADQAARKAAITETPDTSTLLAGKRTADGSEFEKRTADGSEFESPKKKAKVE

SEQ ID NO: 2717 - skipped

SEQ ID NO: 2718 - protein, 2093 aa, synthetic construct
MPAAKRVKLDGGDKKYSIGLDIGTNSVGWAVITDEYKVPSKKFKVLGNTDRHSIKKNLIGALLFDSGETAEATRLKRTARRRYTRRKNRICYLQEIFSNEMAKVDDSFFHRLEESFLVEEDKKHERHPIFGNIVDEVAYHEKYPTIYHLRKKLVDSTDKADLRLIYLALAHMIKFRGHFLIEGDLNPDNSDVDKLFIQLVQTYNQLFEENPINASGVDAKAILSARLSKSRRLENLIAQLPGEKKNGLFGNLIALSLGLTPNFKSNFDLAEDAKLQLSKDTYDDDLDNLLAQIGDQYADLFLAAKNLSDAILLSDILRVNTEITKAPLSASMIKRYDEHHQDLTLLKALVRQQLPEKYKEIFFDQSKNGYAGYIDGGASQEEFYKFIKPILEKMDGTEELLVKLNREDLLRKQRTFDNGSIPHQIHLGELHAILRRQEDFYPFLKDNREKIEKILTFRIPYYVGPLARGNSRFAWMTRKSEETITPWNFEEVVDKGASAQSFIERMTNFDKNLPNEKVLPKHSLLYEYFTVYNELTKVKYVTEGMRKPAFLSGEQKKAIVDLLFKTNRKVTVKQLKEDYFKKIECFDSVEISGVEDRFNASLGTYHDLLKIIKDKDFLDNEENEDILEDIVLTLTLFEDREMIEERLKTYAHLFDDKVMKQLKRRRYTGWGRLSRKLINGIRDKQSGKTILDFLKSDGFANRNFMQLIHDDSLTFKEDIQKAQVSGQGDSLHEHIANLAGSPAIKKGILQTVKVVDELVKVMGRHKPENIVIEMARENQTTQKGQKNSRERMKRIEEGIKELGSQILKEHPVENTQLQNEKLYLYYLQNGRDMYVDQELDINRLSDYDVDHIVPQSFLKDDSIDNKVLTRSDKARGKSDNVPSEEVVKKMKNYWRQLLNAKLITQRKFDNLTKAERGGLSELDKAGFIKRQLVETRQITKHVAQILDSRMNTKYDENDKLIREVKVITLKSKLVSDFRKDFQFYKVREINNYHHAHDAYLNAVVGTALIKKYPKLESEFVYGDYKVYDVRKMIAKSEQEIGKATAKYFFYSNIMNFFKTEITLANGEIRKRPLIETNGETGEIVWDKGRDFATVRKVLSMPQVNIVKKTEVQTGGFSKESILPKRNSDKLIARKKDWDPKKYGGFDSPTVAYSVLVVAKVEKGKSKKLKSVKELLGITIMERSSFEKNPIDFLEAKGYKEVKKDLIIKLPKYSLFELENGRKRMLASAGELQKGNELALPSKYVNFLYLASHYEKLKGSPEDNEQKQLFVEQHKHYLDEIIEQISEFSKRVILADANLDKVLSAYNKHRDKPIREQAENIIHLFTLTNLGAPAAFKYFDTTIDRKRYTSTKEVLDATLIHQSITGLYETRIDLSQLGGDGGGSSEAAAKGGTLNIEDEHRLHETSKEPDVSLGSTWLSDFPQAWAETGGMGLAVRQAPLIIPLKATSTPVSIKQYPMSQEARLGIKPHIQRLLDQGILVPCQSPWNTPLLPVKKPGTNDYRPVQDLREVNKRVEDIHPTVPNPYNLLSGLPPSHQWYTVLDLKDAFFCLRLHPTSQPLFAFEWRDPEMGISGQLTWTRLPQGFKNSPTLFNEALHRDLADFRIQHPDLILLQYVDDLLLAATSELDCQQGTRALLQTLGNLGYRASAKKAQICQKQVKYLGYLLKEGQRWLTEARKETVMGQPTPKTPRQLREFLGTAGFCRLWIPGFAEMAAPLYPLTKPGTLFNWGPDQQKAYQEIKQALLTAPALGLPDLTKPFELFVDEKQGYAKGVLTQKLGPWRRPVAYLSKKLDPVAAGWPPCLRMVAAIAVLTKDAGKLTMGQPLVILAPHAVEALVKQPPDRWLSNARMTHYQALLLDTDRVQFGPVVALNPATLLPLPEEGLQHNCLDILAEAHGTRPDLTDQPLPDADHTWYTDGSSLLQEGQRKAGAAVTTETEVIWAKALPAGTSAQRAELIALTQALKMAEGKKLNVYTDSRYAFATAHIHGEIYRRRGWLTSEGKEIKNKDEILALLKALFLPKRLSIIHCPGHQKGHSAEARGNRMADQAARKAAITETPDTSTLLAGKRTADGSEFEKRTADGSEFESPKKKAKVE

SEQ ID NO: 2719 - protein, 2096 aa, synthetic construct
MPAAKRVKLDGGDKKYSIGLDIGTNSVGWAVITDEYKVPSKKFKVLGNTDRHSIKKNLIGALLFDSGETAEATRLKRTARRRYTRRKNRICYLQEIFSNEMAKVDDSFFHRLEESFLVEEDKKHERHPIFGNIVDEVAYHEKYPTIYHLRKKLVDSTDKADLRLIYLALAHMIKFRGHFLIEGDLNPDNSDVDKLFIQLVQTYNQLFEENPINASGVDAKAILSARLSKSRRLENLIAQLPGEKKNGLFGNLIALSLGLTPNFKSNFDLAEDAKLQLSKDTYDDDLDNLLAQIGDQYADLFLAAKNLSDAILLSDILRVNTEITKAPLSASMIKRYDEHHQDLTLLKALVRQQLPEKYKEIFFDQSKNGYAGYIDGGASQEEFYKFIKPILEKMDGTEELLVKLNREDLLRKQRTFDNGSIPHQIHLGELHAILRRQEDFYPFLKDNREKIEKILTFRIPYYVGPLARGNSRFAWMTRKSEETITPWNFEEVVDKGASAQSFIERMTNFDKNLPNEKVLPKHSLLYEYFTVYNELTKVKYVTEGMRKPAFLSGEQKKAIVDLLFKTNRKVTVKQLKEDYFKKIECFDSVEISGVEDRFNASLGTYHDLLKIIKDKDFLDNEENEDILEDIVLTLTLFEDREMIEERLKTYAHLFDDKVMKQLKRRRYTGWGRLSRKLINGIRDKQSGKTILDFLKSDGFANRNFMQLIHDDSLTFKEDIQKAQVSGQGDSLHEHIANLAGSPAIKKGILQTVKVVDELVKVMGRHKPENIVIEMARENQTTQKGQKNSRERMKRIEEGIKELGSQILKEHPVENTQLQNEKLYLYYLQNGRDMYVDQELDINRLSDYDVDHIVPQSFLKDDSIDNKVLTRSDKARGKSDNVPSEEVVKKMKNYWRQLLNAKLITQRKFDNLTKAERGGLSELDKAGFIKRQLVETRQITKHVAQILDSRMNTKYDENDKLIREVKVITLKSKLVSDFRKDFQFYKVREINNYHHAHDAYLNAVVGTALIKKYPKLESEFVYGDYKVYDVRKMIAKSEQEIGKATAKYFFYSNIMNFFKTEITLANGEIRKRPLIETNGETGEIVWDKGRDFATVRKVLSMPQVNIVKKTEVQTGGFSKESILPKRNSDKLIARKKDWDPKKYGGFDSPTVAYSVLVVAKVEKGKSKKLKSVKELLGITIMERSSFEKNPIDFLEAKGYKEVKKDLIIKLPKYSLFELENGRKRMLASAGELQKGNELALPSKYVNFLYLASHYEKLKGSPEDNEQKQLFVEQHKHYLDEIIEQISEFSKRVILADANLDKVLSAYNKHRDKPIREQAENIIHLFTLTNLGAPAAFKYFDTTIDRKRYTSTKEVLDATLIHQSITGLYETRIDLSQLGGDGGGGGEAAAKPAPGGTLNIEDEHRLHETSKEPDVSLGSTWLSDFPQAWAETGGMGLAVRQAPLIIPLKATSTPVSIKQYPMSQEARLGIKPHIQRLLDQGILVPCQSPWNTPLLPVKKPGTNDYRPVQDLREVNKRVEDIHPTVPNPYNLLSGLPPSHQWYTVLDLKDAFFCLRLHPTSQPLFAFEWRDPEMGISGQLTWTRLPQGFKNSPTLFNEALHRDLADFRIQHPDLILLQYVDDLLLAATSELDCQQGTRALLQTLGNLGYRASAKKAQICQKQVKYLGYLLKEGQRWLTEARKETVMGQPTPKTPRQLREFLGTAGFCRLWIPGFAEMAAPLYPLTKPGTLFNWGPDQQKAYQEIKQALLTAPALGLPDLTKPFELFVDEKQGYAKGVLTQKLGPWRRPVAYLSKKLDPVAAGWPPCLRMVAAIAVLTKDAGKLTMGQPLVILAPHAVEALVKQPPDRWLSNARMTHYQALLLDTDRVQFGPVVALNPATLLPLPEEGLQHNCLDILAEAHGTRPDLTDQPLPDADHTWYTDGSSLLQEGQRKAGAAVTTETEVIWAKALPAGTSAQRAELIALTQALKMAEGKKLNVYTDSRYAFATAHIHGEIYRRRGWLTSEGKEIKNKDEILALLKALFLPKRLSIIHCPGHQKGHSAEARGNRMADQAARKAAITETPDTSTLLAGKRTADGSEFEKRTADGSEFESPKKKAKVE

SEQ ID NO: 2720 - skipped

SEQ ID NO: 2721 - protein, 2096 aa, synthetic construct
MPAAKRVKLDGGDKKYSIGLDIGTNSVGWAVITDEYKVPSKKFKVLGNTDRHSIKKNLIGALLFDSGETAEATRLKRTARRRYTRRKNRICYLQEIFSNEMAKVDDSFFHRLEESFLVEEDKKHERHPIFGNIVDEVAYHEKYPTIYHLRKKLVDSTDKADLRLIYLALAHMIKFRGHFLIEGDLNPDNSDVDKLFIQLVQTYNQLFEENPINASGVDAKAILSARLSKSRRLENLIAQLPGEKKNGLFGNLIALSLGLTPNFKSNFDLAEDAKLQLSKDTYDDDLDNLLAQIGDQYADLFLAAKNLSDAILLSDILRVNTEITKAPLSASMIKRYDEHHQDLTLLKALVRQQLPEKYKEIFFDQSKNGYAGYIDGGASQEEFYKFIKPILEKMDGTEELLVKLNREDLLRKQRTFDNGSIPHQIHLGELHAILRRQEDFYPFLKDNREKIEKILTFRIPYYVGPLARGNSRFAWMTRKSEETITPWNFEEVVDKGASAQSFIERMTNFDKNLPNEKVLPKHSLLYEYFTVYNELTKVKYVTEGMRKPAFLSGEQKKAIVDLLFKTNRKVTVKQLKEDYFKKIECFDSVEISGVEDRFNASLGTYHDLLKIIKDKDFLDNEENEDILEDIVLTLTLFEDREMIEERLKTYAHLFDDKVMKQLKRRRYTGWGRLSRKLINGIRDKQSGKTILDFLKSDGFANRNFMQLIHDDSLTFKEDIQKAQVSGQGDSLHEHIANLAGSPAIKKGILQTVKVVDELVKVMGRHKPENIVIEMARENQTTQKGQKNSRERMKRIEEGIKELGSQILKEHPVENTQLQNEKLYLYYLQNGRDMYVDQELDINRLSDYDVDHIVPQSFLKDDSIDNKVLTRSDKARGKSDNVPSEEVVKKMKNYWRQLLNAKLITQRKFDNLTKAERGGLSELDKAGFIKRQLVETRQITKHVAQILDSRMNTKYDENDKLIREVKVITLKSKLVSDFRKDFQFYKVREINNYHHAHDAYLNAVVGTALIKKYPKLESEFVYGDYKVYDVRKMIAKSEQEIGKATAKYFFYSNIMNFFKTEITLANGEIRKRPLIETNGETGEIVWDKGRDFATVRKVLSMPQVNIVKKTEVQTGGFSKESILPKRNSDKLIARKKDWDPKKYGGFDSPTVAYSVLVVAKVEKGKSKKLKSVKELLGITIMERSSFEKNPIDFLEAKGYKEVKKDLIIKLPKYSLFELENGRKRMLASAGELQKGNELALPSKYVNFLYLASHYEKLKGSPEDNEQKQLFVEQHKHYLDEIIEQISEFSKRVILADANLDKVLSAYNKHRDKPIREQAENIIHLFTLTNLGAPAAFKYFDTTIDRKRYTSTKEVLDATLIHQSITGLYETRIDLSQLGGDGGGGGEAAAKGGSGGTLNIEDEHRLHETSKEPDVSLGSTWLSDFPQAWAETGGMGLAVRQAPLIIPLKATSTPVSIKQYPMSQEARLGIKPHIQRLLDQGILVPCQSPWNTPLLPVKKPGTNDYRPVQDLREVNKRVEDIHPTVPNPYNLLSGLPPSHQWYTVLDLKDAFFCLRLHPTSQPLFAFEWRDPEMGISGQLTWTRLPQGFKNSPTLFNEALHRDLADFRIQHPDLILLQYVDDLLLAATSELDCQQGTRALLQTLGNLGYRASAKKAQICQKQVKYLGYLLKEGQRWLTEARKETVMGQPTPKTPRQLREFLGTAGFCRLWIPGFAEMAAPLYPLTKPGTLFNWGPDQQKAYQEIKQALLTAPALGLPDLTKPFELFVDEKQGYAKGVLTQKLGPWRRPVAYLSKKLDPVAAGWPPCLRMVAAIAVLTKDAGKLTMGQPLVILAPHAVEALVKQPPDRWLSNARMTHYQALLLDTDRVQFGPVVALNPATLLPLPEEGLQHNCLDILAEAHGTRPDLTDQPLPDADHTWYTDGSSLLQEGQRKAGAAVTTETEVIWAKALPAGTSAQRAELIALTQALKMAEGKKLNVYTDSRYAFATAHIHGEIYRRRGWLTSEGKEIKNKDEILALLKALFLPKRLSIIHCPGHQKGHSAEARGNRMADQAARKAAITETPDTSTLLAGKRTADGSEFEKRTADGSEFESPKKKAKVE

SEQ ID NO: 2722 - protein, 2096 aa, synthetic construct
MPAAKRVKLDGGDKKYSIGLDIGTNSVGWAVITDEYKVPSKKFKVLGNTDRHSIKKNLIGALLFDSGETAEATRLKRTARRRYTRRKNRICYLQEIFSNEMAKVDDSFFHRLEESFLVEEDKKHERHPIFGNIVDEVAYHEKYPTIYHLRKKLVDSTDKADLRLIYLALAHMIKFRGHFLIEGDLNPDNSDVDKLFIQLVQTYNQLFEENPINASGVDAKAILSARLSKSRRLENLIAQLPGEKKNGLFGNLIALSLGLTPNFKSNFDLAEDAKLQLSKDTYDDDLDNLLAQIGDQYADLFLAAKNLSDAILLSDILRVNTEITKAPLSASMIKRYDEHHQDLTLLKALVRQQLPEKYKEIFFDQSKNGYAGYIDGGASQEEFYKFIKPILEKMDGTEELLVKLNREDLLRKQRTFDNGSIPHQIHLGELHAILRRQEDFYPFLKDNREKIEKILTFRIPYYVGPLARGNSRFAWMTRKSEETITPWNFEEVVDKGASAQSFIERMTNFDKNLPNEKVLPKHSLLYEYFTVYNELTKVKYVTEGMRKPAFLSGEQKKAIVDLLFKTNRKVTVKQLKEDYFKKIECFDSVEISGVEDRFNASLGTYHDLLKIIKDKDFLDNEENEDILEDIVLTLTLFEDREMIEERLKTYAHLFDDKVMKQLKRRRYTGWGRLSRKLINGIRDKQSGKTILDFLKSDGFANRNFMQLIHDDSLTFKEDIQKAQVSGQGDSLHEHIANLAGSPAIKKGILQTVKVVDELVKVMGRHKPENIVIEMARENQTTQKGQKNSRERMKRIEEGIKELGSQILKEHPVENTQLQNEKLYLYYLQNGRDMYVDQELDINRLSDYDVDHIVPQSFLKDDSIDNKVLTRSDKARGKSDNVPSEEVVKKMKNYWRQLLNAKLITQRKFDNLTKAERGGLSELDKAGFIKRQLVETRQITKHVAQILDSRMNTKYDENDKLIREVKVITLKSKLVSDFRKDFQFYKVREINNYHHAHDAYLNAVVGTALIKKYPKLESEFVYGDYKVYDVRKMIAKSEQEIGKATAKYFFYSNIMNFFKTEITLANGEIRKRPLIETNGETGEIVWDKGRDFATVRKVLSMPQVNIVKKTEVQTGGFSKESILPKRNSDKLIARKKDWDPKKYGGFDSPTVAYSVLVVAKVEKGKSKKLKSVKELLGITIMERSSFEKNPIDFLEAKGYKEVKKDLIIKLPKYSLFELENGRKRMLASAGELQKGNELALPSKYVNFLYLASHYEKLKGSPEDNEQKQLFVEQHKHYLDEIIEQISEFSKRVILADANLDKVLSAYNKHRDKPIREQAENIIHLFTLTNLGAPAAFKYFDTTIDRKRYTSTKEVLDATLIHQSITGLYETRIDLSQLGGDGGGGGGGSEAAAKGGTLNIEDEHRLHETSKEPDVSLGSTWLSDFPQAWAETGGMGLAVRQAPLIIPLKATSTPVSIKQYPMSQEARLGIKPHIQRLLDQGILVPCQSPWNTPLLPVKKPGTNDYRPVQDLREVNKRVEDIHPTVPNPYNLLSGLPPSHQWYTVLDLKDAFFCLRLHPTSQPLFAFEWRDPEMGISGQLTWTRLPQGFKNSPTLFNEALHRDLADFRIQHPDLILLQYVDDLLLAATSELDCQQGTRALLQTLGNLGYRASAKKAQICQKQVKYLGYLLKEGQRWLTEARKETVMGQPTPKTPRQLREFLGTAGFCRLWIPGFAEMAAPLYPLTKPGTLFNWGPDQQKAYQEIKQALLTAPALGLPDLTKPFELFVDEKQGYAKGVLTQKLGPWRRPVAYLSKKLDPVAAGWPPCLRMVAAIAVLTKDAGKLTMGQPLVILAPHAVEALVKQPPDRWLSNARMTHYQALLLDTDRVQFGPVVALNPATLLPLPEEGLQHNCLDILAEAHGTRPDLTDQPLPDADHTWYTDGSSLLQEGQRKAGAAVTTETEVIWAKALPAGTSAQRAELIALTQALKMAEGKKLNVYTDSRYAFATAHIHGEIYRRRGWLTSEGKEIKNKDEILALLKALFLPKRLSIIHCPGHQKGHSAEARGNRMADQAARKAAITETPDTSTLLAGKRTADGSEFEKRTADGSEFESPKKKAKVE

SEQ ID NO: 2723 - protein, 2096 aa, synthetic construct
MPAAKRVKLDGGDKKYSIGLDIGTNSVGWAVITDEYKVPSKKFKVLGNTDRHSIKKNLIGALLFDSGETAEATRLKRTARRRYTRRKNRICYLQEIFSNEMAKVDDSFFHRLEESFLVEEDKKHERHPIFGNIVDEVAYHEKYPTIYHLRKKLVDSTDKADLRLIYLALAHMIKFRGHFLIEGDLNPDNSDVDKLFIQLVQTYNQLFEENPINASGVDAKAILSARLSKSRRLENLIAQLPGEKKNGLFGNLIALSLGLTPNFKSNFDLAEDAKLQLSKDTYDDDLDNLLAQIGDQYADLFLAAKNLSDAILLSDILRVNTEITKAPLSASMIKRYDEHHQDLTLLKALVRQQLPEKYKEIFFDQSKNGYAGYIDGGASQEEFYKFIKPILEKMDGTEELLVKLNREDLLRKQRTFDNGSIPHQIHLGELHAILRRQEDFYPFLKDNREKIEKILTFRIPYYVGPLARGNSRFAWMTRKSEETITPWNFEEVVDKGASAQSFIERMTNFDKNLPNEKVLPKHSLLYEYFTVYNELTKVKYVTEGMRKPAFLSGEQKKAIVDLLFKTNRKVTVKQLKEDYFKKIECFDSVEISGVEDRFNASLGTYHDLLKIIKDKDFLDNEENEDILEDIVLTLTLFEDREMIEERLKTYAHLFDDKVMKQLKRRRYTGWGRLSRKLINGIRDKQSGKTILDFLKSDGFANRNFMQLIHDDSLTFKEDIQKAQVSGQGDSLHEHIANLAGSPAIKKGILQTVKVVDELVKVMGRHKPENIVIEMARENQTTQKGQKNSRERMKRIEEGIKELGSQILKEHPVENTQLQNEKLYLYYLQNGRDMYVDQELDINRLSDYDVDHIVPQSFLKDDSIDNKVLTRSDKARGKSDNVPSEEVVKKMKNYWRQLLNAKLITQRKFDNLTKAERGGLSELDKAGFIKRQLVETRQITKHVAQILDSRMNTKYDENDKLIREVKVITLKSKLVSDFRKDFQFYKVREINNYHHAHDAYLNAVVGTALIKKYPKLESEFVYGDYKVYDVRKMIAKSEQEIGKATAKYFFYSNIMNFFKTEITLANGEIRKRPLIETNGETGEIVWDKGRDFATVRKVLSMPQVNIVKKTEVQTGGFSKESILPKRNSDKLIARKKDWDPKKYGGFDSPTVAYSVLVVAKVEKGKSKKLKSVKELLGITIMERSSFEKNPIDFLEAKGYKEVKKDLIIKLPKYSLFELENGRKRMLASAGELQKGNELALPSKYVNFLYLASHYEKLKGSPEDNEQKQLFVEQHKHYLDEIIEQISEFSKRVILADANLDKVLSAYNKHRDKPIREQAENIIHLFTLTNLGAPAAFKYFDTTIDRKRYTSTKEVLDATLIHQSITGLYETRIDLSQLGGDGGEAAAKGSSPAPGGTLNIEDEHRLHETSKEPDVSLGSTWLSDFPQAWAETGGMGLAVRQAPLIIPLKATSTPVSIKQYPMSQEARLGIKPHIQRLLDQGILVPCQSPWNTPLLPVKKPGTNDYRPVQDLREVNKRVEDIHPTVPNPYNLLSGLPPSHQWYTVLDLKDAFFCLRLHPTSQPLFAFEWRDPEMGISGQLTWTRLPQGFKNSPTLFNEALHRDLADFRIQHPDLILLQYVDDLLLAATSELDCQQGTRALLQTLGNLGYRASAKKAQICQKQVKYLGYLLKEGQRWLTEARKETVMGQPTPKTPRQLREFLGTAGFCRLWIPGFAEMAAPLYPLTKPGTLFNWGPDQQKAYQEIKQALLTAPALGLPDLTKPFELFVDEKQGYAKGVLTQKLGPWRRPVAYLSKKLDPVAAGWPPCLRMVAAIAVLTKDAGKLTMGQPLVILAPHAVEALVKQPPDRWLSNARMTHYQALLLDTDRVQFGPVVALNPATLLPLPEEGLQHNCLDILAEAHGTRPDLTDQPLPDADHTWYTDGSSLLQEGQRKAGAAVTTETEVIWAKALPAGTSAQRAELIALTQALKMAEGKKLNVYTDSRYAFATAHIHGEIYRRRGWLTSEGKEIKNKDEILALLKALFLPKRLSIIHCPGHQKGHSAEARGNRMADQAARKAAITETPDTSTLLAGKRTADGSEFEKRTADGSEFESPKKKAKVE

SEQ ID NO: 2724 - protein, 2093 aa, synthetic construct
MPAAKRVKLDGGDKKYSIGLDIGTNSVGWAVITDEYKVPSKKFKVLGNTDRHSIKKNLIGALLFDSGETAEATRLKRTARRRYTRRKNRICYLQEIFSNEMAKVDDSFFHRLEESFLVEEDKKHERHPIFGNIVDEVAYHEKYPTIYHLRKKLVDSTDKADLRLIYLALAHMIKFRGHFLIEGDLNPDNSDVDKLFIQLVQTYNQLFEENPINASGVDAKAILSARLSKSRRLENLIAQLPGEKKNGLFGNLIALSLGLTPNFKSNFDLAEDAKLQLSKDTYDDDLDNLLAQIGDQYADLFLAAKNLSDAILLSDILRVNTEITKAPLSASMIKRYDEHHQDLTLLKALVRQQLPEKYKEIFFDQSKNGYAGYIDGGASQEEFYKFIKPILEKMDGTEELLVKLNREDLLRKQRTFDNGSIPHQIHLGELHAILRRQEDFYPFLKDNREKIEKILTFRIPYYVGPLARGNSRFAWMTRKSEETITPWNFEEVVDKGASAQSFIERMTNFDKNLPNEKVLPKHSLLYEYFTVYNELTKVKYVTEGMRKPAFLSGEQKKAIVDLLFKTNRKVTVKQLKEDYFKKIECFDSVEISGVEDRFNASLGTYHDLLKIIKDKDFLDNEENEDILEDIVLTLTLFEDREMIEERLKTYAHLFDDKVMKQLKRRRYTGWGRLSRKLINGIRDKQSGKTILDFLKSDGFANRNFMQLIHDDSLTFKEDIQKAQVSGQGDSLHEHIANLAGSPAIKKGILQTVKVVDELVKVMGRHKPENIVIEMARENQTTQKGQKNSRERMKRIEEGIKELGSQILKEHPVENTQLQNEKLYLYYLQNGRDMYVDQELDINRLSDYDVDHIVPQSFLKDDSIDNKVLTRSDKARGKSDNVPSEEVVKKMKNYWRQLLNAKLITQRKFDNLTKAERGGLSELDKAGFIKRQLVETRQITKHVAQILDSRMNTKYDENDKLIREVKVITLKSKLVSDFRKDFQFYKVREINNYHHAHDAYLNAVVGTALIKKYPKLESEFVYGDYKVYDVRKMIAKSEQEIGKATAKYFFYSNIMNFFKTEITLANGEIRKRPLIETNGETGEIVWDKGRDFATVRKVLSMPQVNIVKKTEVQTGGFSKESILPKRNSDKLIARKKDWDPKKYGGFDSPTVAYSVLVVAKVEKGKSKKLKSVKELLGITIMERSSFEKNPIDFLEAKGYKEVKKDLIIKLPKYSLFELENGRKRMLASAGELQKGNELALPSKYVNFLYLASHYEKLKGSPEDNEQKQLFVEQHKHYLDEIIEQISEFSKRVILADANLDKVLSAYNKHRDKPIREQAENIIHLFTLTNLGAPAAFKYFDTTIDRKRYTSTKEVLDATLIHQSITGLYETRIDLSQLGGDGGEAAAKPAPGGTLNIEDEHRLHETSKEPDVSLGSTWLSDFPQAWAETGGMGLAVRQAPLIIPLKATSTPVSIKQYPMSQEARLGIKPHIQRLLDQGILVPCQSPWNTPLLPVKKPGTNDYRPVQDLREVNKRVEDIHPTVPNPYNLLSGLPPSHQWYTVLDLKDAFFCLRLHPTSQPLFAFEWRDPEMGISGQLTWTRLPQGFKNSPTLFNEALHRDLADFRIQHPDLILLQYVDDLLLAATSELDCQQGTRALLQTLGNLGYRASAKKAQICQKQVKYLGYLLKEGQRWLTEARKETVMGQPTPKTPRQLREFLGTAGFCRLWIPGFAEMAAPLYPLTKPGTLFNWGPDQQKAYQEIKQALLTAPALGLPDLTKPFELFVDEKQGYAKGVLTQKLGPWRRPVAYLSKKLDPVAAGWPPCLRMVAAIAVLTKDAGKLTMGQPLVILAPHAVEALVKQPPDRWLSNARMTHYQALLLDTDRVQFGPVVALNPATLLPLPEEGLQHNCLDILAEAHGTRPDLTDQPLPDADHTWYTDGSSLLQEGQRKAGAAVTTETEVIWAKALPAGTSAQRAELIALTQALKMAEGKKLNVYTDSRYAFATAHIHGEIYRRRGWLTSEGKEIKNKDEILALLKALFLPKRLSIIHCPGHQKGHSAEARGNRMADQAARKAAITETPDTSTLLAGKRTADGSEFEKRTADGSEFESPKKKAKVE

SEQ ID NO: 2725 - skipped

SEQ ID NO: 2726 - protein, 2093 aa, synthetic construct
MPAAKRVKLDGGDKKYSIGLDIGTNSVGWAVITDEYKVPSKKFKVLGNTDRHSIKKNLIGALLFDSGETAEATRLKRTARRRYTRRKNRICYLQEIFSNEMAKVDDSFFHRLEESFLVEEDKKHERHPIFGNIVDEVAYHEKYPTIYHLRKKLVDSTDKADLRLIYLALAHMIKFRGHFLIEGDLNPDNSDVDKLFIQLVQTYNQLFEENPINASGVDAKAILSARLSKSRRLENLIAQLPGEKKNGLFGNLIALSLGLTPNFKSNFDLAEDAKLQLSKDTYDDDLDNLLAQIGDQYADLFLAAKNLSDAILLSDILRVNTEITKAPLSASMIKRYDEHHQDLTLLKALVRQQLPEKYKEIFFDQSKNGYAGYIDGGASQEEFYKFIKPILEKMDGTEELLVKLNREDLLRKQRTFDNGSIPHQIHLGELHAILRRQEDFYPFLKDNREKIEKILTFRIPYYVGPLARGNSRFAWMTRKSEETITPWNFEEVVDKGASAQSFIERMTNFDKNLPNEKVLPKHSLLYEYFTVYNELTKVKYVTEGMRKPAFLSGEQKKAIVDLLFKTNRKVTVKQLKEDYFKKIECFDSVEISGVEDRFNASLGTYHDLLKIIKDKDFLDNEENEDILEDIVLTLTLFEDREMIEERLKTYAHLFDDKVMKQLKRRRYTGWGRLSRKLINGIRDKQSGKTILDFLKSDGFANRNFMQLIHDDSLTFKEDIQKAQVSGQGDSLHEHIANLAGSPAIKKGILQTVKVVDELVKVMGRHKPENIVIEMARENQTTQKGQKNSRERMKRIEEGIKELGSQILKEHPVENTQLQNEKLYLYYLQNGRDMYVDQELDINRLSDYDVDHIVPQSFLKDDSIDNKVLTRSDKARGKSDNVPSEEVVKKMKNYWRQLLNAKLITQRKFDNLTKAERGGLSELDKAGFIKRQLVETRQITKHVAQILDSRMNTKYDENDKLIREVKVITLKSKLVSDFRKDFQFYKVREINNYHHAHDAYLNAVVGTALIKKYPKLESEFVYGDYKVYDVRKMIAKSEQEIGKATAKYFFYSNIMNFFKTEITLANGEIRKRPLIETNGETGEIVWDKGRDFATVRKVLSMPQVNIVKKTEVQTGGFSKESILPKRNSDKLIARKKDWDPKKYGGFDSPTVAYSVLVVAKVEKGKSKKLKSVKELLGITIMERSSFEKNPIDFLEAKGYKEVKKDLIIKLPKYSLFELENGRKRMLASAGELQKGNELALPSKYVNFLYLASHYEKLKGSPEDNEQKQLFVEQHKHYLDEIIEQISEFSKRVILADANLDKVLSAYNKHRDKPIREQAENIIHLFTLTNLGAPAAFKYFDTTIDRKRYTSTKEVLDATLIHQSITGLYETRIDLSQLGGDGGEAAAKGGSGGTLNIEDEHRLHETSKEPDVSLGSTWLSDFPQAWAETGGMGLAVRQAPLIIPLKATSTPVSIKQYPMSQEARLGIKPHIQRLLDQGILVPCQSPWNTPLLPVKKPGTNDYRPVQDLREVNKRVEDIHPTVPNPYNLLSGLPPSHQWYTVLDLKDAFFCLRLHPTSQPLFAFEWRDPEMGISGQLTWTRLPQGFKNSPTLFNEALHRDLADFRIQHPDLILLQYVDDLLLAATSELDCQQGTRALLQTLGNLGYRASAKKAQICQKQVKYLGYLLKEGQRWLTEARKETVMGQPTPKTPRQLREFLGTAGFCRLWIPGFAEMAAPLYPLTKPGTLFNWGPDQQKAYQEIKQALLTAPALGLPDLTKPFELFVDEKQGYAKGVLTQKLGPWRRPVAYLSKKLDPVAAGWPPCLRMVAAIAVLTKDAGKLTMGQPLVILAPHAVEALVKQPPDRWLSNARMTHYQALLLDTDRVQFGPVVALNPATLLPLPEEGLQHNCLDILAEAHGTRPDLTDQPLPDADHTWYTDGSSLLQEGQRKAGAAVTTETEVIWAKALPAGTSAQRAELIALTQALKMAEGKKLNVYTDSRYAFATAHIHGEIYRRRGWLTSEGKEIKNKDEILALLKALFLPKRLSIIHCPGHQKGHSAEARGNRMADQAARKAAITETPDTSTLLAGKRTADGSEFEKRTADGSEFESPKKKAKVE

SEQ ID NO: 2727-2730 - skipped (4 entries)

SEQ ID NO: 2731 - protein, 2094 aa, synthetic construct
MPAAKRVKLDGGDKKYSIGLDIGTNSVGWAVITDEYKVPSKKFKVLGNTDRHSIKKNLIGALLFDSGETAEATRLKRTARRRYTRRKNRICYLQEIFSNEMAKVDDSFFHRLEESFLVEEDKKHERHPIFGNIVDEVAYHEKYPTIYHLRKKLVDSTDKADLRLIYLALAHMIKFRGHFLIEGDLNPDNSDVDKLFIQLVQTYNQLFEENPINASGVDAKAILSARLSKSRRLENLIAQLPGEKKNGLFGNLIALSLGLTPNFKSNFDLAEDAKLQLSKDTYDDDLDNLLAQIGDQYADLFLAAKNLSDAILLSDILRVNTEITKAPLSASMIKRYDEHHQDLTLLKALVRQQLPEKYKEIFFDQSKNGYAGYIDGGASQEEFYKFIKPILEKMDGTEELLVKLNREDLLRKQRTFDNGSIPHQIHLGELHAILRRQEDFYPFLKDNREKIEKILTFRIPYYVGPLARGNSRFAWMTRKSEETITPWNFEEVVDKGASAQSFIERMTNFDKNLPNEKVLPKHSLLYEYFTVYNELTKVKYVTEGMRKPAFLSGEQKKAIVDLLFKTNRKVTVKQLKEDYFKKIECFDSVEISGVEDRFNASLGTYHDLLKIIKDKDFLDNEENEDILEDIVLTLTLFEDREMIEERLKTYAHLFDDKVMKQLKRRRYTGWGRLSRKLINGIRDKQSGKTILDFLKSDGFANRNFMQLIHDDSLTFKEDIQKAQVSGQGDSLHEHIANLAGSPAIKKGILQTVKVVDELVKVMGRHKPENIVIEMARENQTTQKGQKNSRERMKRIEEGIKELGSQILKEHPVENTQLQNEKLYLYYLQNGRDMYVDQELDINRLSDYDVDHIVPQSFLKDDSIDNKVLTRSDKARGKSDNVPSEEVVKKMKNYWRQLLNAKLITQRKFDNLTKAERGGLSELDKAGFIKRQLVETRQITKHVAQILDSRMNTKYDENDKLIREVKVITLKSKLVSDFRKDFQFYKVREINNYHHAHDAYLNAVVGTALIKKYPKLESEFVYGDYKVYDVRKMIAKSEQEIGKATAKYFFYSNIMNFFKTEITLANGEIRKRPLIETNGETGEIVWDKGRDFATVRKVLSMPQVNIVKKTEVQTGGFSKESILPKRNSDKLIARKKDWDPKKYGGFDSPTVAYSVLVVAKVEKGKSKKLKSVKELLGITIMERSSFEKNPIDFLEAKGYKEVKKDLIIKLPKYSLFELENGRKRMLASAGELQKGNELALPSKYVNFLYLASHYEKLKGSPEDNEQKQLFVEQHKHYLDEIIEQISEFSKRVILADANLDKVLSAYNKHRDKPIREQAENIIHLFTLTNLGAPAAFKYFDTTIDRKRYTSTKEVLDATLIHQSITGLYETRIDLSQLGGDGGPAPAPAPAPGGTLNIEDEHRLHETSKEPDVSLGSTWLSDFPQAWAETGGMGLAVRQAPLIIPLKATSTPVSIKQYPMSQEARLGIKPHIQRLLDQGILVPCQSPWNTPLLPVKKPGTNDYRPVQDLREVNKRVEDIHPTVPNPYNLLSGLPPSHQWYTVLDLKDAFFCLRLHPTSQPLFAFEWRDPEMGISGQLTWTRLPQGFKNSPTLFNEALHRDLADFRIQHPDLILLQYVDDLLLAATSELDCQQGTRALLQTLGNLGYRASAKKAQICQKQVKYLGYLLKEGQRWLTEARKETVMGQPTPKTPRQLREFLGTAGFCRLWIPGFAEMAAPLYPLTKPGTLFNWGPDQQKAYQEIKQALLTAPALGLPDLTKPFELFVDEKQGYAKGVLTQKLGPWRRPVAYLSKKLDPVAAGWPPCLRMVAAIAVLTKDAGKLTMGQPLVILAPHAVEALVKQPPDRWLSNARMTHYQALLLDTDRVQFGPVVALNPATLLPLPEEGLQHNCLDILAEAHGTRPDLTDQPLPDADHTWYTDGSSLLQEGQRKAGAAVTTETEVIWAKALPAGTSAQRAELIALTQALKMAEGKKLNVYTDSRYAFATAHIHGEIYRRRGWLTSEGKEIKNKDEILALLKALFLPKRLSIIHCPGHQKGHSAEARGNRMADQAARKAAITETPDTSTLLAGKRTADGSEFEKRTADGSEFESPKKKAKVE

SEQ ID NO: 2732-2733 - skipped (2 entries)

SEQ ID NO: 2734 - protein, 2118 aa, synthetic construct
MPAAKRVKLDGGDKKYSIGLDIGTNSVGWAVITDEYKVPSKKFKVLGNTDRHSIKKNLIGALLFDSGETAEATRLKRTARRRYTRRKNRICYLQEIFSNEMAKVDDSFFHRLEESFLVEEDKKHERHPIFGNIVDEVAYHEKYPTIYHLRKKLVDSTDKADLRLIYLALAHMIKFRGHFLIEGDLNPDNSDVDKLFIQLVQTYNQLFEENPINASGVDAKAILSARLSKSRRLENLIAQLPGEKKNGLFGNLIALSLGLTPNFKSNFDLAEDAKLQLSKDTYDDDLDNLLAQIGDQYADLFLAAKNLSDAILLSDILRVNTEITKAPLSASMIKRYDEHHQDLTLLKALVRQQLPEKYKEIFFDQSKNGYAGYIDGGASQEEFYKFIKPILEKMDGTEELLVKLNREDLLRKQRTFDNGSIPHQIHLGELHAILRRQEDFYPFLKDNREKIEKILTFRIPYYVGPLARGNSRFAWMTRKSEETITPWNFEEVVDKGASAQSFIERMTNFDKNLPNEKVLPKHSLLYEYFTVYNELTKVKYVTEGMRKPAFLSGEQKKAIVDLLFKTNRKVTVKQLKEDYFKKIECFDSVEISGVEDRFNASLGTYHDLLKIIKDKDFLDNEENEDILEDIVLTLTLFEDREMIEERLKTYAHLFDDKVMKQLKRRRYTGWGRLSRKLINGIRDKQSGKTILDFLKSDGFANRNFMQLIHDDSLTFKEDIQKAQVSGQGDSLHEHIANLAGSPAIKKGILQTVKVVDELVKVMGRHKPENIVIEMARENQTTQKGQKNSRERMKRIEEGIKELGSQILKEHPVENTQLQNEKLYLYYLQNGRDMYVDQELDINRLSDYDVDHIVPQSFLKDDSIDNKVLTRSDKARGKSDNVPSEEVVKKMKNYWRQLLNAKLITQRKFDNLTKAERGGLSELDKAGFIKRQLVETRQITKHVAQILDSRMNTKYDENDKLIREVKVITLKSKLVSDFRKDFQFYKVREINNYHHAHDAYLNAVVGTALIKKYPKLESEFVYGDYKVYDVRKMIAKSEQEIGKATAKYFFYSNIMNFFKTEITLANGEIRKRPLIETNGETGEIVWDKGRDFATVRKVLSMPQVNIVKKTEVQTGGFSKESILPKRNSDKLIARKKDWDPKKYGGFDSPTVAYSVLVVAKVEKGKSKKLKSVKELLGITIMERSSFEKNPIDFLEAKGYKEVKKDLIIKLPKYSLFELENGRKRMLASAGELQKGNELALPSKYVNFLYLASHYEKLKGSPEDNEQKQLFVEQHKHYLDEIIEQISEFSKRVILADANLDKVLSAYNKHRDKPIREQAENIIHLFTLTNLGAPAAFKYFDTTIDRKRYTSTKEVLDATLIHQSITGLYETRIDLSQLGGDGGSGGSSGGSSGSETPGTSESATPESSGGSSGGSSGGTLNIEDEHRLHETSKEPDVSLGSTWLSDFPQAWAETGGMGLAVRQAPLIIPLKATSTPVSIKQYPMSQEARLGIKPHIQRLLDQGILVPCQSPWNTPLLPVKKPGTNDYRPVQDLREVNKRVEDIHPTVPNPYNLLSGLPPSHQWYTVLDLKDAFFCLRLHPTSQPLFAFEWRDPEMGISGQLTWTRLPQGFKNSPTLFNEALHRDLADFRIQHPDLILLQYVDDLLLAATSELDCQQGTRALLQTLGNLGYRASAKKAQICQKQVKYLGYLLKEGQRWLTEARKETVMGQPTPKTPRQLREFLGTAGFCRLWIPGFAEMAAPLYPLTKPGTLFNWGPDQQKAYQEIKQALLTAPALGLPDLTKPFELFVDEKQGYAKGVLTQKLGPWRRPVAYLSKKLDPVAAGWPPCLRMVAAIAVLTKDAGKLTMGQPLVILAPHAVEALVKQPPDRWLSNARMTHYQALLLDTDRVQFGPVVALNPATLLPLPEEGLQHNCLDILAEAHGTRPDLTDQPLPDADHTWYTDGSSLLQEGQRKAGAAVTTETEVIWAKALPAGTSAQRAELIALTQALKMAEGKKLNVYTDSRYAFATAHIHGEIYRRRGWLTSEGKEIKNKDEILALLKALFLPKRLSIIHCPGHQKGHSAEARGNRMADQAARKAAITETPDTSTLLAGKRTADGSEFEKRTADGSEFESPKKKAKVE

SEQ ID NO: 2735-2736 - skipped (2 entries)

SEQ ID NO: 2737 - protein, 2093 aa, synthetic construct
MPAAKRVKLDGGDKKYSIGLDIGTNSVGWAVITDEYKVPSKKFKVLGNTDRHSIKKNLIGALLFDSGETAEATRLKRTARRRYTRRKNRICYLQEIFSNEMAKVDDSFFHRLEESFLVEEDKKHERHPIFGNIVDEVAYHEKYPTIYHLRKKLVDSTDKADLRLIYLALAHMIKFRGHFLIEGDLNPDNSDVDKLFIQLVQTYNQLFEENPINASGVDAKAILSARLSKSRRLENLIAQLPGEKKNGLFGNLIALSLGLTPNFKSNFDLAEDAKLQLSKDTYDDDLDNLLAQIGDQYADLFLAAKNLSDAILLSDILRVNTEITKAPLSASMIKRYDEHHQDLTLLKALVRQQLPEKYKEIFFDQSKNGYAGYIDGGASQEEFYKFIKPILEKMDGTEELLVKLNREDLLRKQRTFDNGSIPHQIHLGELHAILRRQEDFYPFLKDNREKIEKILTFRIPYYVGPLARGNSRFAWMTRKSEETITPWNFEEVVDKGASAQSFIERMTNFDKNLPNEKVLPKHSLLYEYFTVYNELTKVKYVTEGMRKPAFLSGEQKKAIVDLLFKTNRKVTVKQLKEDYFKKIECFDSVEISGVEDRFNASLGTYHDLLKIIKDKDFLDNEENEDILEDIVLTLTLFEDREMIEERLKTYAHLFDDKVMKQLKRRRYTGWGRLSRKLINGIRDKQSGKTILDFLKSDGFANRNFMQLIHDDSLTFKEDIQKAQVSGQGDSLHEHIANLAGSPAIKKGILQTVKVVDELVKVMGRHKPENIVIEMARENQTTQKGQKNSRERMKRIEEGIKELGSQILKEHPVENTQLQNEKLYLYYLQNGRDMYVDQELDINRLSDYDVDHIVPQSFLKDDSIDNKVLTRSDKARGKSDNVPSEEVVKKMKNYWRQLLNAKLITQRKFDNLTKAERGGLSELDKAGFIKRQLVETRQITKHVAQILDSRMNTKYDENDKLIREVKVITLKSKLVSDFRKDFQFYKVREINNYHHAHDAYLNAVVGTALIKKYPKLESEFVYGDYKVYDVRKMIAKSEQEIGKATAKYFFYSNIMNFFKTEITLANGEIRKRPLIETNGETGEIVWDKGRDFATVRKVLSMPQVNIVKKTEVQTGGFSKESILPKRNSDKLIARKKDWDPKKYGGFDSPTVAYSVLVVAKVEKGKSKKLKSVKELLGITIMERSSFEKNPIDFLEAKGYKEVKKDLIIKLPKYSLFELENGRKRMLASAGELQKGNELALPSKYVNFLYLASHYEKLKGSPEDNEQKQLFVEQHKHYLDEIIEQISEFSKRVILADANLDKVLSAYNKHRDKPIREQAENIIHLFTLTNLGAPAAFKYFDTTIDRKRYTSTKEVLDATLIHQSITGLYETRIDLSQLGGDGGEAAAKGSSGGTLNIEDEHRLHETSKEPDVSLGSTWLSDFPQAWAETGGMGLAVRQAPLIIPLKATSTPVSIKQYPMSQEARLGIKPHIQRLLDQGILVPCQSPWNTPLLPVKKPGTNDYRPVQDLREVNKRVEDIHPTVPNPYNLLSGLPPSHQWYTVLDLKDAFFCLRLHPTSQPLFAFEWRDPEMGISGQLTWTRLPQGFKNSPTLFNEALHRDLADFRIQHPDLILLQYVDDLLLAATSELDCQQGTRALLQTLGNLGYRASAKKAQICQKQVKYLGYLLKEGQRWLTEARKETVMGQPTPKTPRQLREFLGTAGFCRLWIPGFAEMAAPLYPLTKPGTLFNWGPDQQKAYQEIKQALLTAPALGLPDLTKPFELFVDEKQGYAKGVLTQKLGPWRRPVAYLSKKLDPVAAGWPPCLRMVAAIAVLTKDAGKLTMGQPLVILAPHAVEALVKQPPDRWLSNARMTHYQALLLDTDRVQFGPVVALNPATLLPLPEEGLQHNCLDILAEAHGTRPDLTDQPLPDADHTWYTDGSSLLQEGQRKAGAAVTTETEVIWAKALPAGTSAQRAELIALTQALKMAEGKKLNVYTDSRYAFATAHIHGEIYRRRGWLTSEGKEIKNKDEILALLKALFLPKRLSIIHCPGHQKGHSAEARGNRMADQAARKAAITETPDTSTLLAGKRTADGSEFEKRTADGSEFESPKKKAKVE

SEQ ID NO: 2738-2740 - skipped (3 entries)

SEQ ID NO: 2741 - protein, 2115 aa, synthetic construct
MPAAKRVKLDGGDKKYSIGLDIGTNSVGWAVITDEYKVPSKKFKVLGNTDRHSIKKNLIGALLFDSGETAEATRLKRTARRRYTRRKNRICYLQEIFSNEMAKVDDSFFHRLEESFLVEEDKKHERHPIFGNIVDEVAYHEKYPTIYHLRKKLVDSTDKADLRLIYLALAHMIKFRGHFLIEGDLNPDNSDVDKLFIQLVQTYNQLFEENPINASGVDAKAILSARLSKSRRLENLIAQLPGEKKNGLFGNLIALSLGLTPNFKSNFDLAEDAKLQLSKDTYDDDLDNLLAQIGDQYADLFLAAKNLSDAILLSDILRVNTEITKAPLSASMIKRYDEHHQDLTLLKALVRQQLPEKYKEIFFDQSKNGYAGYIDGGASQEEFYKFIKPILEKMDGTEELLVKLNREDLLRKQRTFDNGSIPHQIHLGELHAILRRQEDFYPFLKDNREKIEKILTFRIPYYVGPLARGNSRFAWMTRKSEETITPWNFEEVVDKGASAQSFIERMTNFDKNLPNEKVLPKHSLLYEYFTVYNELTKVKYVTEGMRKPAFLSGEQKKAIVDLLFKTNRKVTVKQLKEDYFKKIECFDSVEISGVEDRFNASLGTYHDLLKIIKDKDFLDNEENEDILEDIVLTLTLFEDREMIEERLKTYAHLFDDKVMKQLKRRRYTGWGRLSRKLINGIRDKQSGKTILDFLKSDGFANRNFMQLIHDDSLTFKEDIQKAQVSGQGDSLHEHIANLAGSPAIKKGILQTVKVVDELVKVMGRHKPENIVIEMARENQTTQKGQKNSRERMKRIEEGIKELGSQILKEHPVENTQLQNEKLYLYYLQNGRDMYVDQELDINRLSDYDVDHIVPQSFLKDDSIDNKVLTRSDKARGKSDNVPSEEVVKKMKNYWRQLLNAKLITQRKFDNLTKAERGGLSELDKAGFIKRQLVETRQITKHVAQILDSRMNTKYDENDKLIREVKVITLKSKLVSDFRKDFQFYKVREINNYHHAHDAYLNAVVGTALIKKYPKLESEFVYGDYKVYDVRKMIAKSEQEIGKATAKYFFYSNIMNFFKTEITLANGEIRKRPLIETNGETGEIVWDKGRDFATVRKVLSMPQVNIVKKTEVQTGGFSKESILPKRNSDKLIARKKDWDPKKYGGFDSPTVAYSVLVVAKVEKGKSKKLKSVKELLGITIMERSSFEKNPIDFLEAKGYKEVKKDLIIKLPKYSLFELENGRKRMLASAGELQKGNELALPSKYVNFLYLASHYEKLKGSPEDNEQKQLFVEQHKHYLDEIIEQISEFSKRVILADANLDKVLSAYNKHRDKPIREQAENIIHLFTLTNLGAPAAFKYFDTTIDRKRYTSTKEVLDATLIHQSITGLYETRIDLSQLGGDGGGGGGSGGGGSGGGGSGGGGSGGGGSGGGGSGGTLNIEDEHRLHETSKEPDVSLGSTWLSDFPQAWAETGGMGLAVRQAPLIIPLKATSTPVSIKQYPMSQEARLGIKPHIQRLLDQGILVPCQSPWNTPLLPVKKPGTNDYRPVQDLREVNKRVEDIHPTVPNPYNLLSGLPPSHQWYTVLDLKDAFFCLRLHPTSQPLFAFEWRDPEMGISGQLTWTRLPQGFKNSPTLFNEALHRDLADFRIQHPDLILLQYVDDLLLAATSELDCQQGTRALLQTLGNLGYRASAKKAQICQKQVKYLGYLLKEGQRWLTEARKETVMGQPTPKTPRQLREFLGTAGFCRLWIPGFAEMAAPLYPLTKPGTLFNWGPDQQKAYQEIKQALLTAPALGLPDLTKPFELFVDEKQGYAKGVLTQKLGPWRRPVAYLSKKLDPVAAGWPPCLRMVAAIAVLTKDAGKLTMGQPLVILAPHAVEALVKQPPDRWLSNARMTHYQALLLDTDRVQFGPVVALNPATLLPLPEEGLQHNCLDILAEAHGTRPDLTDQPLPDADHTWYTDGSSLLQEGQRKAGAAVTTETEVIWAKALPAGTSAQRAELIALTQALKMAEGKKLNVYTDSRYAFATAHIHGEIYRRRGWLTSEGKEIKNKDEILALLKALFLPKRLSIIHCPGHQKGHSAEARGNRMADQAARKAAITETPDTSTLLAGKRTADGSEFEKRTADGSEFESPKKKAKVE

SEQ ID NO: 2742-2743 - skipped (2 entries)

SEQ ID NO: 2744 - protein, 2096 aa, synthetic construct
MPAAKRVKLDGGDKKYSIGLDIGTNSVGWAVITDEYKVPSKKFKVLGNTDRHSIKKNLIGALLFDSGETAEATRLKRTARRRYTRRKNRICYLQEIFSNEMAKVDDSFFHRLEESFLVEEDKKHERHPIFGNIVDEVAYHEKYPTIYHLRKKLVDSTDKADLRLIYLALAHMIKFRGHFLIEGDLNPDNSDVDKLFIQLVQTYNQLFEENPINASGVDAKAILSARLSKSRRLENLIAQLPGEKKNGLFGNLIALSLGLTPNFKSNFDLAEDAKLQLSKDTYDDDLDNLLAQIGDQYADLFLAAKNLSDAILLSDILRVNTEITKAPLSASMIKRYDEHHQDLTLLKALVRQQLPEKYKEIFFDQSKNGYAGYIDGGASQEEFYKFIKPILEKMDGTEELLVKLNREDLLRKQRTFDNGSIPHQIHLGELHAILRRQEDFYPFLKDNREKIEKILTFRIPYYVGPLARGNSRFAWMTRKSEETITPWNFEEVVDKGASAQSFIERMTNFDKNLPNEKVLPKHSLLYEYFTVYNELTKVKYVTEGMRKPAFLSGEQKKAIVDLLFKTNRKVTVKQLKEDYFKKIECFDSVEISGVEDRFNASLGTYHDLLKIIKDKDFLDNEENEDILEDIVLTLTLFEDREMIEERLKTYAHLFDDKVMKQLKRRRYTGWGRLSRKLINGIRDKQSGKTILDFLKSDGFANRNFMQLIHDDSLTFKEDIQKAQVSGQGDSLHEHIANLAGSPAIKKGILQTVKVVDELVKVMGRHKPENIVIEMARENQTTQKGQKNSRERMKRIEEGIKELGSQILKEHPVENTQLQNEKLYLYYLQNGRDMYVDQELDINRLSDYDVDHIVPQSFLKDDSIDNKVLTRSDKARGKSDNVPSEEVVKKMKNYWRQLLNAKLITQRKFDNLTKAERGGLSELDKAGFIKRQLVETRQITKHVAQILDSRMNTKYDENDKLIREVKVITLKSKLVSDFRKDFQFYKVREINNYHHAHDAYLNAVVGTALIKKYPKLESEFVYGDYKVYDVRKMIAKSEQEIGKATAKYFFYSNIMNFFKTEITLANGEIRKRPLIETNGETGEIVWDKGRDFATVRKVLSMPQVNIVKKTEVQTGGFSKESILPKRNSDKLIARKKDWDPKKYGGFDSPTVAYSVLVVAKVEKGKSKKLKSVKELLGITIMERSSFEKNPIDFLEAKGYKEVKKDLIIKLPKYSLFELENGRKRMLASAGELQKGNELALPSKYVNFLYLASHYEKLKGSPEDNEQKQLFVEQHKHYLDEIIEQISEFSKRVILADANLDKVLSAYNKHRDKPIREQAENIIHLFTLTNLGAPAAFKYFDTTIDRKRYTSTKEVLDATLIHQSITGLYETRIDLSQLGGDGGGGSEAAAKPAPGGTLNIEDEHRLHETSKEPDVSLGSTWLSDFPQAWAETGGMGLAVRQAPLIIPLKATSTPVSIKQYPMSQEARLGIKPHIQRLLDQGILVPCQSPWNTPLLPVKKPGTNDYRPVQDLREVNKRVEDIHPTVPNPYNLLSGLPPSHQWYTVLDLKDAFFCLRLHPTSQPLFAFEWRDPEMGISGQLTWTRLPQGFKNSPTLFNEALHRDLADFRIQHPDLILLQYVDDLLLAATSELDCQQGTRALLQTLGNLGYRASAKKAQICQKQVKYLGYLLKEGQRWLTEARKETVMGQPTPKTPRQLREFLGTAGFCRLWIPGFAEMAAPLYPLTKPGTLFNWGPDQQKAYQEIKQALLTAPALGLPDLTKPFELFVDEKQGYAKGVLTQKLGPWRRPVAYLSKKLDPVAAGWPPCLRMVAAIAVLTKDAGKLTMGQPLVILAPHAVEALVKQPPDRWLSNARMTHYQALLLDTDRVQFGPVVALNPATLLPLPEEGLQHNCLDILAEAHGTRPDLTDQPLPDADHTWYTDGSSLLQEGQRKAGAAVTTETEVIWAKALPAGTSAQRAELIALTQALKMAEGKKLNVYTDSRYAFATAHIHGEIYRRRGWLTSEGKEIKNKDEILALLKALFLPKRLSIIHCPGHQKGHSAEARGNRMADQAARKAAITETPDTSTLLAGKRTADGSEFEKRTADGSEFESPKKKAKVE

SEQ ID NO: 2745 - protein, 2096 aa, synthetic construct
MPAAKRVKLDGGDKKYSIGLDIGTNSVGWAVITDEYKVPSKKFKVLGNTDRHSIKKNLIGALLFDSGETAEATRLKRTARRRYTRRKNRICYLQEIFSNEMAKVDDSFFHRLEESFLVEEDKKHERHPIFGNIVDEVAYHEKYPTIYHLRKKLVDSTDKADLRLIYLALAHMIKFRGHFLIEGDLNPDNSDVDKLFIQLVQTYNQLFEENPINASGVDAKAILSARLSKSRRLENLIAQLPGEKKNGLFGNLIALSLGLTPNFKSNFDLAEDAKLQLSKDTYDDDLDNLLAQIGDQYADLFLAAKNLSDAILLSDILRVNTEITKAPLSASMIKRYDEHHQDLTLLKALVRQQLPEKYKEIFFDQSKNGYAGYIDGGASQEEFYKFIKPILEKMDGTEELLVKLNREDLLRKQRTFDNGSIPHQIHLGELHAILRRQEDFYPFLKDNREKIEKILTFRIPYYVGPLARGNSRFAWMTRKSEETITPWNFEEVVDKGASAQSFIERMTNFDKNLPNEKVLPKHSLLYEYFTVYNELTKVKYVTEGMRKPAFLSGEQKKAIVDLLFKTNRKVTVKQLKEDYFKKIECFDSVEISGVEDRFNASLGTYHDLLKIIKDKDFLDNEENEDILEDIVLTLTLFEDREMIEERLKTYAHLFDDKVMKQLKRRRYTGWGRLSRKLINGIRDKQSGKTILDFLKSDGFANRNFMQLIHDDSLTFKEDIQKAQVSGQGDSLHEHIANLAGSPAIKKGILQTVKVVDELVKVMGRHKPENIVIEMARENQTTQKGQKNSRERMKRIEEGIKELGSQILKEHPVENTQLQNEKLYLYYLQNGRDMYVDQELDINRLSDYDVDHIVPQSFLKDDSIDNKVLTRSDKARGKSDNVPSEEVVKKMKNYWRQLLNAKLITQRKFDNLTKAERGGLSELDKAGFIKRQLVETRQITKHVAQILDSRMNTKYDENDKLIREVKVITLKSKLVSDFRKDFQFYKVREINNYHHAHDAYLNAVVGTALIKKYPKLESEFVYGDYKVYDVRKMIAKSEQEIGKATAKYFFYSNIMNFFKTEITLANGEIRKRPLIETNGETGEIVWDKGRDFATVRKVLSMPQVNIVKKTEVQTGGFSKESILPKRNSDKLIARKKDWDPKKYGGFDSPTVAYSVLVVAKVEKGKSKKLKSVKELLGITIMERSSFEKNPIDFLEAKGYKEVKKDLIIKLPKYSLFELENGRKRMLASAGELQKGNELALPSKYVNFLYLASHYEKLKGSPEDNEQKQLFVEQHKHYLDEIIEQISEFSKRVILADANLDKVLSAYNKHRDKPIREQAENIIHLFTLTNLGAPAAFKYFDTTIDRKRYTSTKEVLDATLIHQSITGLYETRIDLSQLGGDGGEAAAKGGGGGSGGTLNIEDEHRLHETSKEPDVSLGSTWLSDFPQAWAETGGMGLAVRQAPLIIPLKATSTPVSIKQYPMSQEARLGIKPHIQRLLDQGILVPCQSPWNTPLLPVKKPGTNDYRPVQDLREVNKRVEDIHPTVPNPYNLLSGLPPSHQWYTVLDLKDAFFCLRLHPTSQPLFAFEWRDPEMGISGQLTWTRLPQGFKNSPTLFNEALHRDLADFRIQHPDLILLQYVDDLLLAATSELDCQQGTRALLQTLGNLGYRASAKKAQICQKQVKYLGYLLKEGQRWLTEARKETVMGQPTPKTPRQLREFLGTAGFCRLWIPGFAEMAAPLYPLTKPGTLFNWGPDQQKAYQEIKQALLTAPALGLPDLTKPFELFVDEKQGYAKGVLTQKLGPWRRPVAYLSKKLDPVAAGWPPCLRMVAAIAVLTKDAGKLTMGQPLVILAPHAVEALVKQPPDRWLSNARMTHYQALLLDTDRVQFGPVVALNPATLLPLPEEGLQHNCLDILAEAHGTRPDLTDQPLPDADHTWYTDGSSLLQEGQRKAGAAVTTETEVIWAKALPAGTSAQRAELIALTQALKMAEGKKLNVYTDSRYAFATAHIHGEIYRRRGWLTSEGKEIKNKDEILALLKALFLPKRLSIIHCPGHQKGHSAEARGNRMADQAARKAAITETPDTSTLLAGKRTADGSEFEKRTADGSEFESPKKKAKVE

SEQ ID NO: 2746-2747 - skipped (2 entries)

SEQ ID NO: 2748 - protein, 2096 aa, synthetic construct
MPAAKRVKLDGGDKKYSIGLDIGTNSVGWAVITDEYKVPSKKFKVLGNTDRHSIKKNLIGALLFDSGETAEATRLKRTARRRYTRRKNRICYLQEIFSNEMAKVDDSFFHRLEESFLVEEDKKHERHPIFGNIVDEVAYHEKYPTIYHLRKKLVDSTDKADLRLIYLALAHMIKFRGHFLIEGDLNPDNSDVDKLFIQLVQTYNQLFEENPINASGVDAKAILSARLSKSRRLENLIAQLPGEKKNGLFGNLIALSLGLTPNFKSNFDLAEDAKLQLSKDTYDDDLDNLLAQIGDQYADLFLAAKNLSDAILLSDILRVNTEITKAPLSASMIKRYDEHHQDLTLLKALVRQQLPEKYKEIFFDQSKNGYAGYIDGGASQEEFYKFIKPILEKMDGTEELLVKLNREDLLRKQRTFDNGSIPHQIHLGELHAILRRQEDFYPFLKDNREKIEKILTFRIPYYVGPLARGNSRFAWMTRKSEETITPWNFEEVVDKGASAQSFIERMTNFDKNLPNEKVLPKHSLLYEYFTVYNELTKVKYVTEGMRKPAFLSGEQKKAIVDLLFKTNRKVTVKQLKEDYFKKIECFDSVEISGVEDRFNASLGTYHDLLKIIKDKDFLDNEENEDILEDIVLTLTLFEDREMIEERLKTYAHLFDDKVMKQLKRRRYTGWGRLSRKLINGIRDKQSGKTILDFLKSDGFANRNFMQLIHDDSLTFKEDIQKAQVSGQGDSLHEHIANLAGSPAIKKGILQTVKVVDELVKVMGRHKPENIVIEMARENQTTQKGQKNSRERMKRIEEGIKELGSQILKEHPVENTQLQNEKLYLYYLQNGRDMYVDQELDINRLSDYDVDHIVPQSFLKDDSIDNKVLTRSDKARGKSDNVPSEEVVKKMKNYWRQLLNAKLITQRKFDNLTKAERGGLSELDKAGFIKRQLVETRQITKHVAQILDSRMNTKYDENDKLIREVKVITLKSKLVSDFRKDFQFYKVREINNYHHAHDAYLNAVVGTALIKKYPKLESEFVYGDYKVYDVRKMIAKSEQEIGKATAKYFFYSNIMNFFKTEITLANGEIRKRPLIETNGETGEIVWDKGRDFATVRKVLSMPQVNIVKKTEVQTGGFSKESILPKRNSDKLIARKKDWDPKKYGGFDSPTVAYSVLVVAKVEKGKSKKLKSVKELLGITIMERSSFEKNPIDFLEAKGYKEVKKDLIIKLPKYSLFELENGRKRMLASAGELQKGNELALPSKYVNFLYLASHYEKLKGSPEDNEQKQLFVEQHKHYLDEIIEQISEFSKRVILADANLDKVLSAYNKHRDKPIREQAENIIHLFTLTNLGAPAAFKYFDTTIDRKRYTSTKEVLDATLIHQSITGLYETRIDLSQLGGDGGPAPGSSEAAAKGGTLNIEDEHRLHETSKEPDVSLGSTWLSDFPQAWAETGGMGLAVRQAPLIIPLKATSTPVSIKQYPMSQEARLGIKPHIQRLLDQGILVPCQSPWNTPLLPVKKPGTNDYRPVQDLREVNKRVEDIHPTVPNPYNLLSGLPPSHQWYTVLDLKDAFFCLRLHPTSQPLFAFEWRDPEMGISGQLTWTRLPQGFKNSPTLFNEALHRDLADFRIQHPDLILLQYVDDLLLAATSELDCQQGTRALLQTLGNLGYRASAKKAQICQKQVKYLGYLLKEGQRWLTEARKETVMGQPTPKTPRQLREFLGTAGFCRLWIPGFAEMAAPLYPLTKPGTLFNWGPDQQKAYQEIKQALLTAPALGLPDLTKPFELFVDEKQGYAKGVLTQKLGPWRRPVAYLSKKLDPVAAGWPPCLRMVAAIAVLTKDAGKLTMGQPLVILAPHAVEALVKQPPDRWLSNARMTHYQALLLDTDRVQFGPVVALNPATLLPLPEEGLQHNCLDILAEAHGTRPDLTDQPLPDADHTWYTDGSSLLQEGQRKAGAAVTTETEVIWAKALPAGTSAQRAELIALTQALKMAEGKKLNVYTDSRYAFATAHIHGEIYRRRGWLTSEGKEIKNKDEILALLKALFLPKRLSIIHCPGHQKGHSAEARGNRMADQAARKAAITETPDTSTLLAGKRTADGSEFEKRTADGSEFESPKKKAKVE

SEQ ID NO: 2749-2752 - skipped (4 entries)

SEQ ID NO: 2753 - protein, 2096 aa, synthetic construct
MPAAKRVKLDGGDKKYSIGLDIGTNSVGWAVITDEYKVPSKKFKVLGNTDRHSIKKNLIGALLFDSGETAEATRLKRTARRRYTRRKNRICYLQEIFSNEMAKVDDSFFHRLEESFLVEEDKKHERHPIFGNIVDEVAYHEKYPTIYHLRKKLVDSTDKADLRLIYLALAHMIKFRGHFLIEGDLNPDNSDVDKLFIQLVQTYNQLFEENPINASGVDAKAILSARLSKSRRLENLIAQLPGEKKNGLFGNLIALSLGLTPNFKSNFDLAEDAKLQLSKDTYDDDLDNLLAQIGDQYADLFLAAKNLSDAILLSDILRVNTEITKAPLSASMIKRYDEHHQDLTLLKALVRQQLPEKYKEIFFDQSKNGYAGYIDGGASQEEFYKFIKPILEKMDGTEELLVKLNREDLLRKQRTFDNGSIPHQIHLGELHAILRRQEDFYPFLKDNREKIEKILTFRIPYYVGPLARGNSRFAWMTRKSEETITPWNFEEVVDKGASAQSFIERMTNFDKNLPNEKVLPKHSLLYEYFTVYNELTKVKYVTEGMRKPAFLSGEQKKAIVDLLFKTNRKVTVKQLKEDYFKKIECFDSVEISGVEDRFNASLGTYHDLLKIIKDKDFLDNEENEDILEDIVLTLTLFEDREMIEERLKTYAHLFDDKVMKQLKRRRYTGWGRLSRKLINGIRDKQSGKTILDFLKSDGFANRNFMQLIHDDSLTFKEDIQKAQVSGQGDSLHEHIANLAGSPAIKKGILQTVKVVDELVKVMGRHKPENIVIEMARENQTTQKGQKNSRERMKRIEEGIKELGSQILKEHPVENTQLQNEKLYLYYLQNGRDMYVDQELDINRLSDYDVDHIVPQSFLKDDSIDNKVLTRSDKARGKSDNVPSEEVVKKMKNYWRQLLNAKLITQRKFDNLTKAERGGLSELDKAGFIKRQLVETRQITKHVAQILDSRMNTKYDENDKLIREVKVITLKSKLVSDFRKDFQFYKVREINNYHHAHDAYLNAVVGTALIKKYPKLESEFVYGDYKVYDVRKMIAKSEQEIGKATAKYFFYSNIMNFFKTEITLANGEIRKRPLIETNGETGEIVWDKGRDFATVRKVLSMPQVNIVKKTEVQTGGFSKESILPKRNSDKLIARKKDWDPKKYGGFDSPTVAYSVLVVAKVEKGKSKKLKSVKELLGITIMERSSFEKNPIDFLEAKGYKEVKKDLIIKLPKYSLFELENGRKRMLASAGELQKGNELALPSKYVNFLYLASHYEKLKGSPEDNEQKQLFVEQHKHYLDEIIEQISEFSKRVILADANLDKVLSAYNKHRDKPIREQAENIIHLFTLTNLGAPAAFKYFDTTIDRKRYTSTKEVLDATLIHQSITGLYETRIDLSQLGGDGGPAPGGSEAAAKGGTLNIEDEHRLHETSKEPDVSLGSTWLSDFPQAWAETGGMGLAVRQAPLIIPLKATSTPVSIKQYPMSQEARLGIKPHIQRLLDQGILVPCQSPWNTPLLPVKKPGTNDYRPVQDLREVNKRVEDIHPTVPNPYNLLSGLPPSHQWYTVLDLKDAFFCLRLHPTSQPLFAFEWRDPEMGISGQLTWTRLPQGFKNSPTLFNEALHRDLADFRIQHPDLILLQYVDDLLLAATSELDCQQGTRALLQTLGNLGYRASAKKAQICQKQVKYLGYLLKEGQRWLTEARKETVMGQPTPKTPRQLREFLGTAGFCRLWIPGFAEMAAPLYPLTKPGTLFNWGPDQQKAYQEIKQALLTAPALGLPDLTKPFELFVDEKQGYAKGVLTQKLGPWRRPVAYLSKKLDPVAAGWPPCLRMVAAIAVLTKDAGKLTMGQPLVILAPHAVEALVKQPPDRWLSNARMTHYQALLLDTDRVQFGPVVALNPATLLPLPEEGLQHNCLDILAEAHGTRPDLTDQPLPDADHTWYTDGSSLLQEGQRKAGAAVTTETEVIWAKALPAGTSAQRAELIALTQALKMAEGKKLNVYTDSRYAFATAHIHGEIYRRRGWLTSEGKEIKNKDEILALLKALFLPKRLSIIHCPGHQKGHSAEARGNRMADQAARKAAITETPDTSTLLAGKRTADGSEFEKRTADGSEFESPKKKAKVE

SEQ ID NO: 2754-2759 - skipped (6 entries)

SEQ ID NO: 2760 - protein, 2096 aa, synthetic construct
MPAAKRVKLDGGDKKYSIGLDIGTNSVGWAVITDEYKVPSKKFKVLGNTDRHSIKKNLIGALLFDSGETAEATRLKRTARRRYTRRKNRICYLQEIFSNEMAKVDDSFFHRLEESFLVEEDKKHERHPIFGNIVDEVAYHEKYPTIYHLRKKLVDSTDKADLRLIYLALAHMIKFRGHFLIEGDLNPDNSDVDKLFIQLVQTYNQLFEENPINASGVDAKAILSARLSKSRRLENLIAQLPGEKKNGLFGNLIALSLGLTPNFKSNFDLAEDAKLQLSKDTYDDDLDNLLAQIGDQYADLFLAAKNLSDAILLSDILRVNTEITKAPLSASMIKRYDEHHQDLTLLKALVRQQLPEKYKEIFFDQSKNGYAGYIDGGASQEEFYKFIKPILEKMDGTEELLVKLNREDLLRKQRTFDNGSIPHQIHLGELHAILRRQEDFYPFLKDNREKIEKILTFRIPYYVGPLARGNSRFAWMTRKSEETITPWNFEEVVDKGASAQSFIERMTNFDKNLPNEKVLPKHSLLYEYFTVYNELTKVKYVTEGMRKPAFLSGEQKKAIVDLLFKTNRKVTVKQLKEDYFKKIECFDSVEISGVEDRFNASLGTYHDLLKIIKDKDFLDNEENEDILEDIVLTLTLFEDREMIEERLKTYAHLFDDKVMKQLKRRRYTGWGRLSRKLINGIRDKQSGKTILDFLKSDGFANRNFMQLIHDDSLTFKEDIQKAQVSGQGDSLHEHIANLAGSPAIKKGILQTVKVVDELVKVMGRHKPENIVIEMARENQTTQKGQKNSRERMKRIEEGIKELGSQILKEHPVENTQLQNEKLYLYYLQNGRDMYVDQELDINRLSDYDVDHIVPQSFLKDDSIDNKVLTRSDKARGKSDNVPSEEVVKKMKNYWRQLLNAKLITQRKFDNLTKAERGGLSELDKAGFIKRQLVETRQITKHVAQILDSRMNTKYDENDKLIREVKVITLKSKLVSDFRKDFQFYKVREINNYHHAHDAYLNAVVGTALIKKYPKLESEFVYGDYKVYDVRKMIAKSEQEIGKATAKYFFYSNIMNFFKTEITLANGEIRKRPLIETNGETGEIVWDKGRDFATVRKVLSMPQVNIVKKTEVQTGGFSKESILPKRNSDKLIARKKDWDPKKYGGFDSPTVAYSVLVVAKVEKGKSKKLKSVKELLGITIMERSSFEKNPIDFLEAKGYKEVKKDLIIKLPKYSLFELENGRKRMLASAGELQKGNELALPSKYVNFLYLASHYEKLKGSPEDNEQKQLFVEQHKHYLDEIIEQISEFSKRVILADANLDKVLSAYNKHRDKPIREQAENIIHLFTLTNLGAPAAFKYFDTTIDRKRYTSTKEVLDATLIHQSITGLYETRIDLSQLGGDGGGSSGGSEAAAKGGTLNIEDEHRLHETSKEPDVSLGSTWLSDFPQAWAETGGMGLAVRQAPLIIPLKATSTPVSIKQYPMSQEARLGIKPHIQRLLDQGILVPCQSPWNTPLLPVKKPGTNDYRPVQDLREVNKRVEDIHPTVPNPYNLLSGLPPSHQWYTVLDLKDAFFCLRLHPTSQPLFAFEWRDPEMGISGQLTWTRLPQGFKNSPTLFNEALHRDLADFRIQHPDLILLQYVDDLLLAATSELDCQQGTRALLQTLGNLGYRASAKKAQICQKQVKYLGYLLKEGQRWLTEARKETVMGQPTPKTPRQLREFLGTAGFCRLWIPGFAEMAAPLYPLTKPGTLFNWGPDQQKAYQEIKQALLTAPALGLPDLTKPFELFVDEKQGYAKGVLTQKLGPWRRPVAYLSKKLDPVAAGWPPCLRMVAAIAVLTKDAGKLTMGQPLVILAPHAVEALVKQPPDRWLSNARMTHYQALLLDTDRVQFGPVVALNPATLLPLPEEGLQHNCLDILAEAHGTRPDLTDQPLPDADHTWYTDGSSLLQEGQRKAGAAVTTETEVIWAKALPAGTSAQRAELIALTQALKMAEGKKLNVYTDSRYAFATAHIHGEIYRRRGWLTSEGKEIKNKDEILALLKALFLPKRLSIIHCPGHQKGHSAEARGNRMADQAARKAAITETPDTSTLLAGKRTADGSEFEKRTADGSEFESPKKKAKVE

SEQ ID NO: 2761-2763 - skipped (3 entries)

SEQ ID NO: 2764 - protein, 2096 aa, synthetic construct
MPAAKRVKLDGGDKKYSIGLDIGTNSVGWAVITDEYKVPSKKFKVLGNTDRHSIKKNLIGALLFDSGETAEATRLKRTARRRYTRRKNRICYLQEIFSNEMAKVDDSFFHRLEESFLVEEDKKHERHPIFGNIVDEVAYHEKYPTIYHLRKKLVDSTDKADLRLIYLALAHMIKFRGHFLIEGDLNPDNSDVDKLFIQLVQTYNQLFEENPINASGVDAKAILSARLSKSRRLENLIAQLPGEKKNGLFGNLIALSLGLTPNFKSNFDLAEDAKLQLSKDTYDDDLDNLLAQIGDQYADLFLAAKNLSDAILLSDILRVNTEITKAPLSASMIKRYDEHHQDLTLLKALVRQQLPEKYKEIFFDQSKNGYAGYIDGGASQEEFYKFIKPILEKMDGTEELLVKLNREDLLRKQRTFDNGSIPHQIHLGELHAILRRQEDFYPFLKDNREKIEKILTFRIPYYVGPLARGNSRFAWMTRKSEETITPWNFEEVVDKGASAQSFIERMTNFDKNLPNEKVLPKHSLLYEYFTVYNELTKVKYVTEGMRKPAFLSGEQKKAIVDLLFKTNRKVTVKQLKEDYFKKIECFDSVEISGVEDRFNASLGTYHDLLKIIKDKDFLDNEENEDILEDIVLTLTLFEDREMIEERLKTYAHLFDDKVMKQLKRRRYTGWGRLSRKLINGIRDKQSGKTILDFLKSDGFANRNFMQLIHDDSLTFKEDIQKAQVSGQGDSLHEHIANLAGSPAIKKGILQTVKVVDELVKVMGRHKPENIVIEMARENQTTQKGQKNSRERMKRIEEGIKELGSQILKEHPVENTQLQNEKLYLYYLQNGRDMYVDQELDINRLSDYDVDHIVPQSFLKDDSIDNKVLTRSDKARGKSDNVPSEEVVKKMKNYWRQLLNAKLITQRKFDNLTKAERGGLSELDKAGFIKRQLVETRQITKHVAQILDSRMNTKYDENDKLIREVKVITLKSKLVSDFRKDFQFYKVREINNYHHAHDAYLNAVVGTALIKKYPKLESEFVYGDYKVYDVRKMIAKSEQEIGKATAKYFFYSNIMNFFKTEITLANGEIRKRPLIETNGETGEIVWDKGRDFATVRKVLSMPQVNIVKKTEVQTGGFSKESILPKRNSDKLIARKKDWDPKKYGGFDSPTVAYSVLVVAKVEKGKSKKLKSVKELLGITIMERSSFEKNPIDFLEAKGYKEVKKDLIIKLPKYSLFELENGRKRMLASAGELQKGNELALPSKYVNFLYLASHYEKLKGSPEDNEQKQLFVEQHKHYLDEIIEQISEFSKRVILADANLDKVLSAYNKHRDKPIREQAENIIHLFTLTNLGAPAAFKYFDTTIDRKRYTSTKEVLDATLIHQSITGLYETRIDLSQLGGDGGGGGGSSEAAAKGGTLNIEDEHRLHETSKEPDVSLGSTWLSDFPQAWAETGGMGLAVRQAPLIIPLKATSTPVSIKQYPMSQEARLGIKPHIQRLLDQGILVPCQSPWNTPLLPVKKPGTNDYRPVQDLREVNKRVEDIHPTVPNPYNLLSGLPPSHQWYTVLDLKDAFFCLRLHPTSQPLFAFEWRDPEMGISGQLTWTRLPQGFKNSPTLFNEALHRDLADFRIQHPDLILLQYVDDLLLAATSELDCQQGTRALLQTLGNLGYRASAKKAQICQKQVKYLGYLLKEGQRWLTEARKETVMGQPTPKTPRQLREFLGTAGFCRLWIPGFAEMAAPLYPLTKPGTLFNWGPDQQKAYQEIKQALLTAPALGLPDLTKPFELFVDEKQGYAKGVLTQKLGPWRRPVAYLSKKLDPVAAGWPPCLRMVAAIAVLTKDAGKLTMGQPLVILAPHAVEALVKQPPDRWLSNARMTHYQALLLDTDRVQFGPVVALNPATLLPLPEEGLQHNCLDILAEAHGTRPDLTDQPLPDADHTWYTDGSSLLQEGQRKAGAAVTTETEVIWAKALPAGTSAQRAELIALTQALKMAEGKKLNVYTDSRYAFATAHIHGEIYRRRGWLTSEGKEIKNKDEILALLKALFLPKRLSIIHCPGHQKGHSAEARGNRMADQAARKAAITETPDTSTLLAGKRTADGSEFEKRTADGSEFESPKKKAKVE

SEQ ID NO: 2765-2770 - skipped (6 entries)

SEQ ID NO: 2771 - protein, 2105 aa, synthetic construct
MPAAKRVKLDGGDKKYSIGLDIGTNSVGWAVITDEYKVPSKKFKVLGNTDRHSIKKNLIGALLFDSGETAEATRLKRTARRRYTRRKNRICYLQEIFSNEMAKVDDSFFHRLEESFLVEEDKKHERHPIFGNIVDEVAYHEKYPTIYHLRKKLVDSTDKADLRLIYLALAHMIKFRGHFLIEGDLNPDNSDVDKLFIQLVQTYNQLFEENPINASGVDAKAILSARLSKSRRLENLIAQLPGEKKNGLFGNLIALSLGLTPNFKSNFDLAEDAKLQLSKDTYDDDLDNLLAQIGDQYADLFLAAKNLSDAILLSDILRVNTEITKAPLSASMIKRYDEHHQDLTLLKALVRQQLPEKYKEIFFDQSKNGYAGYIDGGASQEEFYKFIKPILEKMDGTEELLVKLNREDLLRKQRTFDNGSIPHQIHLGELHAILRRQEDFYPFLKDNREKIEKILTFRIPYYVGPLARGNSRFAWMTRKSEETITPWNFEEVVDKGASAQSFIERMTNFDKNLPNEKVLPKHSLLYEYFTVYNELTKVKYVTEGMRKPAFLSGEQKKAIVDLLFKTNRKVTVKQLKEDYFKKIECFDSVEISGVEDRFNASLGTYHDLLKIIKDKDFLDNEENEDILEDIVLTLTLFEDREMIEERLKTYAHLFDDKVMKQLKRRRYTGWGRLSRKLINGIRDKQSGKTILDFLKSDGFANRNFMQLIHDDSLTFKEDIQKAQVSGQGDSLHEHIANLAGSPAIKKGILQTVKVVDELVKVMGRHKPENIVIEMARENQTTQKGQKNSRERMKRIEEGIKELGSQILKEHPVENTQLQNEKLYLYYLQNGRDMYVDQELDINRLSDYDVDHIVPQSFLKDDSIDNKVLTRSDKARGKSDNVPSEEVVKKMKNYWRQLLNAKLITQRKFDNLTKAERGGLSELDKAGFIKRQLVETRQITKHVAQILDSRMNTKYDENDKLIREVKVITLKSKLVSDFRKDFQFYKVREINNYHHAHDAYLNAVVGTALIKKYPKLESEFVYGDYKVYDVRKMIAKSEQEIGKATAKYFFYSNIMNFFKTEITLANGEIRKRPLIETNGETGEIVWDKGRDFATVRKVLSMPQVNIVKKTEVQTGGFSKESILPKRNSDKLIARKKDWDPKKYGGFDSPTVAYSVLVVAKVEKGKSKKLKSVKELLGITIMERSSFEKNPIDFLEAKGYKEVKKDLIIKLPKYSLFELENGRKRMLASAGELQKGNELALPSKYVNFLYLASHYEKLKGSPEDNEQKQLFVEQHKHYLDEIIEQISEFSKRVILADANLDKVLSAYNKHRDKPIREQAENIIHLFTLTNLGAPAAFKYFDTTIDRKRYTSTKEVLDATLIHQSITGLYETRIDLSQLGGDGGGGGGSGGGGSGGGGSGGGGSGGTLNIEDEHRLHETSKEPDVSLGSTWLSDFPQAWAETGGMGLAVRQAPLIIPLKATSTPVSIKQYPMSQEARLGIKPHIQRLLDQGILVPCQSPWNTPLLPVKKPGTNDYRPVQDLREVNKRVEDIHPTVPNPYNLLSGLPPSHQWYTVLDLKDAFFCLRLHPTSQPLFAFEWRDPEMGISGQLTWTRLPQGFKNSPTLFNEALHRDLADFRIQHPDLILLQYVDDLLLAATSELDCQQGTRALLQTLGNLGYRASAKKAQICQKQVKYLGYLLKEGQRWLTEARKETVMGQPTPKTPRQLREFLGTAGFCRLWIPGFAEMAAPLYPLTKPGTLFNWGPDQQKAYQEIKQALLTAPALGLPDLTKPFELFVDEKQGYAKGVLTQKLGPWRRPVAYLSKKLDPVAAGWPPCLRMVAAIAVLTKDAGKLTMGQPLVILAPHAVEALVKQPPDRWLSNARMTHYQALLLDTDRVQFGPVVALNPATLLPLPEEGLQHNCLDILAEAHGTRPDLTDQPLPDADHTWYTDGSSLLQEGQRKAGAAVTTETEVIWAKALPAGTSAQRAELIALTQALKMAEGKKLNVYTDSRYAFATAHIHGEIYRRRGWLTSEGKEIKNKDEILALLKALFLPKRLSIIHCPGHQKGHSAEARGNRMADQAARKAAITETPDTSTLLAGKRTADGSEFEKRTADGSEFESPKKKAKVE

SEQ ID NO: 2772 - protein, 2100 aa, synthetic construct
MPAAKRVKLDGGDKKYSIGLDIGTNSVGWAVITDEYKVPSKKFKVLGNTDRHSIKKNLIGALLFDSGETAEATRLKRTARRRYTRRKNRICYLQEIFSNEMAKVDDSFFHRLEESFLVEEDKKHERHPIFGNIVDEVAYHEKYPTIYHLRKKLVDSTDKADLRLIYLALAHMIKFRGHFLIEGDLNPDNSDVDKLFIQLVQTYNQLFEENPINASGVDAKAILSARLSKSRRLENLIAQLPGEKKNGLFGNLIALSLGLTPNFKSNFDLAEDAKLQLSKDTYDDDLDNLLAQIGDQYADLFLAAKNLSDAILLSDILRVNTEITKAPLSASMIKRYDEHHQDLTLLKALVRQQLPEKYKEIFFDQSKNGYAGYIDGGASQEEFYKFIKPILEKMDGTEELLVKLNREDLLRKQRTFDNGSIPHQIHLGELHAILRRQEDFYPFLKDNREKIEKILTFRIPYYVGPLARGNSRFAWMTRKSEETITPWNFEEVVDKGASAQSFIERMTNFDKNLPNEKVLPKHSLLYEYFTVYNELTKVKYVTEGMRKPAFLSGEQKKAIVDLLFKTNRKVTVKQLKEDYFKKIECFDSVEISGVEDRFNASLGTYHDLLKIIKDKDFLDNEENEDILEDIVLTLTLFEDREMIEERLKTYAHLFDDKVMKQLKRRRYTGWGRLSRKLINGIRDKQSGKTILDFLKSDGFANRNFMQLIHDDSLTFKEDIQKAQVSGQGDSLHEHIANLAGSPAIKKGILQTVKVVDELVKVMGRHKPENIVIEMARENQTTQKGQKNSRERMKRIEEGIKELGSQILKEHPVENTQLQNEKLYLYYLQNGRDMYVDQELDINRLSDYDVDHIVPQSFLKDDSIDNKVLTRSDKARGKSDNVPSEEVVKKMKNYWRQLLNAKLITQRKFDNLTKAERGGLSELDKAGFIKRQLVETRQITKHVAQILDSRMNTKYDENDKLIREVKVITLKSKLVSDFRKDFQFYKVREINNYHHAHDAYLNAVVGTALIKKYPKLESEFVYGDYKVYDVRKMIAKSEQEIGKATAKYFFYSNIMNFFKTEITLANGEIRKRPLIETNGETGEIVWDKGRDFATVRKVLSMPQVNIVKKTEVQTGGFSKESILPKRNSDKLIARKKDWDPKKYGGFDSPTVAYSVLVVAKVEKGKSKKLKSVKELLGITIMERSSFEKNPIDFLEAKGYKEVKKDLIIKLPKYSLFELENGRKRMLASAGELQKGNELALPSKYVNFLYLASHYEKLKGSPEDNEQKQLFVEQHKHYLDEIIEQISEFSKRVILADANLDKVLSAYNKHRDKPIREQAENIIHLFTLTNLGAPAAFKYFDTTIDRKRYTSTKEVLDATLIHQSITGLYETRIDLSQLGGDGGEAAAKEAAAKEAAAKGGTLNIEDEHRLHETSKEPDVSLGSTWLSDFPQAWAETGGMGLAVRQAPLIIPLKATSTPVSIKQYPMSQEARLGIKPHIQRLLDQGILVPCQSPWNTPLLPVKKPGTNDYRPVQDLREVNKRVEDIHPTVPNPYNLLSGLPPSHQWYTVLDLKDAFFCLRLHPTSQPLFAFEWRDPEMGISGQLTWTRLPQGFKNSPTLFNEALHRDLADFRIQHPDLILLQYVDDLLLAATSELDCQQGTRALLQTLGNLGYRASAKKAQICQKQVKYLGYLLKEGQRWLTEARKETVMGQPTPKTPRQLREFLGTAGFCRLWIPGFAEMAAPLYPLTKPGTLFNWGPDQQKAYQEIKQALLTAPALGLPDLTKPFELFVDEKQGYAKGVLTQKLGPWRRPVAYLSKKLDPVAAGWPPCLRMVAAIAVLTKDAGKLTMGQPLVILAPHAVEALVKQPPDRWLSNARMTHYQALLLDTDRVQFGPVVALNPATLLPLPEEGLQHNCLDILAEAHGTRPDLTDQPLPDADHTWYTDGSSLLQEGQRKAGAAVTTETEVIWAKALPAGTSAQRAELIALTQALKMAEGKKLNVYTDSRYAFATAHIHGEIYRRRGWLTSEGKEIKNKDEILALLKALFLPKRLSIIHCPGHQKGHSAEARGNRMADQAARKAAITETPDTSTLLAGKRTADGSEFEKRTADGSEFESPKKKAKVE

SEQ ID NO: 2773-2775 - skipped (3 entries)

SEQ ID NO: 2776 - protein, 2096 aa, synthetic construct
MPAAKRVKLDGGDKKYSIGLDIGTNSVGWAVITDEYKVPSKKFKVLGNTDRHSIKKNLIGALLFDSGETAEATRLKRTARRRYTRRKNRICYLQEIFSNEMAKVDDSFFHRLEESFLVEEDKKHERHPIFGNIVDEVAYHEKYPTIYHLRKKLVDSTDKADLRLIYLALAHMIKFRGHFLIEGDLNPDNSDVDKLFIQLVQTYNQLFEENPINASGVDAKAILSARLSKSRRLENLIAQLPGEKKNGLFGNLIALSLGLTPNFKSNFDLAEDAKLQLSKDTYDDDLDNLLAQIGDQYADLFLAAKNLSDAILLSDILRVNTEITKAPLSASMIKRYDEHHQDLTLLKALVRQQLPEKYKEIFFDQSKNGYAGYIDGGASQEEFYKFIKPILEKMDGTEELLVKLNREDLLRKQRTFDNGSIPHQIHLGELHAILRRQEDFYPFLKDNREKIEKILTFRIPYYVGPLARGNSRFAWMTRKSEETITPWNFEEVVDKGASAQSFIERMTNFDKNLPNEKVLPKHSLLYEYFTVYNELTKVKYVTEGMRKPAFLSGEQKKAIVDLLFKTNRKVTVKQLKEDYFKKIECFDSVEISGVEDRFNASLGTYHDLLKIIKDKDFLDNEENEDILEDIVLTLTLFEDREMIEERLKTYAHLFDDKVMKQLKRRRYTGWGRLSRKLINGIRDKQSGKTILDFLKSDGFANRNFMQLIHDDSLTFKEDIQKAQVSGQGDSLHEHIANLAGSPAIKKGILQTVKVVDELVKVMGRHKPENIVIEMARENQTTQKGQKNSRERMKRIEEGIKELGSQILKEHPVENTQLQNEKLYLYYLQNGRDMYVDQELDINRLSDYDVDHIVPQSFLKDDSIDNKVLTRSDKARGKSDNVPSEEVVKKMKNYWRQLLNAKLITQRKFDNLTKAERGGLSELDKAGFIKRQLVETRQITKHVAQILDSRMNTKYDENDKLIREVKVITLKSKLVSDFRKDFQFYKVREINNYHHAHDAYLNAVVGTALIKKYPKLESEFVYGDYKVYDVRKMIAKSEQEIGKATAKYFFYSNIMNFFKTEITLANGEIRKRPLIETNGETGEIVWDKGRDFATVRKVLSMPQVNIVKKTEVQTGGFSKESILPKRNSDKLIARKKDWDPKKYGGFDSPTVAYSVLVVAKVEKGKSKKLKSVKELLGITIMERSSFEKNPIDFLEAKGYKEVKKDLIIKLPKYSLFELENGRKRMLASAGELQKGNELALPSKYVNFLYLASHYEKLKGSPEDNEQKQLFVEQHKHYLDEIIEQISEFSKRVILADANLDKVLSAYNKHRDKPIREQAENIIHLFTLTNLGAPAAFKYFDTTIDRKRYTSTKEVLDATLIHQSITGLYETRIDLSQLGGDGGGGSPAPEAAAKGGTLNIEDEHRLHETSKEPDVSLGSTWLSDFPQAWAETGGMGLAVRQAPLIIPLKATSTPVSIKQYPMSQEARLGIKPHIQRLLDQGILVPCQSPWNTPLLPVKKPGTNDYRPVQDLREVNKRVEDIHPTVPNPYNLLSGLPPSHQWYTVLDLKDAFFCLRLHPTSQPLFAFEWRDPEMGISGQLTWTRLPQGFKNSPTLFNEALHRDLADFRIQHPDLILLQYVDDLLLAATSELDCQQGTRALLQTLGNLGYRASAKKAQICQKQVKYLGYLLKEGQRWLTEARKETVMGQPTPKTPRQLREFLGTAGFCRLWIPGFAEMAAPLYPLTKPGTLFNWGPDQQKAYQEIKQALLTAPALGLPDLTKPFELFVDEKQGYAKGVLTQKLGPWRRPVAYLSKKLDPVAAGWPPCLRMVAAIAVLTKDAGKLTMGQPLVILAPHAVEALVKQPPDRWLSNARMTHYQALLLDTDRVQFGPVVALNPATLLPLPEEGLQHNCLDILAEAHGTRPDLTDQPLPDADHTWYTDGSSLLQEGQRKAGAAVTTETEVIWAKALPAGTSAQRAELIALTQALKMAEGKKLNVYTDSRYAFATAHIHGEIYRRRGWLTSEGKEIKNKDEILALLKALFLPKRLSIIHCPGHQKGHSAEARGNRMADQAARKAAITETPDTSTLLAGKRTADGSEFEKRTADGSEFESPKKKAKVE

SEQ ID NO: 2777-2779 - skipped (3 entries)

SEQ ID NO: 2780 - protein, 2091 aa, synthetic construct
MPAAKRVKLDGGDKKYSIGLDIGTNSVGWAVITDEYKVPSKKFKVLGNTDRHSIKKNLIGALLFDSGETAEATRLKRTARRRYTRRKNRICYLQEIFSNEMAKVDDSFFHRLEESFLVEEDKKHERHPIFGNIVDEVAYHEKYPTIYHLRKKLVDSTDKADLRLIYLALAHMIKFRGHFLIEGDLNPDNSDVDKLFIQLVQTYNQLFEENPINASGVDAKAILSARLSKSRRLENLIAQLPGEKKNGLFGNLIALSLGLTPNFKSNFDLAEDAKLQLSKDTYDDDLDNLLAQIGDQYADLFLAAKNLSDAILLSDILRVNTEITKAPLSASMIKRYDEHHQDLTLLKALVRQQLPEKYKEIFFDQSKNGYAGYIDGGASQEEFYKFIKPILEKMDGTEELLVKLNREDLLRKQRTFDNGSIPHQIHLGELHAILRRQEDFYPFLKDNREKIEKILTFRIPYYVGPLARGNSRFAWMTRKSEETITPWNFEEVVDKGASAQSFIERMTNFDKNLPNEKVLPKHSLLYEYFTVYNELTKVKYVTEGMRKPAFLSGEQKKAIVDLLFKTNRKVTVKQLKEDYFKKIECFDSVEISGVEDRFNASLGTYHDLLKIIKDKDFLDNEENEDILEDIVLTLTLFEDREMIEERLKTYAHLFDDKVMKQLKRRRYTGWGRLSRKLINGIRDKQSGKTILDFLKSDGFANRNFMQLIHDDSLTFKEDIQKAQVSGQGDSLHEHIANLAGSPAIKKGILQTVKVVDELVKVMGRHKPENIVIEMARENQTTQKGQKNSRERMKRIEEGIKELGSQILKEHPVENTQLQNEKLYLYYLQNGRDMYVDQELDINRLSDYDVDHIVPQSFLKDDSIDNKVLTRSDKARGKSDNVPSEEVVKKMKNYWRQLLNAKLITQRKFDNLTKAERGGLSELDKAGFIKRQLVETRQITKHVAQILDSRMNTKYDENDKLIREVKVITLKSKLVSDFRKDFQFYKVREINNYHHAHDAYLNAVVGTALIKKYPKLESEFVYGDYKVYDVRKMIAKSEQEIGKATAKYFFYSNIMNFFKTEITLANGEIRKRPLIETNGETGEIVWDKGRDFATVRKVLSMPQVNIVKKTEVQTGGFSKESILPKRNSDKLIARKKDWDPKKYGGFDSPTVAYSVLVVAKVEKGKSKKLKSVKELLGITIMERSSFEKNPIDFLEAKGYKEVKKDLIIKLPKYSLFELENGRKRMLASAGELQKGNELALPSKYVNFLYLASHYEKLKGSPEDNEQKQLFVEQHKHYLDEIIEQISEFSKRVILADANLDKVLSAYNKHRDKPIREQAENIIHLFTLTNLGAPAAFKYFDTTIDRKRYTSTKEVLDATLIHQSITGLYETRIDLSQLGGDGGGGGGGSGGTLNIEDEHRLHETSKEPDVSLGSTWLSDFPQAWAETGGMGLAVRQAPLIIPLKATSTPVSIKQYPMSQEARLGIKPHIQRLLDQGILVPCQSPWNTPLLPVKKPGTNDYRPVQDLREVNKRVEDIHPTVPNPYNLLSGLPPSHQWYTVLDLKDAFFCLRLHPTSQPLFAFEWRDPEMGISGQLTWTRLPQGFKNSPTLFNEALHRDLADFRIQHPDLILLQYVDDLLLAATSELDCQQGTRALLQTLGNLGYRASAKKAQICQKQVKYLGYLLKEGQRWLTEARKETVMGQPTPKTPRQLREFLGKAGFCRLFIPGFAEMAAPLYPLTKPGTLFNWGPDQQKAYQEIKQALLTAPALGLPDLTKPFELFVDEKQGYAKGVLTQKLGPWRRPVAYLSKKLDPVAAGWPPCLRMVAAIAVLTKDAGKLTMGQPLVILAPHAVEALVKQPPDRWLSNARMTHYQALLLDTDRVQFGPVVALNPATLLPLPEEGLQHNCLDILAEAHGTRPDLTDQPLPDADHTWYTDGSSLLQEGQRKAGAAVTTETEVIWAKALPAGTSAQRAELIALTQALKMAEGKKLNVYTDSRYAFATAHIHGEIYRRRGWLTSEGKEIKNKDEILALLKALFLPKRLSIIHCPGHQKGHSAEARGNRMADQAARKAAITETPDTSTLLAGKRTADGSEFEKRTADGSEFESPKKKAKVE

SEQ ID NO: 2781 - protein, 2096 aa, synthetic construct
MPAAKRVKLDGGDKKYSIGLDIGTNSVGWAVITDEYKVPSKKFKVLGNTDRHSIKKNLIGALLFDSGETAEATRLKRTARRRYTRRKNRICYLQEIFSNEMAKVDDSFFHRLEESFLVEEDKKHERHPIFGNIVDEVAYHEKYPTIYHLRKKLVDSTDKADLRLIYLALAHMIKFRGHFLIEGDLNPDNSDVDKLFIQLVQTYNQLFEENPINASGVDAKAILSARLSKSRRLENLIAQLPGEKKNGLFGNLIALSLGLTPNFKSNFDLAEDAKLQLSKDTYDDDLDNLLAQIGDQYADLFLAAKNLSDAILLSDILRVNTEITKAPLSASMIKRYDEHHQDLTLLKALVRQQLPEKYKEIFFDQSKNGYAGYIDGGASQEEFYKFIKPILEKMDGTEELLVKLNREDLLRKQRTFDNGSIPHQIHLGELHAILRRQEDFYPFLKDNREKIEKILTFRIPYYVGPLARGNSRFAWMTRKSEETITPWNFEEVVDKGASAQSFIERMTNFDKNLPNEKVLPKHSLLYEYFTVYNELTKVKYVTEGMRKPAFLSGEQKKAIVDLLFKTNRKVTVKQLKEDYFKKIECFDSVEISGVEDRFNASLGTYHDLLKIIKDKDFLDNEENEDILEDIVLTLTLFEDREMIEERLKTYAHLFDDKVMKQLKRRRYTGWGRLSRKLINGIRDKQSGKTILDFLKSDGFANRNFMQLIHDDSLTFKEDIQKAQVSGQGDSLHEHIANLAGSPAIKKGILQTVKVVDELVKVMGRHKPENIVIEMARENQTTQKGQKNSRERMKRIEEGIKELGSQILKEHPVENTQLQNEKLYLYYLQNGRDMYVDQELDINRLSDYDVDHIVPQSFLKDDSIDNKVLTRSDKARGKSDNVPSEEVVKKMKNYWRQLLNAKLITQRKFDNLTKAERGGLSELDKAGFIKRQLVETRQITKHVAQILDSRMNTKYDENDKLIREVKVITLKSKLVSDFRKDFQFYKVREINNYHHAHDAYLNAVVGTALIKKYPKLESEFVYGDYKVYDVRKMIAKSEQEIGKATAKYFFYSNIMNFFKTEITLANGEIRKRPLIETNGETGEIVWDKGRDFATVRKVLSMPQVNIVKKTEVQTGGFSKESILPKRNSDKLIARKKDWDPKKYGGFDSPTVAYSVLVVAKVEKGKSKKLKSVKELLGITIMERSSFEKNPIDFLEAKGYKEVKKDLIIKLPKYSLFELENGRKRMLASAGELQKGNELALPSKYVNFLYLASHYEKLKGSPEDNEQKQLFVEQHKHYLDEIIEQISEFSKRVILADANLDKVLSAYNKHRDKPIREQAENIIHLFTLTNLGAPAAFKYFDTTIDRKRYTSTKEVLDATLIHQSITGLYETRIDLSQLGGDGGEAAAKPAPGSSGGTLNIEDEHRLHETSKEPDVSLGSTWLSDFPQAWAETGGMGLAVRQAPLIIPLKATSTPVSIKQYPMSQEARLGIKPHIQRLLDQGILVPCQSPWNTPLLPVKKPGTNDYRPVQDLREVNKRVEDIHPTVPNPYNLLSGLPPSHQWYTVLDLKDAFFCLRLHPTSQPLFAFEWRDPEMGISGQLTWTRLPQGFKNSPTLFNEALHRDLADFRIQHPDLILLQYVDDLLLAATSELDCQQGTRALLQTLGNLGYRASAKKAQICQKQVKYLGYLLKEGQRWLTEARKETVMGQPTPKTPRQLREFLGKAGFCRLFIPGFAEMAAPLYPLTKPGTLFNWGPDQQKAYQEIKQALLTAPALGLPDLTKPFELFVDEKQGYAKGVLTQKLGPWRRPVAYLSKKLDPVAAGWPPCLRMVAAIAVLTKDAGKLTMGQPLVILAPHAVEALVKQPPDRWLSNARMTHYQALLLDTDRVQFGPVVALNPATLLPLPEEGLQHNCLDILAEAHGTRPDLTDQPLPDADHTWYTDGSSLLQEGQRKAGAAVTTETEVIWAKALPAGTSAQRAELIALTQALKMAEGKKLNVYTDSRYAFATAHIHGEIYRRRGWLTSEGKEIKNKDEILALLKALFLPKRLSIIHCPGHQKGHSAEARGNRMADQAARKAAITETPDTSTLLAGKRTADGSEFEKRTADGSEFESPKKKAKVE

SEQ ID NO: 2782 - protein, 2096 aa, synthetic construct
MPAAKRVKLDGGDKKYSIGLDIGTNSVGWAVITDEYKVPSKKFKVLGNTDRHSIKKNLIGALLFDSGETAEATRLKRTARRRYTRRKNRICYLQEIFSNEMAKVDDSFFHRLEESFLVEEDKKHERHPIFGNIVDEVAYHEKYPTIYHLRKKLVDSTDKADLRLIYLALAHMIKFRGHFLIEGDLNPDNSDVDKLFIQLVQTYNQLFEENPINASGVDAKAILSARLSKSRRLENLIAQLPGEKKNGLFGNLIALSLGLTPNFKSNFDLAEDAKLQLSKDTYDDDLDNLLAQIGDQYADLFLAAKNLSDAILLSDILRVNTEITKAPLSASMIKRYDEHHQDLTLLKALVRQQLPEKYKEIFFDQSKNGYAGYIDGGASQEEFYKFIKPILEKMDGTEELLVKLNREDLLRKQRTFDNGSIPHQIHLGELHAILRRQEDFYPFLKDNREKIEKILTFRIPYYVGPLARGNSRFAWMTRKSEETITPWNFEEVVDKGASAQSFIERMTNFDKNLPNEKVLPKHSLLYEYFTVYNELTKVKYVTEGMRKPAFLSGEQKKAIVDLLFKTNRKVTVKQLKEDYFKKIECFDSVEISGVEDRFNASLGTYHDLLKIIKDKDFLDNEENEDILEDIVLTLTLFEDREMIEERLKTYAHLFDDKVMKQLKRRRYTGWGRLSRKLINGIRDKQSGKTILDFLKSDGFANRNFMQLIHDDSLTFKEDIQKAQVSGQGDSLHEHIANLAGSPAIKKGILQTVKVVDELVKVMGRHKPENIVIEMARENQTTQKGQKNSRERMKRIEEGIKELGSQILKEHPVENTQLQNEKLYLYYLQNGRDMYVDQELDINRLSDYDVDHIVPQSFLKDDSIDNKVLTRSDKARGKSDNVPSEEVVKKMKNYWRQLLNAKLITQRKFDNLTKAERGGLSELDKAGFIKRQLVETRQITKHVAQILDSRMNTKYDENDKLIREVKVITLKSKLVSDFRKDFQFYKVREINNYHHAHDAYLNAVVGTALIKKYPKLESEFVYGDYKVYDVRKMIAKSEQEIGKATAKYFFYSNIMNFFKTEITLANGEIRKRPLIETNGETGEIVWDKGRDFATVRKVLSMPQVNIVKKTEVQTGGFSKESILPKRNSDKLIARKKDWDPKKYGGFDSPTVAYSVLVVAKVEKGKSKKLKSVKELLGITIMERSSFEKNPIDFLEAKGYKEVKKDLIIKLPKYSLFELENGRKRMLASAGELQKGNELALPSKYVNFLYLASHYEKLKGSPEDNEQKQLFVEQHKHYLDEIIEQISEFSKRVILADANLDKVLSAYNKHRDKPIREQAENIIHLFTLTNLGAPAAFKYFDTTIDRKRYTSTKEVLDATLIHQSITGLYETRIDLSQLGGDGGEAAAKGGSPAPGGTLNIEDEHRLHETSKEPDVSLGSTWLSDFPQAWAETGGMGLAVRQAPLIIPLKATSTPVSIKQYPMSQEARLGIKPHIQRLLDQGILVPCQSPWNTPLLPVKKPGTNDYRPVQDLREVNKRVEDIHPTVPNPYNLLSGLPPSHQWYTVLDLKDAFFCLRLHPTSQPLFAFEWRDPEMGISGQLTWTRLPQGFKNSPTLFNEALHRDLADFRIQHPDLILLQYVDDLLLAATSELDCQQGTRALLQTLGNLGYRASAKKAQICQKQVKYLGYLLKEGQRWLTEARKETVMGQPTPKTPRQLREFLGKAGFCRLFIPGFAEMAAPLYPLTKPGTLFNWGPDQQKAYQEIKQALLTAPALGLPDLTKPFELFVDEKQGYAKGVLTQKLGPWRRPVAYLSKKLDPVAAGWPPCLRMVAAIAVLTKDAGKLTMGQPLVILAPHAVEALVKQPPDRWLSNARMTHYQALLLDTDRVQFGPVVALNPATLLPLPEEGLQHNCLDILAEAHGTRPDLTDQPLPDADHTWYTDGSSLLQEGQRKAGAAVTTETEVIWAKALPAGTSAQRAELIALTQALKMAEGKKLNVYTDSRYAFATAHIHGEIYRRRGWLTSEGKEIKNKDEILALLKALFLPKRLSIIHCPGHQKGHSAEARGNRMADQAARKAAITETPDTSTLLAGKRTADGSEFEKRTADGSEFESPKKKAKVE

SEQ ID NO: 2783 - protein, 2093 aa, synthetic construct
MPAAKRVKLDGGDKKYSIGLDIGTNSVGWAVITDEYKVPSKKFKVLGNTDRHSIKKNLIGALLFDSGETAEATRLKRTARRRYTRRKNRICYLQEIFSNEMAKVDDSFFHRLEESFLVEEDKKHERHPIFGNIVDEVAYHEKYPTIYHLRKKLVDSTDKADLRLIYLALAHMIKFRGHFLIEGDLNPDNSDVDKLFIQLVQTYNQLFEENPINASGVDAKAILSARLSKSRRLENLIAQLPGEKKNGLFGNLIALSLGLTPNFKSNFDLAEDAKLQLSKDTYDDDLDNLLAQIGDQYADLFLAAKNLSDAILLSDILRVNTEITKAPLSASMIKRYDEHHQDLTLLKALVRQQLPEKYKEIFFDQSKNGYAGYIDGGASQEEFYKFIKPILEKMDGTEELLVKLNREDLLRKQRTFDNGSIPHQIHLGELHAILRRQEDFYPFLKDNREKIEKILTFRIPYYVGPLARGNSRFAWMTRKSEETITPWNFEEVVDKGASAQSFIERMTNFDKNLPNEKVLPKHSLLYEYFTVYNELTKVKYVTEGMRKPAFLSGEQKKAIVDLLFKTNRKVTVKQLKEDYFKKIECFDSVEISGVEDRFNASLGTYHDLLKIIKDKDFLDNEENEDILEDIVLTLTLFEDREMIEERLKTYAHLFDDKVMKQLKRRRYTGWGRLSRKLINGIRDKQSGKTILDFLKSDGFANRNFMQLIHDDSLTFKEDIQKAQVSGQGDSLHEHIANLAGSPAIKKGILQTVKVVDELVKVMGRHKPENIVIEMARENQTTQKGQKNSRERMKRIEEGIKELGSQILKEHPVENTQLQNEKLYLYYLQNGRDMYVDQELDINRLSDYDVDHIVPQSFLKDDSIDNKVLTRSDKARGKSDNVPSEEVVKKMKNYWRQLLNAKLITQRKFDNLTKAERGGLSELDKAGFIKRQLVETRQITKHVAQILDSRMNTKYDENDKLIREVKVITLKSKLVSDFRKDFQFYKVREINNYHHAHDAYLNAVVGTALIKKYPKLESEFVYGDYKVYDVRKMIAKSEQEIGKATAKYFFYSNIMNFFKTEITLANGEIRKRPLIETNGETGEIVWDKGRDFATVRKVLSMPQVNIVKKTEVQTGGFSKESILPKRNSDKLIARKKDWDPKKYGGFDSPTVAYSVLVVAKVEKGKSKKLKSVKELLGITIMERSSFEKNPIDFLEAKGYKEVKKDLIIKLPKYSLFELENGRKRMLASAGELQKGNELALPSKYVNFLYLASHYEKLKGSPEDNEQKQLFVEQHKHYLDEIIEQISEFSKRVILADANLDKVLSAYNKHRDKPIREQAENIIHLFTLTNLGAPAAFKYFDTTIDRKRYTSTKEVLDATLIHQSITGLYETRIDLSQLGGDGGEAAAKGGSGGTLNIEDEHRLHETSKEPDVSLGSTWLSDFPQAWAETGGMGLAVRQAPLIIPLKATSTPVSIKQYPMSQEARLGIKPHIQRLLDQGILVPCQSPWNTPLLPVKKPGTNDYRPVQDLREVNKRVEDIHPTVPNPYNLLSGLPPSHQWYTVLDLKDAFFCLRLHPTSQPLFAFEWRDPEMGISGQLTWTRLPQGFKNSPTLFNEALHRDLADFRIQHPDLILLQYVDDLLLAATSELDCQQGTRALLQTLGNLGYRASAKKAQICQKQVKYLGYLLKEGQRWLTEARKETVMGQPTPKTPRQLREFLGKAGFCRLFIPGFAEMAAPLYPLTKPGTLFNWGPDQQKAYQEIKQALLTAPALGLPDLTKPFELFVDEKQGYAKGVLTQKLGPWRRPVAYLSKKLDPVAAGWPPCLRMVAAIAVLTKDAGKLTMGQPLVILAPHAVEALVKQPPDRWLSNARMTHYQALLLDTDRVQFGPVVALNPATLLPLPEEGLQHNCLDILAEAHGTRPDLTDQPLPDADHTWYTDGSSLLQEGQRKAGAAVTTETEVIWAKALPAGTSAQRAELIALTQALKMAEGKKLNVYTDSRYAFATAHIHGEIYRRRGWLTSEGKEIKNKDEILALLKALFLPKRLSIIHCPGHQKGHSAEARGNRMADQAARKAAITETPDTSTLLAGKRTADGSEFEKRTADGSEFESPKKKAKVE

SEQ ID NO: 2784 - protein, 2131 aa, synthetic construct
MPAAKRVKLDGGDKKYSIGLDIGTNSVGWAVITDEYKVPSKKFKVLGNTDRHSIKKNLIGALLFDSGETAEATRLKRTARRRYTRRKNRICYLQEIFSNEMAKVDDSFFHRLEESFLVEEDKKHERHPIFGNIVDEVAYHEKYPTIYHLRKKLVDSTDKADLRLIYLALAHMIKFRGHFLIEGDLNPDNSDVDKLFIQLVQTYNQLFEENPINASGVDAKAILSARLSKSRRLENLIAQLPGEKKNGLFGNLIALSLGLTPNFKSNFDLAEDAKLQLSKDTYDDDLDNLLAQIGDQYADLFLAAKNLSDAILLSDILRVNTEITKAPLSASMIKRYDEHHQDLTLLKALVRQQLPEKYKEIFFDQSKNGYAGYIDGGASQEEFYKFIKPILEKMDGTEELLVKLNREDLLRKQRTFDNGSIPHQIHLGELHAILRRQEDFYPFLKDNREKIEKILTFRIPYYVGPLARGNSRFAWMTRKSEETITPWNFEEVVDKGASAQSFIERMTNFDKNLPNEKVLPKHSLLYEYFTVYNELTKVKYVTEGMRKPAFLSGEQKKAIVDLLFKTNRKVTVKQLKEDYFKKIECFDSVEISGVEDRFNASLGTYHDLLKIIKDKDFLDNEENEDILEDIVLTLTLFEDREMIEERLKTYAHLFDDKVMKQLKRRRYTGWGRLSRKLINGIRDKQSGKTILDFLKSDGFANRNFMQLIHDDSLTFKEDIQKAQVSGQGDSLHEHIANLAGSPAIKKGILQTVKVVDELVKVMGRHKPENIVIEMARENQTTQKGQKNSRERMKRIEEGIKELGSQILKEHPVENTQLQNEKLYLYYLQNGRDMYVDQELDINRLSDYDVDHIVPQSFLKDDSIDNKVLTRSDKARGKSDNVPSEEVVKKMKNYWRQLLNAKLITQRKFDNLTKAERGGLSELDKAGFIKRQLVETRQITKHVAQILDSRMNTKYDENDKLIREVKVITLKSKLVSDFRKDFQFYKVREINNYHHAHDAYLNAVVGTALIKKYPKLESEFVYGDYKVYDVRKMIAKSEQEIGKATAKYFFYSNIMNFFKTEITLANGEIRKRPLIETNGETGEIVWDKGRDFATVRKVLSMPQVNIVKKTEVQTGGFSKESILPKRNSDKLIARKKDWDPKKYGGFDSPTVAYSVLVVAKVEKGKSKKLKSVKELLGITIMERSSFEKNPIDFLEAKGYKEVKKDLIIKLPKYSLFELENGRKRMLASAGELQKGNELALPSKYVNFLYLASHYEKLKGSPEDNEQKQLFVEQHKHYLDEIIEQISEFSKRVILADANLDKVLSAYNKHRDKPIREQAENIIHLFTLTNLGAPAAFKYFDTTIDRKRYTSTKEVLDATLIHQSITGLYETRIDLSQLGGDGGAEAAAKEAAAKEAAAKEAAAKALEAEAAAKEAAAKEAAAKEAAAKAGGTLNIEDEHRLHETSKEPDVSLGSTWLSDFPQAWAETGGMGLAVRQAPLIIPLKATSTPVSIKQYPMSQEARLGIKPHIQRLLDQGILVPCQSPWNTPLLPVKKPGTNDYRPVQDLREVNKRVEDIHPTVPNPYNLLSGLPPSHQWYTVLDLKDAFFCLRLHPTSQPLFAFEWRDPEMGISGQLTWTRLPQGFKNSPTLFNEALHRDLADFRIQHPDLILLQYVDDLLLAATSELDCQQGTRALLQTLGNLGYRASAKKAQICQKQVKYLGYLLKEGQRWLTEARKETVMGQPTPKTPRQLREFLGKAGFCRLFIPGFAEMAAPLYPLTKPGTLFNWGPDQQKAYQEIKQALLTAPALGLPDLTKPFELFVDEKQGYAKGVLTQKLGPWRRPVAYLSKKLDPVAAGWPPCLRMVAAIAVLTKDAGKLTMGQPLVILAPHAVEALVKQPPDRWLSNARMTHYQALLLDTDRVQFGPVVALNPATLLPLPEEGLQHNCLDILAEAHGTRPDLTDQPLPDADHTWYTDGSSLLQEGQRKAGAAVTTETEVIWAKALPAGTSAQRAELIALTQALKMAEGKKLNVYTDSRYAFATAHIHGEIYRRRGWLTSEGKEIKNKDEILALLKALFLPKRLSIIHCPGHQKGHSAEARGNRMADQAARKAAITETPDTSTLLAGKRTADGSEFEKRTADGSEFESPKKKAKVE

SEQ ID NO: 2785 - skipped

SEQ ID NO: 2786 - protein, 2096 aa, synthetic construct
MPAAKRVKLDGGDKKYSIGLDIGTNSVGWAVITDEYKVPSKKFKVLGNTDRHSIKKNLIGALLFDSGETAEATRLKRTARRRYTRRKNRICYLQEIFSNEMAKVDDSFFHRLEESFLVEEDKKHERHPIFGNIVDEVAYHEKYPTIYHLRKKLVDSTDKADLRLIYLALAHMIKFRGHFLIEGDLNPDNSDVDKLFIQLVQTYNQLFEENPINASGVDAKAILSARLSKSRRLENLIAQLPGEKKNGLFGNLIALSLGLTPNFKSNFDLAEDAKLQLSKDTYDDDLDNLLAQIGDQYADLFLAAKNLSDAILLSDILRVNTEITKAPLSASMIKRYDEHHQDLTLLKALVRQQLPEKYKEIFFDQSKNGYAGYIDGGASQEEFYKFIKPILEKMDGTEELLVKLNREDLLRKQRTFDNGSIPHQIHLGELHAILRRQEDFYPFLKDNREKIEKILTFRIPYYVGPLARGNSRFAWMTRKSEETITPWNFEEVVDKGASAQSFIERMTNFDKNLPNEKVLPKHSLLYEYFTVYNELTKVKYVTEGMRKPAFLSGEQKKAIVDLLFKTNRKVTVKQLKEDYFKKIECFDSVEISGVEDRFNASLGTYHDLLKIIKDKDFLDNEENEDILEDIVLTLTLFEDREMIEERLKTYAHLFDDKVMKQLKRRRYTGWGRLSRKLINGIRDKQSGKTILDFLKSDGFANRNFMQLIHDDSLTFKEDIQKAQVSGQGDSLHEHIANLAGSPAIKKGILQTVKVVDELVKVMGRHKPENIVIEMARENQTTQKGQKNSRERMKRIEEGIKELGSQILKEHPVENTQLQNEKLYLYYLQNGRDMYVDQELDINRLSDYDVDHIVPQSFLKDDSIDNKVLTRSDKARGKSDNVPSEEVVKKMKNYWRQLLNAKLITQRKFDNLTKAERGGLSELDKAGFIKRQLVETRQITKHVAQILDSRMNTKYDENDKLIREVKVITLKSKLVSDFRKDFQFYKVREINNYHHAHDAYLNAVVGTALIKKYPKLESEFVYGDYKVYDVRKMIAKSEQEIGKATAKYFFYSNIMNFFKTEITLANGEIRKRPLIETNGETGEIVWDKGRDFATVRKVLSMPQVNIVKKTEVQTGGFSKESILPKRNSDKLIARKKDWDPKKYGGFDSPTVAYSVLVVAKVEKGKSKKLKSVKELLGITIMERSSFEKNPIDFLEAKGYKEVKKDLIIKLPKYSLFELENGRKRMLASAGELQKGNELALPSKYVNFLYLASHYEKLKGSPEDNEQKQLFVEQHKHYLDEIIEQISEFSKRVILADANLDKVLSAYNKHRDKPIREQAENIIHLFTLTNLGAPAAFKYFDTTIDRKRYTSTKEVLDATLIHQSITGLYETRIDLSQLGGDGGPAPGGSEAAAKGGTLNIEDEHRLHETSKEPDVSLGSTWLSDFPQAWAETGGMGLAVRQAPLIIPLKATSTPVSIKQYPMSQEARLGIKPHIQRLLDQGILVPCQSPWNTPLLPVKKPGTNDYRPVQDLREVNKRVEDIHPTVPNPYNLLSGLPPSHQWYTVLDLKDAFFCLRLHPTSQPLFAFEWRDPEMGISGQLTWTRLPQGFKNSPTLFNEALHRDLADFRIQHPDLILLQYVDDLLLAATSELDCQQGTRALLQTLGNLGYRASAKKAQICQKQVKYLGYLLKEGQRWLTEARKETVMGQPTPKTPRQLREFLGKAGFCRLFIPGFAEMAAPLYPLTKPGTLFNWGPDQQKAYQEIKQALLTAPALGLPDLTKPFELFVDEKQGYAKGVLTQKLGPWRRPVAYLSKKLDPVAAGWPPCLRMVAAIAVLTKDAGKLTMGQPLVILAPHAVEALVKQPPDRWLSNARMTHYQALLLDTDRVQFGPVVALNPATLLPLPEEGLQHNCLDILAEAHGTRPDLTDQPLPDADHTWYTDGSSLLQEGQRKAGAAVTTETEVIWAKALPAGTSAQRAELIALTQALKMAEGKKLNVYTDSRYAFATAHIHGEIYRRRGWLTSEGKEIKNKDEILALLKALFLPKRLSIIHCPGHQKGHSAEARGNRMADQAARKAAITETPDTSTLLAGKRTADGSEFEKRTADGSEFESPKKKAKVE

SEQ ID NO: 2787 - protein, 2096 aa, synthetic construct
MPAAKRVKLDGGDKKYSIGLDIGTNSVGWAVITDEYKVPSKKFKVLGNTDRHSIKKNLIGALLFDSGETAEATRLKRTARRRYTRRKNRICYLQEIFSNEMAKVDDSFFHRLEESFLVEEDKKHERHPIFGNIVDEVAYHEKYPTIYHLRKKLVDSTDKADLRLIYLALAHMIKFRGHFLIEGDLNPDNSDVDKLFIQLVQTYNQLFEENPINASGVDAKAILSARLSKSRRLENLIAQLPGEKKNGLFGNLIALSLGLTPNFKSNFDLAEDAKLQLSKDTYDDDLDNLLAQIGDQYADLFLAAKNLSDAILLSDILRVNTEITKAPLSASMIKRYDEHHQDLTLLKALVRQQLPEKYKEIFFDQSKNGYAGYIDGGASQEEFYKFIKPILEKMDGTEELLVKLNREDLLRKQRTFDNGSIPHQIHLGELHAILRRQEDFYPFLKDNREKIEKILTFRIPYYVGPLARGNSRFAWMTRKSEETITPWNFEEVVDKGASAQSFIERMTNFDKNLPNEKVLPKHSLLYEYFTVYNELTKVKYVTEGMRKPAFLSGEQKKAIVDLLFKTNRKVTVKQLKEDYFKKIECFDSVEISGVEDRFNASLGTYHDLLKIIKDKDFLDNEENEDILEDIVLTLTLFEDREMIEERLKTYAHLFDDKVMKQLKRRRYTGWGRLSRKLINGIRDKQSGKTILDFLKSDGFANRNFMQLIHDDSLTFKEDIQKAQVSGQGDSLHEHIANLAGSPAIKKGILQTVKVVDELVKVMGRHKPENIVIEMARENQTTQKGQKNSRERMKRIEEGIKELGSQILKEHPVENTQLQNEKLYLYYLQNGRDMYVDQELDINRLSDYDVDHIVPQSFLKDDSIDNKVLTRSDKARGKSDNVPSEEVVKKMKNYWRQLLNAKLITQRKFDNLTKAERGGLSELDKAGFIKRQLVETRQITKHVAQILDSRMNTKYDENDKLIREVKVITLKSKLVSDFRKDFQFYKVREINNYHHAHDAYLNAVVGTALIKKYPKLESEFVYGDYKVYDVRKMIAKSEQEIGKATAKYFFYSNIMNFFKTEITLANGEIRKRPLIETNGETGEIVWDKGRDFATVRKVLSMPQVNIVKKTEVQTGGFSKESILPKRNSDKLIARKKDWDPKKYGGFDSPTVAYSVLVVAKVEKGKSKKLKSVKELLGITIMERSSFEKNPIDFLEAKGYKEVKKDLIIKLPKYSLFELENGRKRMLASAGELQKGNELALPSKYVNFLYLASHYEKLKGSPEDNEQKQLFVEQHKHYLDEIIEQISEFSKRVILADANLDKVLSAYNKHRDKPIREQAENIIHLFTLTNLGAPAAFKYFDTTIDRKRYTSTKEVLDATLIHQSITGLYETRIDLSQLGGDGGGGSEAAAKGGGGGTLNIEDEHRLHETSKEPDVSLGSTWLSDFPQAWAETGGMGLAVRQAPLIIPLKATSTPVSIKQYPMSQEARLGIKPHIQRLLDQGILVPCQSPWNTPLLPVKKPGTNDYRPVQDLREVNKRVEDIHPTVPNPYNLLSGLPPSHQWYTVLDLKDAFFCLRLHPTSQPLFAFEWRDPEMGISGQLTWTRLPQGFKNSPTLFNEALHRDLADFRIQHPDLILLQYVDDLLLAATSELDCQQGTRALLQTLGNLGYRASAKKAQICQKQVKYLGYLLKEGQRWLTEARKETVMGQPTPKTPRQLREFLGKAGFCRLFIPGFAEMAAPLYPLTKPGTLFNWGPDQQKAYQEIKQALLTAPALGLPDLTKPFELFVDEKQGYAKGVLTQKLGPWRRPVAYLSKKLDPVAAGWPPCLRMVAAIAVLTKDAGKLTMGQPLVILAPHAVEALVKQPPDRWLSNARMTHYQALLLDTDRVQFGPVVALNPATLLPLPEEGLQHNCLDILAEAHGTRPDLTDQPLPDADHTWYTDGSSLLQEGQRKAGAAVTTETEVIWAKALPAGTSAQRAELIALTQALKMAEGKKLNVYTDSRYAFATAHIHGEIYRRRGWLTSEGKEIKNKDEILALLKALFLPKRLSIIHCPGHQKGHSAEARGNRMADQAARKAAITETPDTSTLLAGKRTADGSEFEKRTADGSEFESPKKKAKVE

SEQ ID NO: 2788 - protein, 2100 aa, synthetic construct
MPAAKRVKLDGGDKKYSIGLDIGTNSVGWAVITDEYKVPSKKFKVLGNTDRHSIKKNLIGALLFDSGETAEATRLKRTARRRYTRRKNRICYLQEIFSNEMAKVDDSFFHRLEESFLVEEDKKHERHPIFGNIVDEVAYHEKYPTIYHLRKKLVDSTDKADLRLIYLALAHMIKFRGHFLIEGDLNPDNSDVDKLFIQLVQTYNQLFEENPINASGVDAKAILSARLSKSRRLENLIAQLPGEKKNGLFGNLIALSLGLTPNFKSNFDLAEDAKLQLSKDTYDDDLDNLLAQIGDQYADLFLAAKNLSDAILLSDILRVNTEITKAPLSASMIKRYDEHHQDLTLLKALVRQQLPEKYKEIFFDQSKNGYAGYIDGGASQEEFYKFIKPILEKMDGTEELLVKLNREDLLRKQRTFDNGSIPHQIHLGELHAILRRQEDFYPFLKDNREKIEKILTFRIPYYVGPLARGNSRFAWMTRKSEETITPWNFEEVVDKGASAQSFIERMTNFDKNLPNEKVLPKHSLLYEYFTVYNELTKVKYVTEGMRKPAFLSGEQKKAIVDLLFKTNRKVTVKQLKEDYFKKIECFDSVEISGVEDRFNASLGTYHDLLKIIKDKDFLDNEENEDILEDIVLTLTLFEDREMIEERLKTYAHLFDDKVMKQLKRRRYTGWGRLSRKLINGIRDKQSGKTILDFLKSDGFANRNFMQLIHDDSLTFKEDIQKAQVSGQGDSLHEHIANLAGSPAIKKGILQTVKVVDELVKVMGRHKPENIVIEMARENQTTQKGQKNSRERMKRIEEGIKELGSQILKEHPVENTQLQNEKLYLYYLQNGRDMYVDQELDINRLSDYDVDHIVPQSFLKDDSIDNKVLTRSDKARGKSDNVPSEEVVKKMKNYWRQLLNAKLITQRKFDNLTKAERGGLSELDKAGFIKRQLVETRQITKHVAQILDSRMNTKYDENDKLIREVKVITLKSKLVSDFRKDFQFYKVREINNYHHAHDAYLNAVVGTALIKKYPKLESEFVYGDYKVYDVRKMIAKSEQEIGKATAKYFFYSNIMNFFKTEITLANGEIRKRPLIETNGETGEIVWDKGRDFATVRKVLSMPQVNIVKKTEVQTGGFSKESILPKRNSDKLIARKKDWDPKKYGGFDSPTVAYSVLVVAKVEKGKSKKLKSVKELLGITIMERSSFEKNPIDFLEAKGYKEVKKDLIIKLPKYSLFELENGRKRMLASAGELQKGNELALPSKYVNFLYLASHYEKLKGSPEDNEQKQLFVEQHKHYLDEIIEQISEFSKRVILADANLDKVLSAYNKHRDKPIREQAENIIHLFTLTNLGAPAAFKYFDTTIDRKRYTSTKEVLDATLIHQSITGLYETRIDLSQLGGDGGEAAAKGGGGSEAAAKGGTLNIEDEHRLHETSKEPDVSLGSTWLSDFPQAWAETGGMGLAVRQAPLIIPLKATSTPVSIKQYPMSQEARLGIKPHIQRLLDQGILVPCQSPWNTPLLPVKKPGTNDYRPVQDLREVNKRVEDIHPTVPNPYNLLSGLPPSHQWYTVLDLKDAFFCLRLHPTSQPLFAFEWRDPEMGISGQLTWTRLPQGFKNSPTLFNEALHRDLADFRIQHPDLILLQYVDDLLLAATSELDCQQGTRALLQTLGNLGYRASAKKAQICQKQVKYLGYLLKEGQRWLTEARKETVMGQPTPKTPRQLREFLGKAGFCRLFIPGFAEMAAPLYPLTKPGTLFNWGPDQQKAYQEIKQALLTAPALGLPDLTKPFELFVDEKQGYAKGVLTQKLGPWRRPVAYLSKKLDPVAAGWPPCLRMVAAIAVLTKDAGKLTMGQPLVILAPHAVEALVKQPPDRWLSNARMTHYQALLLDTDRVQFGPVVALNPATLLPLPEEGLQHNCLDILAEAHGTRPDLTDQPLPDADHTWYTDGSSLLQEGQRKAGAAVTTETEVIWAKALPAGTSAQRAELIALTQALKMAEGKKLNVYTDSRYAFATAHIHGEIYRRRGWLTSEGKEIKNKDEILALLKALFLPKRLSIIHCPGHQKGHSAEARGNRMADQAARKAAITETPDTSTLLAGKRTADGSEFEKRTADGSEFESPKKKAKVE

SEQ ID NO: 2789 - protein, 2096 aa, synthetic construct
MPAAKRVKLDGGDKKYSIGLDIGTNSVGWAVITDEYKVPSKKFKVLGNTDRHSIKKNLIGALLFDSGETAEATRLKRTARRRYTRRKNRICYLQEIFSNEMAKVDDSFFHRLEESFLVEEDKKHERHPIFGNIVDEVAYHEKYPTIYHLRKKLVDSTDKADLRLIYLALAHMIKFRGHFLIEGDLNPDNSDVDKLFIQLVQTYNQLFEENPINASGVDAKAILSARLSKSRRLENLIAQLPGEKKNGLFGNLIALSLGLTPNFKSNFDLAEDAKLQLSKDTYDDDLDNLLAQIGDQYADLFLAAKNLSDAILLSDILRVNTEITKAPLSASMIKRYDEHHQDLTLLKALVRQQLPEKYKEIFFDQSKNGYAGYIDGGASQEEFYKFIKPILEKMDGTEELLVKLNREDLLRKQRTFDNGSIPHQIHLGELHAILRRQEDFYPFLKDNREKIEKILTFRIPYYVGPLARGNSRFAWMTRKSEETITPWNFEEVVDKGASAQSFIERMTNFDKNLPNEKVLPKHSLLYEYFTVYNELTKVKYVTEGMRKPAFLSGEQKKAIVDLLFKTNRKVTVKQLKEDYFKKIECFDSVEISGVEDRFNASLGTYHDLLKIIKDKDFLDNEENEDILEDIVLTLTLFEDREMIEERLKTYAHLFDDKVMKQLKRRRYTGWGRLSRKLINGIRDKQSGKTILDFLKSDGFANRNFMQLIHDDSLTFKEDIQKAQVSGQGDSLHEHIANLAGSPAIKKGILQTVKVVDELVKVMGRHKPENIVIEMARENQTTQKGQKNSRERMKRIEEGIKELGSQILKEHPVENTQLQNEKLYLYYLQNGRDMYVDQELDINRLSDYDVDHIVPQSFLKDDSIDNKVLTRSDKARGKSDNVPSEEVVKKMKNYWRQLLNAKLITQRKFDNLTKAERGGLSELDKAGFIKRQLVETRQITKHVAQILDSRMNTKYDENDKLIREVKVITLKSKLVSDFRKDFQFYKVREINNYHHAHDAYLNAVVGTALIKKYPKLESEFVYGDYKVYDVRKMIAKSEQEIGKATAKYFFYSNIMNFFKTEITLANGEIRKRPLIETNGETGEIVWDKGRDFATVRKVLSMPQVNIVKKTEVQTGGFSKESILPKRNSDKLIARKKDWDPKKYGGFDSPTVAYSVLVVAKVEKGKSKKLKSVKELLGITIMERSSFEKNPIDFLEAKGYKEVKKDLIIKLPKYSLFELENGRKRMLASAGELQKGNELALPSKYVNFLYLASHYEKLKGSPEDNEQKQLFVEQHKHYLDEIIEQISEFSKRVILADANLDKVLSAYNKHRDKPIREQAENIIHLFTLTNLGAPAAFKYFDTTIDRKRYTSTKEVLDATLIHQSITGLYETRIDLSQLGGDGGEAAAKGGGGSSGGTLNIEDEHRLHETSKEPDVSLGSTWLSDFPQAWAETGGMGLAVRQAPLIIPLKATSTPVSIKQYPMSQEARLGIKPHIQRLLDQGILVPCQSPWNTPLLPVKKPGTNDYRPVQDLREVNKRVEDIHPTVPNPYNLLSGLPPSHQWYTVLDLKDAFFCLRLHPTSQPLFAFEWRDPEMGISGQLTWTRLPQGFKNSPTLFNEALHRDLADFRIQHPDLILLQYVDDLLLAATSELDCQQGTRALLQTLGNLGYRASAKKAQICQKQVKYLGYLLKEGQRWLTEARKETVMGQPTPKTPRQLREFLGKAGFCRLFIPGFAEMAAPLYPLTKPGTLFNWGPDQQKAYQEIKQALLTAPALGLPDLTKPFELFVDEKQGYAKGVLTQKLGPWRRPVAYLSKKLDPVAAGWPPCLRMVAAIAVLTKDAGKLTMGQPLVILAPHAVEALVKQPPDRWLSNARMTHYQALLLDTDRVQFGPVVALNPATLLPLPEEGLQHNCLDILAEAHGTRPDLTDQPLPDADHTWYTDGSSLLQEGQRKAGAAVTTETEVIWAKALPAGTSAQRAELIALTQALKMAEGKKLNVYTDSRYAFATAHIHGEIYRRRGWLTSEGKEIKNKDEILALLKALFLPKRLSIIHCPGHQKGHSAEARGNRMADQAARKAAITETPDTSTLLAGKRTADGSEFEKRTADGSEFESPKKKAKVE

SEQ ID NO: 2790 - protein, 2092 aa, synthetic construct
MPAAKRVKLDGGDKKYSIGLDIGTNSVGWAVITDEYKVPSKKFKVLGNTDRHSIKKNLIGALLFDSGETAEATRLKRTARRRYTRRKNRICYLQEIFSNEMAKVDDSFFHRLEESFLVEEDKKHERHPIFGNIVDEVAYHEKYPTIYHLRKKLVDSTDKADLRLIYLALAHMIKFRGHFLIEGDLNPDNSDVDKLFIQLVQTYNQLFEENPINASGVDAKAILSARLSKSRRLENLIAQLPGEKKNGLFGNLIALSLGLTPNFKSNFDLAEDAKLQLSKDTYDDDLDNLLAQIGDQYADLFLAAKNLSDAILLSDILRVNTEITKAPLSASMIKRYDEHHQDLTLLKALVRQQLPEKYKEIFFDQSKNGYAGYIDGGASQEEFYKFIKPILEKMDGTEELLVKLNREDLLRKQRTFDNGSIPHQIHLGELHAILRRQEDFYPFLKDNREKIEKILTFRIPYYVGPLARGNSRFAWMTRKSEETITPWNFEEVVDKGASAQSFIERMTNFDKNLPNEKVLPKHSLLYEYFTVYNELTKVKYVTEGMRKPAFLSGEQKKAIVDLLFKTNRKVTVKQLKEDYFKKIECFDSVEISGVEDRFNASLGTYHDLLKIIKDKDFLDNEENEDILEDIVLTLTLFEDREMIEERLKTYAHLFDDKVMKQLKRRRYTGWGRLSRKLINGIRDKQSGKTILDFLKSDGFANRNFMQLIHDDSLTFKEDIQKAQVSGQGDSLHEHIANLAGSPAIKKGILQTVKVVDELVKVMGRHKPENIVIEMARENQTTQKGQKNSRERMKRIEEGIKELGSQILKEHPVENTQLQNEKLYLYYLQNGRDMYVDQELDINRLSDYDVDHIVPQSFLKDDSIDNKVLTRSDKARGKSDNVPSEEVVKKMKNYWRQLLNAKLITQRKFDNLTKAERGGLSELDKAGFIKRQLVETRQITKHVAQILDSRMNTKYDENDKLIREVKVITLKSKLVSDFRKDFQFYKVREINNYHHAHDAYLNAVVGTALIKKYPKLESEFVYGDYKVYDVRKMIAKSEQEIGKATAKYFFYSNIMNFFKTEITLANGEIRKRPLIETNGETGEIVWDKGRDFATVRKVLSMPQVNIVKKTEVQTGGFSKESILPKRNSDKLIARKKDWDPKKYGGFDSPTVAYSVLVVAKVEKGKSKKLKSVKELLGITIMERSSFEKNPIDFLEAKGYKEVKKDLIIKLPKYSLFELENGRKRMLASAGELQKGNELALPSKYVNFLYLASHYEKLKGSPEDNEQKQLFVEQHKHYLDEIIEQISEFSKRVILADANLDKVLSAYNKHRDKPIREQAENIIHLFTLTNLGAPAAFKYFDTTIDRKRYTSTKEVLDATLIHQSITGLYETRIDLSQLGGDGGGGGGGGGGGTLNIEDEHRLHETSKEPDVSLGSTWLSDFPQAWAETGGMGLAVRQAPLIIPLKATSTPVSIKQYPMSQEARLGIKPHIQRLLDQGILVPCQSPWNTPLLPVKKPGTNDYRPVQDLREVNKRVEDIHPTVPNPYNLLSGLPPSHQWYTVLDLKDAFFCLRLHPTSQPLFAFEWRDPEMGISGQLTWTRLPQGFKNSPTLFNEALHRDLADFRIQHPDLILLQYVDDLLLAATSELDCQQGTRALLQTLGNLGYRASAKKAQICQKQVKYLGYLLKEGQRWLTEARKETVMGQPTPKTPRQLREFLGKAGFCRLFIPGFAEMAAPLYPLTKPGTLFNWGPDQQKAYQEIKQALLTAPALGLPDLTKPFELFVDEKQGYAKGVLTQKLGPWRRPVAYLSKKLDPVAAGWPPCLRMVAAIAVLTKDAGKLTMGQPLVILAPHAVEALVKQPPDRWLSNARMTHYQALLLDTDRVQFGPVVALNPATLLPLPEEGLQHNCLDILAEAHGTRPDLTDQPLPDADHTWYTDGSSLLQEGQRKAGAAVTTETEVIWAKALPAGTSAQRAELIALTQALKMAEGKKLNVYTDSRYAFATAHIHGEIYRRRGWLTSEGKEIKNKDEILALLKALFLPKRLSIIHCPGHQKGHSAEARGNRMADQAARKAAITETPDTSTLLAGKRTADGSEFEKRTADGSEFESPKKKAKVE

SEQ ID NO: 2791 - protein, 2100 aa, synthetic construct
MPAAKRVKLDGGDKKYSIGLDIGTNSVGWAVITDEYKVPSKKFKVLGNTDRHSIKKNLIGALLFDSGETAEATRLKRTARRRYTRRKNRICYLQEIFSNEMAKVDDSFFHRLEESFLVEEDKKHERHPIFGNIVDEVAYHEKYPTIYHLRKKLVDSTDKADLRLIYLALAHMIKFRGHFLIEGDLNPDNSDVDKLFIQLVQTYNQLFEENPINASGVDAKAILSARLSKSRRLENLIAQLPGEKKNGLFGNLIALSLGLTPNFKSNFDLAEDAKLQLSKDTYDDDLDNLLAQIGDQYADLFLAAKNLSDAILLSDILRVNTEITKAPLSASMIKRYDEHHQDLTLLKALVRQQLPEKYKEIFFDQSKNGYAGYIDGGASQEEFYKFIKPILEKMDGTEELLVKLNREDLLRKQRTFDNGSIPHQIHLGELHAILRRQEDFYPFLKDNREKIEKILTFRIPYYVGPLARGNSRFAWMTRKSEETITPWNFEEVVDKGASAQSFIERMTNFDKNLPNEKVLPKHSLLYEYFTVYNELTKVKYVTEGMRKPAFLSGEQKKAIVDLLFKTNRKVTVKQLKEDYFKKIECFDSVEISGVEDRFNASLGTYHDLLKIIKDKDFLDNEENEDILEDIVLTLTLFEDREMIEERLKTYAHLFDDKVMKQLKRRRYTGWGRLSRKLINGIRDKQSGKTILDFLKSDGFANRNFMQLIHDDSLTFKEDIQKAQVSGQGDSLHEHIANLAGSPAIKKGILQTVKVVDELVKVMGRHKPENIVIEMARENQTTQKGQKNSRERMKRIEEGIKELGSQILKEHPVENTQLQNEKLYLYYLQNGRDMYVDQELDINRLSDYDVDHIVPQSFLKDDSIDNKVLTRSDKARGKSDNVPSEEVVKKMKNYWRQLLNAKLITQRKFDNLTKAERGGLSELDKAGFIKRQLVETRQITKHVAQILDSRMNTKYDENDKLIREVKVITLKSKLVSDFRKDFQFYKVREINNYHHAHDAYLNAVVGTALIKKYPKLESEFVYGDYKVYDVRKMIAKSEQEIGKATAKYFFYSNIMNFFKTEITLANGEIRKRPLIETNGETGEIVWDKGRDFATVRKVLSMPQVNIVKKTEVQTGGFSKESILPKRNSDKLIARKKDWDPKKYGGFDSPTVAYSVLVVAKVEKGKSKKLKSVKELLGITIMERSSFEKNPIDFLEAKGYKEVKKDLIIKLPKYSLFELENGRKRMLASAGELQKGNELALPSKYVNFLYLASHYEKLKGSPEDNEQKQLFVEQHKHYLDEIIEQISEFSKRVILADANLDKVLSAYNKHRDKPIREQAENIIHLFTLTNLGAPAAFKYFDTTIDRKRYTSTKEVLDATLIHQSITGLYETRIDLSQLGGDGGEAAAKEAAAKEAAAKGGTLNIEDEHRLHETSKEPDVSLGSTWLSDFPQAWAETGGMGLAVRQAPLIIPLKATSTPVSIKQYPMSQEARLGIKPHIQRLLDQGILVPCQSPWNTPLLPVKKPGTNDYRPVQDLREVNKRVEDIHPTVPNPYNLLSGLPPSHQWYTVLDLKDAFFCLRLHPTSQPLFAFEWRDPEMGISGQLTWTRLPQGFKNSPTLFNEALHRDLADFRIQHPDLILLQYVDDLLLAATSELDCQQGTRALLQTLGNLGYRASAKKAQICQKQVKYLGYLLKEGQRWLTEARKETVMGQPTPKTPRQLREFLGKAGFCRLFIPGFAEMAAPLYPLTKPGTLFNWGPDQQKAYQEIKQALLTAPALGLPDLTKPFELFVDEKQGYAKGVLTQKLGPWRRPVAYLSKKLDPVAAGWPPCLRMVAAIAVLTKDAGKLTMGQPLVILAPHAVEALVKQPPDRWLSNARMTHYQALLLDTDRVQFGPVVALNPATLLPLPEEGLQHNCLDILAEAHGTRPDLTDQPLPDADHTWYTDGSSLLQEGQRKAGAAVTTETEVIWAKALPAGTSAQRAELIALTQALKMAEGKKLNVYTDSRYAFATAHIHGEIYRRRGWLTSEGKEIKNKDEILALLKALFLPKRLSIIHCPGHQKGHSAEARGNRMADQAARKAAITETPDTSTLLAGKRTADGSEFEKRTADGSEFESPKKKAKVE

SEQ ID NO: 2792 - protein, 2096 aa, synthetic construct
MPAAKRVKLDGGDKKYSIGLDIGTNSVGWAVITDEYKVPSKKFKVLGNTDRHSIKKNLIGALLFDSGETAEATRLKRTARRRYTRRKNRICYLQEIFSNEMAKVDDSFFHRLEESFLVEEDKKHERHPIFGNIVDEVAYHEKYPTIYHLRKKLVDSTDKADLRLIYLALAHMIKFRGHFLIEGDLNPDNSDVDKLFIQLVQTYNQLFEENPINASGVDAKAILSARLSKSRRLENLIAQLPGEKKNGLFGNLIALSLGLTPNFKSNFDLAEDAKLQLSKDTYDDDLDNLLAQIGDQYADLFLAAKNLSDAILLSDILRVNTEITKAPLSASMIKRYDEHHQDLTLLKALVRQQLPEKYKEIFFDQSKNGYAGYIDGGASQEEFYKFIKPILEKMDGTEELLVKLNREDLLRKQRTFDNGSIPHQIHLGELHAILRRQEDFYPFLKDNREKIEKILTFRIPYYVGPLARGNSRFAWMTRKSEETITPWNFEEVVDKGASAQSFIERMTNFDKNLPNEKVLPKHSLLYEYFTVYNELTKVKYVTEGMRKPAFLSGEQKKAIVDLLFKTNRKVTVKQLKEDYFKKIECFDSVEISGVEDRFNASLGTYHDLLKIIKDKDFLDNEENEDILEDIVLTLTLFEDREMIEERLKTYAHLFDDKVMKQLKRRRYTGWGRLSRKLINGIRDKQSGKTILDFLKSDGFANRNFMQLIHDDSLTFKEDIQKAQVSGQGDSLHEHIANLAGSPAIKKGILQTVKVVDELVKVMGRHKPENIVIEMARENQTTQKGQKNSRERMKRIEEGIKELGSQILKEHPVENTQLQNEKLYLYYLQNGRDMYVDQELDINRLSDYDVDHIVPQSFLKDDSIDNKVLTRSDKARGKSDNVPSEEVVKKMKNYWRQLLNAKLITQRKFDNLTKAERGGLSELDKAGFIKRQLVETRQITKHVAQILDSRMNTKYDENDKLIREVKVITLKSKLVSDFRKDFQFYKVREINNYHHAHDAYLNAVVGTALIKKYPKLESEFVYGDYKVYDVRKMIAKSEQEIGKATAKYFFYSNIMNFFKTEITLANGEIRKRPLIETNGETGEIVWDKGRDFATVRKVLSMPQVNIVKKTEVQTGGFSKESILPKRNSDKLIARKKDWDPKKYGGFDSPTVAYSVLVVAKVEKGKSKKLKSVKELLGITIMERSSFEKNPIDFLEAKGYKEVKKDLIIKLPKYSLFELENGRKRMLASAGELQKGNELALPSKYVNFLYLASHYEKLKGSPEDNEQKQLFVEQHKHYLDEIIEQISEFSKRVILADANLDKVLSAYNKHRDKPIREQAENIIHLFTLTNLGAPAAFKYFDTTIDRKRYTSTKEVLDATLIHQSITGLYETRIDLSQLGGDGGEAAAKGSSPAPGGTLNIEDEHRLHETSKEPDVSLGSTWLSDFPQAWAETGGMGLAVRQAPLIIPLKATSTPVSIKQYPMSQEARLGIKPHIQRLLDQGILVPCQSPWNTPLLPVKKPGTNDYRPVQDLREVNKRVEDIHPTVPNPYNLLSGLPPSHQWYTVLDLKDAFFCLRLHPTSQPLFAFEWRDPEMGISGQLTWTRLPQGFKNSPTLFNEALHRDLADFRIQHPDLILLQYVDDLLLAATSELDCQQGTRALLQTLGNLGYRASAKKAQICQKQVKYLGYLLKEGQRWLTEARKETVMGQPTPKTPRQLREFLGKAGFCRLFIPGFAEMAAPLYPLTKPGTLFNWGPDQQKAYQEIKQALLTAPALGLPDLTKPFELFVDEKQGYAKGVLTQKLGPWRRPVAYLSKKLDPVAAGWPPCLRMVAAIAVLTKDAGKLTMGQPLVILAPHAVEALVKQPPDRWLSNARMTHYQALLLDTDRVQFGPVVALNPATLLPLPEEGLQHNCLDILAEAHGTRPDLTDQPLPDADHTWYTDGSSLLQEGQRKAGAAVTTETEVIWAKALPAGTSAQRAELIALTQALKMAEGKKLNVYTDSRYAFATAHIHGEIYRRRGWLTSEGKEIKNKDEILALLKALFLPKRLSIIHCPGHQKGHSAEARGNRMADQAARKAAITETPDTSTLLAGKRTADGSEFEKRTADGSEFESPKKKAKVE

SEQ ID NO: 2793 - protein, 2094 aa, synthetic construct
MPAAKRVKLDGGDKKYSIGLDIGTNSVGWAVITDEYKVPSKKFKVLGNTDRHSIKKNLIGALLFDSGETAEATRLKRTARRRYTRRKNRICYLQEIFSNEMAKVDDSFFHRLEESFLVEEDKKHERHPIFGNIVDEVAYHEKYPTIYHLRKKLVDSTDKADLRLIYLALAHMIKFRGHFLIEGDLNPDNSDVDKLFIQLVQTYNQLFEENPINASGVDAKAILSARLSKSRRLENLIAQLPGEKKNGLFGNLIALSLGLTPNFKSNFDLAEDAKLQLSKDTYDDDLDNLLAQIGDQYADLFLAAKNLSDAILLSDILRVNTEITKAPLSASMIKRYDEHHQDLTLLKALVRQQLPEKYKEIFFDQSKNGYAGYIDGGASQEEFYKFIKPILEKMDGTEELLVKLNREDLLRKQRTFDNGSIPHQIHLGELHAILRRQEDFYPFLKDNREKIEKILTFRIPYYVGPLARGNSRFAWMTRKSEETITPWNFEEVVDKGASAQSFIERMTNFDKNLPNEKVLPKHSLLYEYFTVYNELTKVKYVTEGMRKPAFLSGEQKKAIVDLLFKTNRKVTVKQLKEDYFKKIECFDSVEISGVEDRFNASLGTYHDLLKIIKDKDFLDNEENEDILEDIVLTLTLFEDREMIEERLKTYAHLFDDKVMKQLKRRRYTGWGRLSRKLINGIRDKQSGKTILDFLKSDGFANRNFMQLIHDDSLTFKEDIQKAQVSGQGDSLHEHIANLAGSPAIKKGILQTVKVVDELVKVMGRHKPENIVIEMARENQTTQKGQKNSRERMKRIEEGIKELGSQILKEHPVENTQLQNEKLYLYYLQNGRDMYVDQELDINRLSDYDVDHIVPQSFLKDDSIDNKVLTRSDKARGKSDNVPSEEVVKKMKNYWRQLLNAKLITQRKFDNLTKAERGGLSELDKAGFIKRQLVETRQITKHVAQILDSRMNTKYDENDKLIREVKVITLKSKLVSDFRKDFQFYKVREINNYHHAHDAYLNAVVGTALIKKYPKLESEFVYGDYKVYDVRKMIAKSEQEIGKATAKYFFYSNIMNFFKTEITLANGEIRKRPLIETNGETGEIVWDKGRDFATVRKVLSMPQVNIVKKTEVQTGGFSKESILPKRNSDKLIARKKDWDPKKYGGFDSPTVAYSVLVVAKVEKGKSKKLKSVKELLGITIMERSSFEKNPIDFLEAKGYKEVKKDLIIKLPKYSLFELENGRKRMLASAGELQKGNELALPSKYVNFLYLASHYEKLKGSPEDNEQKQLFVEQHKHYLDEIIEQISEFSKRVILADANLDKVLSAYNKHRDKPIREQAENIIHLFTLTNLGAPAAFKYFDTTIDRKRYTSTKEVLDATLIHQSITGLYETRIDLSQLGGDGGPAPGGGGSSGGTLNIEDEHRLHETSKEPDVSLGSTWLSDFPQAWAETGGMGLAVRQAPLIIPLKATSTPVSIKQYPMSQEARLGIKPHIQRLLDQGILVPCQSPWNTPLLPVKKPGTNDYRPVQDLREVNKRVEDIHPTVPNPYNLLSGLPPSHQWYTVLDLKDAFFCLRLHPTSQPLFAFEWRDPEMGISGQLTWTRLPQGFKNSPTLFNEALHRDLADFRIQHPDLILLQYVDDLLLAATSELDCQQGTRALLQTLGNLGYRASAKKAQICQKQVKYLGYLLKEGQRWLTEARKETVMGQPTPKTPRQLREFLGKAGFCRLFIPGFAEMAAPLYPLTKPGTLFNWGPDQQKAYQEIKQALLTAPALGLPDLTKPFELFVDEKQGYAKGVLTQKLGPWRRPVAYLSKKLDPVAAGWPPCLRMVAAIAVLTKDAGKLTMGQPLVILAPHAVEALVKQPPDRWLSNARMTHYQALLLDTDRVQFGPVVALNPATLLPLPEEGLQHNCLDILAEAHGTRPDLTDQPLPDADHTWYTDGSSLLQEGQRKAGAAVTTETEVIWAKALPAGTSAQRAELIALTQALKMAEGKKLNVYTDSRYAFATAHIHGEIYRRRGWLTSEGKEIKNKDEILALLKALFLPKRLSIIHCPGHQKGHSAEARGNRMADQAARKAAITETPDTSTLLAGKRTADGSEFEKRTADGSEFESPKKKAKVE

SEQ ID NO: 2794 - protein, 2096 aa, synthetic construct
MPAAKRVKLDGGDKKYSIGLDIGTNSVGWAVITDEYKVPSKKFKVLGNTDRHSIKKNLIGALLFDSGETAEATRLKRTARRRYTRRKNRICYLQEIFSNEMAKVDDSFFHRLEESFLVEEDKKHERHPIFGNIVDEVAYHEKYPTIYHLRKKLVDSTDKADLRLIYLALAHMIKFRGHFLIEGDLNPDNSDVDKLFIQLVQTYNQLFEENPINASGVDAKAILSARLSKSRRLENLIAQLPGEKKNGLFGNLIALSLGLTPNFKSNFDLAEDAKLQLSKDTYDDDLDNLLAQIGDQYADLFLAAKNLSDAILLSDILRVNTEITKAPLSASMIKRYDEHHQDLTLLKALVRQQLPEKYKEIFFDQSKNGYAGYIDGGASQEEFYKFIKPILEKMDGTEELLVKLNREDLLRKQRTFDNGSIPHQIHLGELHAILRRQEDFYPFLKDNREKIEKILTFRIPYYVGPLARGNSRFAWMTRKSEETITPWNFEEVVDKGASAQSFIERMTNFDKNLPNEKVLPKHSLLYEYFTVYNELTKVKYVTEGMRKPAFLSGEQKKAIVDLLFKTNRKVTVKQLKEDYFKKIECFDSVEISGVEDRFNASLGTYHDLLKIIKDKDFLDNEENEDILEDIVLTLTLFEDREMIEERLKTYAHLFDDKVMKQLKRRRYTGWGRLSRKLINGIRDKQSGKTILDFLKSDGFANRNFMQLIHDDSLTFKEDIQKAQVSGQGDSLHEHIANLAGSPAIKKGILQTVKVVDELVKVMGRHKPENIVIEMARENQTTQKGQKNSRERMKRIEEGIKELGSQILKEHPVENTQLQNEKLYLYYLQNGRDMYVDQELDINRLSDYDVDHIVPQSFLKDDSIDNKVLTRSDKARGKSDNVPSEEVVKKMKNYWRQLLNAKLITQRKFDNLTKAERGGLSELDKAGFIKRQLVETRQITKHVAQILDSRMNTKYDENDKLIREVKVITLKSKLVSDFRKDFQFYKVREINNYHHAHDAYLNAVVGTALIKKYPKLESEFVYGDYKVYDVRKMIAKSEQEIGKATAKYFFYSNIMNFFKTEITLANGEIRKRPLIETNGETGEIVWDKGRDFATVRKVLSMPQVNIVKKTEVQTGGFSKESILPKRNSDKLIARKKDWDPKKYGGFDSPTVAYSVLVVAKVEKGKSKKLKSVKELLGITIMERSSFEKNPIDFLEAKGYKEVKKDLIIKLPKYSLFELENGRKRMLASAGELQKGNELALPSKYVNFLYLASHYEKLKGSPEDNEQKQLFVEQHKHYLDEIIEQISEFSKRVILADANLDKVLSAYNKHRDKPIREQAENIIHLFTLTNLGAPAAFKYFDTTIDRKRYTSTKEVLDATLIHQSITGLYETRIDLSQLGGDGGEAAAKGGSGGGGGTLNIEDEHRLHETSKEPDVSLGSTWLSDFPQAWAETGGMGLAVRQAPLIIPLKATSTPVSIKQYPMSQEARLGIKPHIQRLLDQGILVPCQSPWNTPLLPVKKPGTNDYRPVQDLREVNKRVEDIHPTVPNPYNLLSGLPPSHQWYTVLDLKDAFFCLRLHPTSQPLFAFEWRDPEMGISGQLTWTRLPQGFKNSPTLFNEALHRDLADFRIQHPDLILLQYVDDLLLAATSELDCQQGTRALLQTLGNLGYRASAKKAQICQKQVKYLGYLLKEGQRWLTEARKETVMGQPTPKTPRQLREFLGKAGFCRLFIPGFAEMAAPLYPLTKPGTLFNWGPDQQKAYQEIKQALLTAPALGLPDLTKPFELFVDEKQGYAKGVLTQKLGPWRRPVAYLSKKLDPVAAGWPPCLRMVAAIAVLTKDAGKLTMGQPLVILAPHAVEALVKQPPDRWLSNARMTHYQALLLDTDRVQFGPVVALNPATLLPLPEEGLQHNCLDILAEAHGTRPDLTDQPLPDADHTWYTDGSSLLQEGQRKAGAAVTTETEVIWAKALPAGTSAQRAELIALTQALKMAEGKKLNVYTDSRYAFATAHIHGEIYRRRGWLTSEGKEIKNKDEILALLKALFLPKRLSIIHCPGHQKGHSAEARGNRMADQAARKAAITETPDTSTLLAGKRTADGSEFEKRTADGSEFESPKKKAKVE

SEQ ID NO: 2795 - protein, 2097 aa, synthetic construct
MPAAKRVKLDGGDKKYSIGLDIGTNSVGWAVITDEYKVPSKKFKVLGNTDRHSIKKNLIGALLFDSGETAEATRLKRTARRRYTRRKNRICYLQEIFSNEMAKVDDSFFHRLEESFLVEEDKKHERHPIFGNIVDEVAYHEKYPTIYHLRKKLVDSTDKADLRLIYLALAHMIKFRGHFLIEGDLNPDNSDVDKLFIQLVQTYNQLFEENPINASGVDAKAILSARLSKSRRLENLIAQLPGEKKNGLFGNLIALSLGLTPNFKSNFDLAEDAKLQLSKDTYDDDLDNLLAQIGDQYADLFLAAKNLSDAILLSDILRVNTEITKAPLSASMIKRYDEHHQDLTLLKALVRQQLPEKYKEIFFDQSKNGYAGYIDGGASQEEFYKFIKPILEKMDGTEELLVKLNREDLLRKQRTFDNGSIPHQIHLGELHAILRRQEDFYPFLKDNREKIEKILTFRIPYYVGPLARGNSRFAWMTRKSEETITPWNFEEVVDKGASAQSFIERMTNFDKNLPNEKVLPKHSLLYEYFTVYNELTKVKYVTEGMRKPAFLSGEQKKAIVDLLFKTNRKVTVKQLKEDYFKKIECFDSVEISGVEDRFNASLGTYHDLLKIIKDKDFLDNEENEDILEDIVLTLTLFEDREMIEERLKTYAHLFDDKVMKQLKRRRYTGWGRLSRKLINGIRDKQSGKTILDFLKSDGFANRNFMQLIHDDSLTFKEDIQKAQVSGQGDSLHEHIANLAGSPAIKKGILQTVKVVDELVKVMGRHKPENIVIEMARENQTTQKGQKNSRERMKRIEEGIKELGSQILKEHPVENTQLQNEKLYLYYLQNGRDMYVDQELDINRLSDYDVDHIVPQSFLKDDSIDNKVLTRSDKARGKSDNVPSEEVVKKMKNYWRQLLNAKLITQRKFDNLTKAERGGLSELDKAGFIKRQLVETRQITKHVAQILDSRMNTKYDENDKLIREVKVITLKSKLVSDFRKDFQFYKVREINNYHHAHDAYLNAVVGTALIKKYPKLESEFVYGDYKVYDVRKMIAKSEQEIGKATAKYFFYSNIMNFFKTEITLANGEIRKRPLIETNGETGEIVWDKGRDFATVRKVLSMPQVNIVKKTEVQTGGFSKESILPKRNSDKLIARKKDWDPKKYGGFDSPTVAYSVLVVAKVEKGKSKKLKSVKELLGITIMERSSFEKNPIDFLEAKGYKEVKKDLIIKLPKYSLFELENGRKRMLASAGELQKGNELALPSKYVNFLYLASHYEKLKGSPEDNEQKQLFVEQHKHYLDEIIEQISEFSKRVILADANLDKVLSAYNKHRDKPIREQAENIIHLFTLTNLGAPAAFKYFDTTIDRKRYTSTKEVLDATLIHQSITGLYETRIDLSQLGGDGGGGSGGSGGSGGSGGTLNIEDEHRLHETSKEPDVSLGSTWLSDFPQAWAETGGMGLAVRQAPLIIPLKATSTPVSIKQYPMSQEARLGIKPHIQRLLDQGILVPCQSPWNTPLLPVKKPGTNDYRPVQDLREVNKRVEDIHPTVPNPYNLLSGLPPSHQWYTVLDLKDAFFCLRLHPTSQPLFAFEWRDPEMGISGQLTWTRLPQGFKNSPTLFNEALHRDLADFRIQHPDLILLQYVDDLLLAATSELDCQQGTRALLQTLGNLGYRASAKKAQICQKQVKYLGYLLKEGQRWLTEARKETVMGQPTPKTPRQLREFLGKAGFCRLFIPGFAEMAAPLYPLTKPGTLFNWGPDQQKAYQEIKQALLTAPALGLPDLTKPFELFVDEKQGYAKGVLTQKLGPWRRPVAYLSKKLDPVAAGWPPCLRMVAAIAVLTKDAGKLTMGQPLVILAPHAVEALVKQPPDRWLSNARMTHYQALLLDTDRVQFGPVVALNPATLLPLPEEGLQHNCLDILAEAHGTRPDLTDQPLPDADHTWYTDGSSLLQEGQRKAGAAVTTETEVIWAKALPAGTSAQRAELIALTQALKMAEGKKLNVYTDSRYAFATAHIHGEIYRRRGWLTSEGKEIKNKDEILALLKALFLPKRLSIIHCPGHQKGHSAEARGNRMADQAARKAAITETPDTSTLLAGKRTADGSEFEKRTADGSEFESPKKKAKVE

SEQ ID NO: 2796 - skipped

SEQ ID NO: 2797 - protein, 2098 aa, synthetic construct
MPAAKRVKLDGGDKKYSIGLDIGTNSVGWAVITDEYKVPSKKFKVLGNTDRHSIKKNLIGALLFDSGETAEATRLKRTARRRYTRRKNRICYLQEIFSNEMAKVDDSFFHRLEESFLVEEDKKHERHPIFGNIVDEVAYHEKYPTIYHLRKKLVDSTDKADLRLIYLALAHMIKFRGHFLIEGDLNPDNSDVDKLFIQLVQTYNQLFEENPINASGVDAKAILSARLSKSRRLENLIAQLPGEKKNGLFGNLIALSLGLTPNFKSNFDLAEDAKLQLSKDTYDDDLDNLLAQIGDQYADLFLAAKNLSDAILLSDILRVNTEITKAPLSASMIKRYDEHHQDLTLLKALVRQQLPEKYKEIFFDQSKNGYAGYIDGGASQEEFYKFIKPILEKMDGTEELLVKLNREDLLRKQRTFDNGSIPHQIHLGELHAILRRQEDFYPFLKDNREKIEKILTFRIPYYVGPLARGNSRFAWMTRKSEETITPWNFEEVVDKGASAQSFIERMTNFDKNLPNEKVLPKHSLLYEYFTVYNELTKVKYVTEGMRKPAFLSGEQKKAIVDLLFKTNRKVTVKQLKEDYFKKIECFDSVEISGVEDRFNASLGTYHDLLKIIKDKDFLDNEENEDILEDIVLTLTLFEDREMIEERLKTYAHLFDDKVMKQLKRRRYTGWGRLSRKLINGIRDKQSGKTILDFLKSDGFANRNFMQLIHDDSLTFKEDIQKAQVSGQGDSLHEHIANLAGSPAIKKGILQTVKVVDELVKVMGRHKPENIVIEMARENQTTQKGQKNSRERMKRIEEGIKELGSQILKEHPVENTQLQNEKLYLYYLQNGRDMYVDQELDINRLSDYDVDHIVPQSFLKDDSIDNKVLTRSDKARGKSDNVPSEEVVKKMKNYWRQLLNAKLITQRKFDNLTKAERGGLSELDKAGFIKRQLVETRQITKHVAQILDSRMNTKYDENDKLIREVKVITLKSKLVSDFRKDFQFYKVREINNYHHAHDAYLNAVVGTALIKKYPKLESEFVYGDYKVYDVRKMIAKSEQEIGKATAKYFFYSNIMNFFKTEITLANGEIRKRPLIETNGETGEIVWDKGRDFATVRKVLSMPQVNIVKKTEVQTGGFSKESILPKRNSDKLIARKKDWDPKKYGGFDSPTVAYSVLVVAKVEKGKSKKLKSVKELLGITIMERSSFEKNPIDFLEAKGYKEVKKDLIIKLPKYSLFELENGRKRMLASAGELQKGNELALPSKYVNFLYLASHYEKLKGSPEDNEQKQLFVEQHKHYLDEIIEQISEFSKRVILADANLDKVLSAYNKHRDKPIREQAENIIHLFTLTNLGAPAAFKYFDTTIDRKRYTSTKEVLDATLIHQSITGLYETRIDLSQLGGDGGPAPAPAPAPAPAPGGTLNIEDEHRLHETSKEPDVSLGSTWLSDFPQAWAETGGMGLAVRQAPLIIPLKATSTPVSIKQYPMSQEARLGIKPHIQRLLDQGILVPCQSPWNTPLLPVKKPGTNDYRPVQDLREVNKRVEDIHPTVPNPYNLLSGLPPSHQWYTVLDLKDAFFCLRLHPTSQPLFAFEWRDPEMGISGQLTWTRLPQGFKNSPTLFNEALHRDLADFRIQHPDLILLQYVDDLLLAATSELDCQQGTRALLQTLGNLGYRASAKKAQICQKQVKYLGYLLKEGQRWLTEARKETVMGQPTPKTPRQLREFLGKAGFCRLFIPGFAEMAAPLYPLTKPGTLFNWGPDQQKAYQEIKQALLTAPALGLPDLTKPFELFVDEKQGYAKGVLTQKLGPWRRPVAYLSKKLDPVAAGWPPCLRMVAAIAVLTKDAGKLTMGQPLVILAPHAVEALVKQPPDRWLSNARMTHYQALLLDTDRVQFGPVVALNPATLLPLPEEGLQHNCLDILAEAHGTRPDLTDQPLPDADHTWYTDGSSLLQEGQRKAGAAVTTETEVIWAKALPAGTSAQRAELIALTQALKMAEGKKLNVYTDSRYAFATAHIHGEIYRRRGWLTSEGKEIKNKDEILALLKALFLPKRLSIIHCPGHQKGHSAEARGNRMADQAARKAAITETPDTSTLLAGKRTADGSEFEKRTADGSEFESPKKKAKVE

SEQ ID NO: 2798 - protein, 2096 aa, synthetic construct
MPAAKRVKLDGGDKKYSIGLDIGTNSVGWAVITDEYKVPSKKFKVLGNTDRHSIKKNLIGALLFDSGETAEATRLKRTARRRYTRRKNRICYLQEIFSNEMAKVDDSFFHRLEESFLVEEDKKHERHPIFGNIVDEVAYHEKYPTIYHLRKKLVDSTDKADLRLIYLALAHMIKFRGHFLIEGDLNPDNSDVDKLFIQLVQTYNQLFEENPINASGVDAKAILSARLSKSRRLENLIAQLPGEKKNGLFGNLIALSLGLTPNFKSNFDLAEDAKLQLSKDTYDDDLDNLLAQIGDQYADLFLAAKNLSDAILLSDILRVNTEITKAPLSASMIKRYDEHHQDLTLLKALVRQQLPEKYKEIFFDQSKNGYAGYIDGGASQEEFYKFIKPILEKMDGTEELLVKLNREDLLRKQRTFDNGSIPHQIHLGELHAILRRQEDFYPFLKDNREKIEKILTFRIPYYVGPLARGNSRFAWMTRKSEETITPWNFEEVVDKGASAQSFIERMTNFDKNLPNEKVLPKHSLLYEYFTVYNELTKVKYVTEGMRKPAFLSGEQKKAIVDLLFKTNRKVTVKQLKEDYFKKIECFDSVEISGVEDRFNASLGTYHDLLKIIKDKDFLDNEENEDILEDIVLTLTLFEDREMIEERLKTYAHLFDDKVMKQLKRRRYTGWGRLSRKLINGIRDKQSGKTILDFLKSDGFANRNFMQLIHDDSLTFKEDIQKAQVSGQGDSLHEHIANLAGSPAIKKGILQTVKVVDELVKVMGRHKPENIVIEMARENQTTQKGQKNSRERMKRIEEGIKELGSQILKEHPVENTQLQNEKLYLYYLQNGRDMYVDQELDINRLSDYDVDHIVPQSFLKDDSIDNKVLTRSDKARGKSDNVPSEEVVKKMKNYWRQLLNAKLITQRKFDNLTKAERGGLSELDKAGFIKRQLVETRQITKHVAQILDSRMNTKYDENDKLIREVKVITLKSKLVSDFRKDFQFYKVREINNYHHAHDAYLNAVVGTALIKKYPKLESEFVYGDYKVYDVRKMIAKSEQEIGKATAKYFFYSNIMNFFKTEITLANGEIRKRPLIETNGETGEIVWDKGRDFATVRKVLSMPQVNIVKKTEVQTGGFSKESILPKRNSDKLIARKKDWDPKKYGGFDSPTVAYSVLVVAKVEKGKSKKLKSVKELLGITIMERSSFEKNPIDFLEAKGYKEVKKDLIIKLPKYSLFELENGRKRMLASAGELQKGNELALPSKYVNFLYLASHYEKLKGSPEDNEQKQLFVEQHKHYLDEIIEQISEFSKRVILADANLDKVLSAYNKHRDKPIREQAENIIHLFTLTNLGAPAAFKYFDTTIDRKRYTSTKEVLDATLIHQSITGLYETRIDLSQLGGDGGPAPGSSEAAAKGGTLNIEDEHRLHETSKEPDVSLGSTWLSDFPQAWAETGGMGLAVRQAPLIIPLKATSTPVSIKQYPMSQEARLGIKPHIQRLLDQGILVPCQSPWNTPLLPVKKPGTNDYRPVQDLREVNKRVEDIHPTVPNPYNLLSGLPPSHQWYTVLDLKDAFFCLRLHPTSQPLFAFEWRDPEMGISGQLTWTRLPQGFKNSPTLFNEALHRDLADFRIQHPDLILLQYVDDLLLAATSELDCQQGTRALLQTLGNLGYRASAKKAQICQKQVKYLGYLLKEGQRWLTEARKETVMGQPTPKTPRQLREFLGKAGFCRLFIPGFAEMAAPLYPLTKPGTLFNWGPDQQKAYQEIKQALLTAPALGLPDLTKPFELFVDEKQGYAKGVLTQKLGPWRRPVAYLSKKLDPVAAGWPPCLRMVAAIAVLTKDAGKLTMGQPLVILAPHAVEALVKQPPDRWLSNARMTHYQALLLDTDRVQFGPVVALNPATLLPLPEEGLQHNCLDILAEAHGTRPDLTDQPLPDADHTWYTDGSSLLQEGQRKAGAAVTTETEVIWAKALPAGTSAQRAELIALTQALKMAEGKKLNVYTDSRYAFATAHIHGEIYRRRGWLTSEGKEIKNKDEILALLKALFLPKRLSIIHCPGHQKGHSAEARGNRMADQAARKAAITETPDTSTLLAGKRTADGSEFEKRTADGSEFESPKKKAKVE

SEQ ID NO: 2799 - skipped

SEQ ID NO: 2800 - protein, 2094 aa, synthetic construct
MPAAKRVKLDGGDKKYSIGLDIGTNSVGWAVITDEYKVPSKKFKVLGNTDRHSIKKNLIGALLFDSGETAEATRLKRTARRRYTRRKNRICYLQEIFSNEMAKVDDSFFHRLEESFLVEEDKKHERHPIFGNIVDEVAYHEKYPTIYHLRKKLVDSTDKADLRLIYLALAHMIKFRGHFLIEGDLNPDNSDVDKLFIQLVQTYNQLFEENPINASGVDAKAILSARLSKSRRLENLIAQLPGEKKNGLFGNLIALSLGLTPNFKSNFDLAEDAKLQLSKDTYDDDLDNLLAQIGDQYADLFLAAKNLSDAILLSDILRVNTEITKAPLSASMIKRYDEHHQDLTLLKALVRQQLPEKYKEIFFDQSKNGYAGYIDGGASQEEFYKFIKPILEKMDGTEELLVKLNREDLLRKQRTFDNGSIPHQIHLGELHAILRRQEDFYPFLKDNREKIEKILTFRIPYYVGPLARGNSRFAWMTRKSEETITPWNFEEVVDKGASAQSFIERMTNFDKNLPNEKVLPKHSLLYEYFTVYNELTKVKYVTEGMRKPAFLSGEQKKAIVDLLFKTNRKVTVKQLKEDYFKKIECFDSVEISGVEDRFNASLGTYHDLLKIIKDKDFLDNEENEDILEDIVLTLTLFEDREMIEERLKTYAHLFDDKVMKQLKRRRYTGWGRLSRKLINGIRDKQSGKTILDFLKSDGFANRNFMQLIHDDSLTFKEDIQKAQVSGQGDSLHEHIANLAGSPAIKKGILQTVKVVDELVKVMGRHKPENIVIEMARENQTTQKGQKNSRERMKRIEEGIKELGSQILKEHPVENTQLQNEKLYLYYLQNGRDMYVDQELDINRLSDYDVDHIVPQSFLKDDSIDNKVLTRSDKARGKSDNVPSEEVVKKMKNYWRQLLNAKLITQRKFDNLTKAERGGLSELDKAGFIKRQLVETRQITKHVAQILDSRMNTKYDENDKLIREVKVITLKSKLVSDFRKDFQFYKVREINNYHHAHDAYLNAVVGTALIKKYPKLESEFVYGDYKVYDVRKMIAKSEQEIGKATAKYFFYSNIMNFFKTEITLANGEIRKRPLIETNGETGEIVWDKGRDFATVRKVLSMPQVNIVKKTEVQTGGFSKESILPKRNSDKLIARKKDWDPKKYGGFDSPTVAYSVLVVAKVEKGKSKKLKSVKELLGITIMERSSFEKNPIDFLEAKGYKEVKKDLIIKLPKYSLFELENGRKRMLASAGELQKGNELALPSKYVNFLYLASHYEKLKGSPEDNEQKQLFVEQHKHYLDEIIEQISEFSKRVILADANLDKVLSAYNKHRDKPIREQAENIIHLFTLTNLGAPAAFKYFDTTIDRKRYTSTKEVLDATLIHQSITGLYETRIDLSQLGGDGGGGGPAPGGSGGTLNIEDEHRLHETSKEPDVSLGSTWLSDFPQAWAETGGMGLAVRQAPLIIPLKATSTPVSIKQYPMSQEARLGIKPHIQRLLDQGILVPCQSPWNTPLLPVKKPGTNDYRPVQDLREVNKRVEDIHPTVPNPYNLLSGLPPSHQWYTVLDLKDAFFCLRLHPTSQPLFAFEWRDPEMGISGQLTWTRLPQGFKNSPTLFNEALHRDLADFRIQHPDLILLQYVDDLLLAATSELDCQQGTRALLQTLGNLGYRASAKKAQICQKQVKYLGYLLKEGQRWLTEARKETVMGQPTPKTPRQLREFLGKAGFCRLFIPGFAEMAAPLYPLTKPGTLFNWGPDQQKAYQEIKQALLTAPALGLPDLTKPFELFVDEKQGYAKGVLTQKLGPWRRPVAYLSKKLDPVAAGWPPCLRMVAAIAVLTKDAGKLTMGQPLVILAPHAVEALVKQPPDRWLSNARMTHYQALLLDTDRVQFGPVVALNPATLLPLPEEGLQHNCLDILAEAHGTRPDLTDQPLPDADHTWYTDGSSLLQEGQRKAGAAVTTETEVIWAKALPAGTSAQRAELIALTQALKMAEGKKLNVYTDSRYAFATAHIHGEIYRRRGWLTSEGKEIKNKDEILALLKALFLPKRLSIIHCPGHQKGHSAEARGNRMADQAARKAAITETPDTSTLLAGKRTADGSEFEKRTADGSEFESPKKKAKVE

SEQ ID NO: 2801 - protein, 2094 aa, synthetic construct
MPAAKRVKLDGGDKKYSIGLDIGTNSVGWAVITDEYKVPSKKFKVLGNTDRHSIKKNLIGALLFDSGETAEATRLKRTARRRYTRRKNRICYLQEIFSNEMAKVDDSFFHRLEESFLVEEDKKHERHPIFGNIVDEVAYHEKYPTIYHLRKKLVDSTDKADLRLIYLALAHMIKFRGHFLIEGDLNPDNSDVDKLFIQLVQTYNQLFEENPINASGVDAKAILSARLSKSRRLENLIAQLPGEKKNGLFGNLIALSLGLTPNFKSNFDLAEDAKLQLSKDTYDDDLDNLLAQIGDQYADLFLAAKNLSDAILLSDILRVNTEITKAPLSASMIKRYDEHHQDLTLLKALVRQQLPEKYKEIFFDQSKNGYAGYIDGGASQEEFYKFIKPILEKMDGTEELLVKLNREDLLRKQRTFDNGSIPHQIHLGELHAILRRQEDFYPFLKDNREKIEKILTFRIPYYVGPLARGNSRFAWMTRKSEETITPWNFEEVVDKGASAQSFIERMTNFDKNLPNEKVLPKHSLLYEYFTVYNELTKVKYVTEGMRKPAFLSGEQKKAIVDLLFKTNRKVTVKQLKEDYFKKIECFDSVEISGVEDRFNASLGTYHDLLKIIKDKDFLDNEENEDILEDIVLTLTLFEDREMIEERLKTYAHLFDDKVMKQLKRRRYTGWGRLSRKLINGIRDKQSGKTILDFLKSDGFANRNFMQLIHDDSLTFKEDIQKAQVSGQGDSLHEHIANLAGSPAIKKGILQTVKVVDELVKVMGRHKPENIVIEMARENQTTQKGQKNSRERMKRIEEGIKELGSQILKEHPVENTQLQNEKLYLYYLQNGRDMYVDQELDINRLSDYDVDHIVPQSFLKDDSIDNKVLTRSDKARGKSDNVPSEEVVKKMKNYWRQLLNAKLITQRKFDNLTKAERGGLSELDKAGFIKRQLVETRQITKHVAQILDSRMNTKYDENDKLIREVKVITLKSKLVSDFRKDFQFYKVREINNYHHAHDAYLNAVVGTALIKKYPKLESEFVYGDYKVYDVRKMIAKSEQEIGKATAKYFFYSNIMNFFKTEITLANGEIRKRPLIETNGETGEIVWDKGRDFATVRKVLSMPQVNIVKKTEVQTGGFSKESILPKRNSDKLIARKKDWDPKKYGGFDSPTVAYSVLVVAKVEKGKSKKLKSVKELLGITIMERSSFEKNPIDFLEAKGYKEVKKDLIIKLPKYSLFELENGRKRMLASAGELQKGNELALPSKYVNFLYLASHYEKLKGSPEDNEQKQLFVEQHKHYLDEIIEQISEFSKRVILADANLDKVLSAYNKHRDKPIREQAENIIHLFTLTNLGAPAAFKYFDTTIDRKRYTSTKEVLDATLIHQSITGLYETRIDLSQLGGDGGGGSPAPGGGGGTLNIEDEHRLHETSKEPDVSLGSTWLSDFPQAWAETGGMGLAVRQAPLIIPLKATSTPVSIKQYPMSQEARLGIKPHIQRLLDQGILVPCQSPWNTPLLPVKKPGTNDYRPVQDLREVNKRVEDIHPTVPNPYNLLSGLPPSHQWYTVLDLKDAFFCLRLHPTSQPLFAFEWRDPEMGISGQLTWTRLPQGFKNSPTLFNEALHRDLADFRIQHPDLILLQYVDDLLLAATSELDCQQGTRALLQTLGNLGYRASAKKAQICQKQVKYLGYLLKEGQRWLTEARKETVMGQPTPKTPRQLREFLGKAGFCRLFIPGFAEMAAPLYPLTKPGTLFNWGPDQQKAYQEIKQALLTAPALGLPDLTKPFELFVDEKQGYAKGVLTQKLGPWRRPVAYLSKKLDPVAAGWPPCLRMVAAIAVLTKDAGKLTMGQPLVILAPHAVEALVKQPPDRWLSNARMTHYQALLLDTDRVQFGPVVALNPATLLPLPEEGLQHNCLDILAEAHGTRPDLTDQPLPDADHTWYTDGSSLLQEGQRKAGAAVTTETEVIWAKALPAGTSAQRAELIALTQALKMAEGKKLNVYTDSRYAFATAHIHGEIYRRRGWLTSEGKEIKNKDEILALLKALFLPKRLSIIHCPGHQKGHSAEARGNRMADQAARKAAITETPDTSTLLAGKRTADGSEFEKRTADGSEFESPKKKAKVE

SEQ ID NO: 2802 - protein, 2100 aa, synthetic construct
MPAAKRVKLDGGDKKYSIGLDIGTNSVGWAVITDEYKVPSKKFKVLGNTDRHSIKKNLIGALLFDSGETAEATRLKRTARRRYTRRKNRICYLQEIFSNEMAKVDDSFFHRLEESFLVEEDKKHERHPIFGNIVDEVAYHEKYPTIYHLRKKLVDSTDKADLRLIYLALAHMIKFRGHFLIEGDLNPDNSDVDKLFIQLVQTYNQLFEENPINASGVDAKAILSARLSKSRRLENLIAQLPGEKKNGLFGNLIALSLGLTPNFKSNFDLAEDAKLQLSKDTYDDDLDNLLAQIGDQYADLFLAAKNLSDAILLSDILRVNTEITKAPLSASMIKRYDEHHQDLTLLKALVRQQLPEKYKEIFFDQSKNGYAGYIDGGASQEEFYKFIKPILEKMDGTEELLVKLNREDLLRKQRTFDNGSIPHQIHLGELHAILRRQEDFYPFLKDNREKIEKILTFRIPYYVGPLARGNSRFAWMTRKSEETITPWNFEEVVDKGASAQSFIERMTNFDKNLPNEKVLPKHSLLYEYFTVYNELTKVKYVTEGMRKPAFLSGEQKKAIVDLLFKTNRKVTVKQLKEDYFKKIECFDSVEISGVEDRFNASLGTYHDLLKIIKDKDFLDNEENEDILEDIVLTLTLFEDREMIEERLKTYAHLFDDKVMKQLKRRRYTGWGRLSRKLINGIRDKQSGKTILDFLKSDGFANRNFMQLIHDDSLTFKEDIQKAQVSGQGDSLHEHIANLAGSPAIKKGILQTVKVVDELVKVMGRHKPENIVIEMARENQTTQKGQKNSRERMKRIEEGIKELGSQILKEHPVENTQLQNEKLYLYYLQNGRDMYVDQELDINRLSDYDVDHIVPQSFLKDDSIDNKVLTRSDKARGKSDNVPSEEVVKKMKNYWRQLLNAKLITQRKFDNLTKAERGGLSELDKAGFIKRQLVETRQITKHVAQILDSRMNTKYDENDKLIREVKVITLKSKLVSDFRKDFQFYKVREINNYHHAHDAYLNAVVGTALIKKYPKLESEFVYGDYKVYDVRKMIAKSEQEIGKATAKYFFYSNIMNFFKTEITLANGEIRKRPLIETNGETGEIVWDKGRDFATVRKVLSMPQVNIVKKTEVQTGGFSKESILPKRNSDKLIARKKDWDPKKYGGFDSPTVAYSVLVVAKVEKGKSKKLKSVKELLGITIMERSSFEKNPIDFLEAKGYKEVKKDLIIKLPKYSLFELENGRKRMLASAGELQKGNELALPSKYVNFLYLASHYEKLKGSPEDNEQKQLFVEQHKHYLDEIIEQISEFSKRVILADANLDKVLSAYNKHRDKPIREQAENIIHLFTLTNLGAPAAFKYFDTTIDRKRYTSTKEVLDATLIHQSITGLYETRIDLSQLGGDGGGSSGSSGSSGSSGSSGGTLNIEDEHRLHETSKEPDVSLGSTWLSDFPQAWAETGGMGLAVRQAPLIIPLKATSTPVSIKQYPMSQEARLGIKPHIQRLLDQGILVPCQSPWNTPLLPVKKPGTNDYRPVQDLREVNKRVEDIHPTVPNPYNLLSGLPPSHQWYTVLDLKDAFFCLRLHPTSQPLFAFEWRDPEMGISGQLTWTRLPQGFKNSPTLFNEALHRDLADFRIQHPDLILLQYVDDLLLAATSELDCQQGTRALLQTLGNLGYRASAKKAQICQKQVKYLGYLLKEGQRWLTEARKETVMGQPTPKTPRQLREFLGKAGFCRLFIPGFAEMAAPLYPLTKPGTLFNWGPDQQKAYQEIKQALLTAPALGLPDLTKPFELFVDEKQGYAKGVLTQKLGPWRRPVAYLSKKLDPVAAGWPPCLRMVAAIAVLTKDAGKLTMGQPLVILAPHAVEALVKQPPDRWLSNARMTHYQALLLDTDRVQFGPVVALNPATLLPLPEEGLQHNCLDILAEAHGTRPDLTDQPLPDADHTWYTDGSSLLQEGQRKAGAAVTTETEVIWAKALPAGTSAQRAELIALTQALKMAEGKKLNVYTDSRYAFATAHIHGEIYRRRGWLTSEGKEIKNKDEILALLKALFLPKRLSIIHCPGHQKGHSAEARGNRMADQAARKAAITETPDTSTLLAGKRTADGSEFEKRTADGSEFESPKKKAKVE

SEQ ID NO: 2803 - protein, 2110 aa, synthetic construct
MPAAKRVKLDGGDKKYSIGLDIGTNSVGWAVITDEYKVPSKKFKVLGNTDRHSIKKNLIGALLFDSGETAEATRLKRTARRRYTRRKNRICYLQEIFSNEMAKVDDSFFHRLEESFLVEEDKKHERHPIFGNIVDEVAYHEKYPTIYHLRKKLVDSTDKADLRLIYLALAHMIKFRGHFLIEGDLNPDNSDVDKLFIQLVQTYNQLFEENPINASGVDAKAILSARLSKSRRLENLIAQLPGEKKNGLFGNLIALSLGLTPNFKSNFDLAEDAKLQLSKDTYDDDLDNLLAQIGDQYADLFLAAKNLSDAILLSDILRVNTEITKAPLSASMIKRYDEHHQDLTLLKALVRQQLPEKYKEIFFDQSKNGYAGYIDGGASQEEFYKFIKPILEKMDGTEELLVKLNREDLLRKQRTFDNGSIPHQIHLGELHAILRRQEDFYPFLKDNREKIEKILTFRIPYYVGPLARGNSRFAWMTRKSEETITPWNFEEVVDKGASAQSFIERMTNFDKNLPNEKVLPKHSLLYEYFTVYNELTKVKYVTEGMRKPAFLSGEQKKAIVDLLFKTNRKVTVKQLKEDYFKKIECFDSVEISGVEDRFNASLGTYHDLLKIIKDKDFLDNEENEDILEDIVLTLTLFEDREMIEERLKTYAHLFDDKVMKQLKRRRYTGWGRLSRKLINGIRDKQSGKTILDFLKSDGFANRNFMQLIHDDSLTFKEDIQKAQVSGQGDSLHEHIANLAGSPAIKKGILQTVKVVDELVKVMGRHKPENIVIEMARENQTTQKGQKNSRERMKRIEEGIKELGSQILKEHPVENTQLQNEKLYLYYLQNGRDMYVDQELDINRLSDYDVDHIVPQSFLKDDSIDNKVLTRSDKARGKSDNVPSEEVVKKMKNYWRQLLNAKLITQRKFDNLTKAERGGLSELDKAGFIKRQLVETRQITKHVAQILDSRMNTKYDENDKLIREVKVITLKSKLVSDFRKDFQFYKVREINNYHHAHDAYLNAVVGTALIKKYPKLESEFVYGDYKVYDVRKMIAKSEQEIGKATAKYFFYSNIMNFFKTEITLANGEIRKRPLIETNGETGEIVWDKGRDFATVRKVLSMPQVNIVKKTEVQTGGFSKESILPKRNSDKLIARKKDWDPKKYGGFDSPTVAYSVLVVAKVEKGKSKKLKSVKELLGITIMERSSFEKNPIDFLEAKGYKEVKKDLIIKLPKYSLFELENGRKRMLASAGELQKGNELALPSKYVNFLYLASHYEKLKGSPEDNEQKQLFVEQHKHYLDEIIEQISEFSKRVILADANLDKVLSAYNKHRDKPIREQAENIIHLFTLTNLGAPAAFKYFDTTIDRKRYTSTKEVLDATLIHQSITGLYETRIDLSQLGGDGGEAAAKEAAAKEAAAKEAAAKEAAAKGGTLNIEDEHRLHETSKEPDVSLGSTWLSDFPQAWAETGGMGLAVRQAPLIIPLKATSTPVSIKQYPMSQEARLGIKPHIQRLLDQGILVPCQSPWNTPLLPVKKPGTNDYRPVQDLREVNKRVEDIHPTVPNPYNLLSGLPPSHQWYTVLDLKDAFFCLRLHPTSQPLFAFEWRDPEMGISGQLTWTRLPQGFKNSPTLFNEALHRDLADFRIQHPDLILLQYVDDLLLAATSELDCQQGTRALLQTLGNLGYRASAKKAQICQKQVKYLGYLLKEGQRWLTEARKETVMGQPTPKTPRQLREFLGKAGFCRLFIPGFAEMAAPLYPLTKPGTLFNWGPDQQKAYQEIKQALLTAPALGLPDLTKPFELFVDEKQGYAKGVLTQKLGPWRRPVAYLSKKLDPVAAGWPPCLRMVAAIAVLTKDAGKLTMGQPLVILAPHAVEALVKQPPDRWLSNARMTHYQALLLDTDRVQFGPVVALNPATLLPLPEEGLQHNCLDILAEAHGTRPDLTDQPLPDADHTWYTDGSSLLQEGQRKAGAAVTTETEVIWAKALPAGTSAQRAELIALTQALKMAEGKKLNVYTDSRYAFATAHIHGEIYRRRGWLTSEGKEIKNKDEILALLKALFLPKRLSIIHCPGHQKGHSAEARGNRMADQAARKAAITETPDTSTLLAGKRTADGSEFEKRTADGSEFESPKKKAKVE

SEQ ID NO: 2804 - protein, 2094 aa, synthetic construct
MPAAKRVKLDGGDKKYSIGLDIGTNSVGWAVITDEYKVPSKKFKVLGNTDRHSIKKNLIGALLFDSGETAEATRLKRTARRRYTRRKNRICYLQEIFSNEMAKVDDSFFHRLEESFLVEEDKKHERHPIFGNIVDEVAYHEKYPTIYHLRKKLVDSTDKADLRLIYLALAHMIKFRGHFLIEGDLNPDNSDVDKLFIQLVQTYNQLFEENPINASGVDAKAILSARLSKSRRLENLIAQLPGEKKNGLFGNLIALSLGLTPNFKSNFDLAEDAKLQLSKDTYDDDLDNLLAQIGDQYADLFLAAKNLSDAILLSDILRVNTEITKAPLSASMIKRYDEHHQDLTLLKALVRQQLPEKYKEIFFDQSKNGYAGYIDGGASQEEFYKFIKPILEKMDGTEELLVKLNREDLLRKQRTFDNGSIPHQIHLGELHAILRRQEDFYPFLKDNREKIEKILTFRIPYYVGPLARGNSRFAWMTRKSEETITPWNFEEVVDKGASAQSFIERMTNFDKNLPNEKVLPKHSLLYEYFTVYNELTKVKYVTEGMRKPAFLSGEQKKAIVDLLFKTNRKVTVKQLKEDYFKKIECFDSVEISGVEDRFNASLGTYHDLLKIIKDKDFLDNEENEDILEDIVLTLTLFEDREMIEERLKTYAHLFDDKVMKQLKRRRYTGWGRLSRKLINGIRDKQSGKTILDFLKSDGFANRNFMQLIHDDSLTFKEDIQKAQVSGQGDSLHEHIANLAGSPAIKKGILQTVKVVDELVKVMGRHKPENIVIEMARENQTTQKGQKNSRERMKRIEEGIKELGSQILKEHPVENTQLQNEKLYLYYLQNGRDMYVDQELDINRLSDYDVDHIVPQSFLKDDSIDNKVLTRSDKARGKSDNVPSEEVVKKMKNYWRQLLNAKLITQRKFDNLTKAERGGLSELDKAGFIKRQLVETRQITKHVAQILDSRMNTKYDENDKLIREVKVITLKSKLVSDFRKDFQFYKVREINNYHHAHDAYLNAVVGTALIKKYPKLESEFVYGDYKVYDVRKMIAKSEQEIGKATAKYFFYSNIMNFFKTEITLANGEIRKRPLIETNGETGEIVWDKGRDFATVRKVLSMPQVNIVKKTEVQTGGFSKESILPKRNSDKLIARKKDWDPKKYGGFDSPTVAYSVLVVAKVEKGKSKKLKSVKELLGITIMERSSFEKNPIDFLEAKGYKEVKKDLIIKLPKYSLFELENGRKRMLASAGELQKGNELALPSKYVNFLYLASHYEKLKGSPEDNEQKQLFVEQHKHYLDEIIEQISEFSKRVILADANLDKVLSAYNKHRDKPIREQAENIIHLFTLTNLGAPAAFKYFDTTIDRKRYTSTKEVLDATLIHQSITGLYETRIDLSQLGGDGGGGSGGGPAPGGTLNIEDEHRLHETSKEPDVSLGSTWLSDFPQAWAETGGMGLAVRQAPLIIPLKATSTPVSIKQYPMSQEARLGIKPHIQRLLDQGILVPCQSPWNTPLLPVKKPGTNDYRPVQDLREVNKRVEDIHPTVPNPYNLLSGLPPSHQWYTVLDLKDAFFCLRLHPTSQPLFAFEWRDPEMGISGQLTWTRLPQGFKNSPTLFNEALHRDLADFRIQHPDLILLQYVDDLLLAATSELDCQQGTRALLQTLGNLGYRASAKKAQICQKQVKYLGYLLKEGQRWLTEARKETVMGQPTPKTPRQLREFLGKAGFCRLFIPGFAEMAAPLYPLTKPGTLFNWGPDQQKAYQEIKQALLTAPALGLPDLTKPFELFVDEKQGYAKGVLTQKLGPWRRPVAYLSKKLDPVAAGWPPCLRMVAAIAVLTKDAGKLTMGQPLVILAPHAVEALVKQPPDRWLSNARMTHYQALLLDTDRVQFGPVVALNPATLLPLPEEGLQHNCLDILAEAHGTRPDLTDQPLPDADHTWYTDGSSLLQEGQRKAGAAVTTETEVIWAKALPAGTSAQRAELIALTQALKMAEGKKLNVYTDSRYAFATAHIHGEIYRRRGWLTSEGKEIKNKDEILALLKALFLPKRLSIIHCPGHQKGHSAEARGNRMADQAARKAAITETPDTSTLLAGKRTADGSEFEKRTADGSEFESPKKKAKVE

SEQ ID NO: 2805 - protein, 2096 aa, synthetic construct
MPAAKRVKLDGGDKKYSIGLDIGTNSVGWAVITDEYKVPSKKFKVLGNTDRHSIKKNLIGALLFDSGETAEATRLKRTARRRYTRRKNRICYLQEIFSNEMAKVDDSFFHRLEESFLVEEDKKHERHPIFGNIVDEVAYHEKYPTIYHLRKKLVDSTDKADLRLIYLALAHMIKFRGHFLIEGDLNPDNSDVDKLFIQLVQTYNQLFEENPINASGVDAKAILSARLSKSRRLENLIAQLPGEKKNGLFGNLIALSLGLTPNFKSNFDLAEDAKLQLSKDTYDDDLDNLLAQIGDQYADLFLAAKNLSDAILLSDILRVNTEITKAPLSASMIKRYDEHHQDLTLLKALVRQQLPEKYKEIFFDQSKNGYAGYIDGGASQEEFYKFIKPILEKMDGTEELLVKLNREDLLRKQRTFDNGSIPHQIHLGELHAILRRQEDFYPFLKDNREKIEKILTFRIPYYVGPLARGNSRFAWMTRKSEETITPWNFEEVVDKGASAQSFIERMTNFDKNLPNEKVLPKHSLLYEYFTVYNELTKVKYVTEGMRKPAFLSGEQKKAIVDLLFKTNRKVTVKQLKEDYFKKIECFDSVEISGVEDRFNASLGTYHDLLKIIKDKDFLDNEENEDILEDIVLTLTLFEDREMIEERLKTYAHLFDDKVMKQLKRRRYTGWGRLSRKLINGIRDKQSGKTILDFLKSDGFANRNFMQLIHDDSLTFKEDIQKAQVSGQGDSLHEHIANLAGSPAIKKGILQTVKVVDELVKVMGRHKPENIVIEMARENQTTQKGQKNSRERMKRIEEGIKELGSQILKEHPVENTQLQNEKLYLYYLQNGRDMYVDQELDINRLSDYDVDHIVPQSFLKDDSIDNKVLTRSDKARGKSDNVPSEEVVKKMKNYWRQLLNAKLITQRKFDNLTKAERGGLSELDKAGFIKRQLVETRQITKHVAQILDSRMNTKYDENDKLIREVKVITLKSKLVSDFRKDFQFYKVREINNYHHAHDAYLNAVVGTALIKKYPKLESEFVYGDYKVYDVRKMIAKSEQEIGKATAKYFFYSNIMNFFKTEITLANGEIRKRPLIETNGETGEIVWDKGRDFATVRKVLSMPQVNIVKKTEVQTGGFSKESILPKRNSDKLIARKKDWDPKKYGGFDSPTVAYSVLVVAKVEKGKSKKLKSVKELLGITIMERSSFEKNPIDFLEAKGYKEVKKDLIIKLPKYSLFELENGRKRMLASAGELQKGNELALPSKYVNFLYLASHYEKLKGSPEDNEQKQLFVEQHKHYLDEIIEQISEFSKRVILADANLDKVLSAYNKHRDKPIREQAENIIHLFTLTNLGAPAAFKYFDTTIDRKRYTSTKEVLDATLIHQSITGLYETRIDLSQLGGDGGGGSPAPEAAAKGGTLNIEDEHRLHETSKEPDVSLGSTWLSDFPQAWAETGGMGLAVRQAPLIIPLKATSTPVSIKQYPMSQEARLGIKPHIQRLLDQGILVPCQSPWNTPLLPVKKPGTNDYRPVQDLREVNKRVEDIHPTVPNPYNLLSGLPPSHQWYTVLDLKDAFFCLRLHPTSQPLFAFEWRDPEMGISGQLTWTRLPQGFKNSPTLFNEALHRDLADFRIQHPDLILLQYVDDLLLAATSELDCQQGTRALLQTLGNLGYRASAKKAQICQKQVKYLGYLLKEGQRWLTEARKETVMGQPTPKTPRQLREFLGKAGFCRLFIPGFAEMAAPLYPLTKPGTLFNWGPDQQKAYQEIKQALLTAPALGLPDLTKPFELFVDEKQGYAKGVLTQKLGPWRRPVAYLSKKLDPVAAGWPPCLRMVAAIAVLTKDAGKLTMGQPLVILAPHAVEALVKQPPDRWLSNARMTHYQALLLDTDRVQFGPVVALNPATLLPLPEEGLQHNCLDILAEAHGTRPDLTDQPLPDADHTWYTDGSSLLQEGQRKAGAAVTTETEVIWAKALPAGTSAQRAELIALTQALKMAEGKKLNVYTDSRYAFATAHIHGEIYRRRGWLTSEGKEIKNKDEILALLKALFLPKRLSIIHCPGHQKGHSAEARGNRMADQAARKAAITETPDTSTLLAGKRTADGSEFEKRTADGSEFESPKKKAKVE

SEQ ID NO: 2806-2807 - skipped (2 entries)

SEQ ID NO: 2808 - protein, 2091 aa, synthetic construct
MPAAKRVKLDGGDKKYSIGLDIGTNSVGWAVITDEYKVPSKKFKVLGNTDRHSIKKNLIGALLFDSGETAEATRLKRTARRRYTRRKNRICYLQEIFSNEMAKVDDSFFHRLEESFLVEEDKKHERHPIFGNIVDEVAYHEKYPTIYHLRKKLVDSTDKADLRLIYLALAHMIKFRGHFLIEGDLNPDNSDVDKLFIQLVQTYNQLFEENPINASGVDAKAILSARLSKSRRLENLIAQLPGEKKNGLFGNLIALSLGLTPNFKSNFDLAEDAKLQLSKDTYDDDLDNLLAQIGDQYADLFLAAKNLSDAILLSDILRVNTEITKAPLSASMIKRYDEHHQDLTLLKALVRQQLPEKYKEIFFDQSKNGYAGYIDGGASQEEFYKFIKPILEKMDGTEELLVKLNREDLLRKQRTFDNGSIPHQIHLGELHAILRRQEDFYPFLKDNREKIEKILTFRIPYYVGPLARGNSRFAWMTRKSEETITPWNFEEVVDKGASAQSFIERMTNFDKNLPNEKVLPKHSLLYEYFTVYNELTKVKYVTEGMRKPAFLSGEQKKAIVDLLFKTNRKVTVKQLKEDYFKKIECFDSVEISGVEDRFNASLGTYHDLLKIIKDKDFLDNEENEDILEDIVLTLTLFEDREMIEERLKTYAHLFDDKVMKQLKRRRYTGWGRLSRKLINGIRDKQSGKTILDFLKSDGFANRNFMQLIHDDSLTFKEDIQKAQVSGQGDSLHEHIANLAGSPAIKKGILQTVKVVDELVKVMGRHKPENIVIEMARENQTTQKGQKNSRERMKRIEEGIKELGSQILKEHPVENTQLQNEKLYLYYLQNGRDMYVDQELDINRLSDYDVDHIVPQSFLKDDSIDNKVLTRSDKARGKSDNVPSEEVVKKMKNYWRQLLNAKLITQRKFDNLTKAERGGLSELDKAGFIKRQLVETRQITKHVAQILDSRMNTKYDENDKLIREVKVITLKSKLVSDFRKDFQFYKVREINNYHHAHDAYLNAVVGTALIKKYPKLESEFVYGDYKVYDVRKMIAKSEQEIGKATAKYFFYSNIMNFFKTEITLANGEIRKRPLIETNGETGEIVWDKGRDFATVRKVLSMPQVNIVKKTEVQTGGFSKESILPKRNSDKLIARKKDWDPKKYGGFDSPTVAYSVLVVAKVEKGKSKKLKSVKELLGITIMERSSFEKNPIDFLEAKGYKEVKKDLIIKLPKYSLFELENGRKRMLASAGELQKGNELALPSKYVNFLYLASHYEKLKGSPEDNEQKQLFVEQHKHYLDEIIEQISEFSKRVILADANLDKVLSAYNKHRDKPIREQAENIIHLFTLTNLGAPAAFKYFDTTIDRKRYTSTKEVLDATLIHQSITGLYETRIDLSQLGGDGGGGSPAPGGTLNIEDEHRLHETSKEPDVSLGSTWLSDFPQAWAETGGMGLAVRQAPLIIPLKATSTPVSIKQYPMSQEARLGIKPHIQRLLDQGILVPCQSPWNTPLLPVKKPGTNDYRPVQDLREVNKRVEDIHPTVPNPYNLLSGLPPSHQWYTVLDLKDAFFCLRLHPTSQPLFAFEWRDPEMGISGQLTWTRLPQGFKNSPTLFNEALHRDLADFRIQHPDLILLQYVDDLLLAATSELDCQQGTRALLQTLGNLGYRASAKKAQICQKQVKYLGYLLKEGQRWLTEARKETVMGQPTPKTPRQLREFLGKAGFCRLFIPGFAEMAAPLYPLTKPGTLFNWGPDQQKAYQEIKQALLTAPALGLPDLTKPFELFVDEKQGYAKGVLTQKLGPWRRPVAYLSKKLDPVAAGWPPCLRMVAAIAVLTKDAGKLTMGQPLVILAPHAVEALVKQPPDRWLSNARMTHYQALLLDTDRVQFGPVVALNPATLLPLPEEGLQHNCLDILAEAHGTRPDLTDQPLPDADHTWYTDGSSLLQEGQRKAGAAVTTETEVIWAKALPAGTSAQRAELIALTQALKMAEGKKLNVYTDSRYAFATAHIHGEIYRRRGWLTSEGKEIKNKDEILALLKALFLPKRLSIIHCPGHQKGHSAEARGNRMADQAARKAAITETPDTSTLLAGKRTADGSEFEKRTADGSEFESPKKKAKVE

SEQ ID NO: 2809 - protein, 2094 aa, synthetic construct
MPAAKRVKLDGGDKKYSIGLDIGTNSVGWAVITDEYKVPSKKFKVLGNTDRHSIKKNLIGALLFDSGETAEATRLKRTARRRYTRRKNRICYLQEIFSNEMAKVDDSFFHRLEESFLVEEDKKHERHPIFGNIVDEVAYHEKYPTIYHLRKKLVDSTDKADLRLIYLALAHMIKFRGHFLIEGDLNPDNSDVDKLFIQLVQTYNQLFEENPINASGVDAKAILSARLSKSRRLENLIAQLPGEKKNGLFGNLIALSLGLTPNFKSNFDLAEDAKLQLSKDTYDDDLDNLLAQIGDQYADLFLAAKNLSDAILLSDILRVNTEITKAPLSASMIKRYDEHHQDLTLLKALVRQQLPEKYKEIFFDQSKNGYAGYIDGGASQEEFYKFIKPILEKMDGTEELLVKLNREDLLRKQRTFDNGSIPHQIHLGELHAILRRQEDFYPFLKDNREKIEKILTFRIPYYVGPLARGNSRFAWMTRKSEETITPWNFEEVVDKGASAQSFIERMTNFDKNLPNEKVLPKHSLLYEYFTVYNELTKVKYVTEGMRKPAFLSGEQKKAIVDLLFKTNRKVTVKQLKEDYFKKIECFDSVEISGVEDRFNASLGTYHDLLKIIKDKDFLDNEENEDILEDIVLTLTLFEDREMIEERLKTYAHLFDDKVMKQLKRRRYTGWGRLSRKLINGIRDKQSGKTILDFLKSDGFANRNFMQLIHDDSLTFKEDIQKAQVSGQGDSLHEHIANLAGSPAIKKGILQTVKVVDELVKVMGRHKPENIVIEMARENQTTQKGQKNSRERMKRIEEGIKELGSQILKEHPVENTQLQNEKLYLYYLQNGRDMYVDQELDINRLSDYDVDHIVPQSFLKDDSIDNKVLTRSDKARGKSDNVPSEEVVKKMKNYWRQLLNAKLITQRKFDNLTKAERGGLSELDKAGFIKRQLVETRQITKHVAQILDSRMNTKYDENDKLIREVKVITLKSKLVSDFRKDFQFYKVREINNYHHAHDAYLNAVVGTALIKKYPKLESEFVYGDYKVYDVRKMIAKSEQEIGKATAKYFFYSNIMNFFKTEITLANGEIRKRPLIETNGETGEIVWDKGRDFATVRKVLSMPQVNIVKKTEVQTGGFSKESILPKRNSDKLIARKKDWDPKKYGGFDSPTVAYSVLVVAKVEKGKSKKLKSVKELLGITIMERSSFEKNPIDFLEAKGYKEVKKDLIIKLPKYSLFELENGRKRMLASAGELQKGNELALPSKYVNFLYLASHYEKLKGSPEDNEQKQLFVEQHKHYLDEIIEQISEFSKRVILADANLDKVLSAYNKHRDKPIREQAENIIHLFTLTNLGAPAAFKYFDTTIDRKRYTSTKEVLDATLIHQSITGLYETRIDLSQLGGDGGGGSGGSGGSGGTLNIEDEHRLHETSKEPDVSLGSTWLSDFPQAWAETGGMGLAVRQAPLIIPLKATSTPVSIKQYPMSQEARLGIKPHIQRLLDQGILVPCQSPWNTPLLPVKKPGTNDYRPVQDLREVNKRVEDIHPTVPNPYNLLSGLPPSHQWYTVLDLKDAFFCLRLHPTSQPLFAFEWRDPEMGISGQLTWTRLPQGFKNSPTLFNEALHRDLADFRIQHPDLILLQYVDDLLLAATSELDCQQGTRALLQTLGNLGYRASAKKAQICQKQVKYLGYLLKEGQRWLTEARKETVMGQPTPKTPRQLREFLGKAGFCRLFIPGFAEMAAPLYPLTKPGTLFNWGPDQQKAYQEIKQALLTAPALGLPDLTKPFELFVDEKQGYAKGVLTQKLGPWRRPVAYLSKKLDPVAAGWPPCLRMVAAIAVLTKDAGKLTMGQPLVILAPHAVEALVKQPPDRWLSNARMTHYQALLLDTDRVQFGPVVALNPATLLPLPEEGLQHNCLDILAEAHGTRPDLTDQPLPDADHTWYTDGSSLLQEGQRKAGAAVTTETEVIWAKALPAGTSAQRAELIALTQALKMAEGKKLNVYTDSRYAFATAHIHGEIYRRRGWLTSEGKEIKNKDEILALLKALFLPKRLSIIHCPGHQKGHSAEARGNRMADQAARKAAITETPDTSTLLAGKRTADGSEFEKRTADGSEFESPKKKAKVE

SEQ ID NO: 2810 - protein, 2096 aa, synthetic construct
MPAAKRVKLDGGDKKYSIGLDIGTNSVGWAVITDEYKVPSKKFKVLGNTDRHSIKKNLIGALLFDSGETAEATRLKRTARRRYTRRKNRICYLQEIFSNEMAKVDDSFFHRLEESFLVEEDKKHERHPIFGNIVDEVAYHEKYPTIYHLRKKLVDSTDKADLRLIYLALAHMIKFRGHFLIEGDLNPDNSDVDKLFIQLVQTYNQLFEENPINASGVDAKAILSARLSKSRRLENLIAQLPGEKKNGLFGNLIALSLGLTPNFKSNFDLAEDAKLQLSKDTYDDDLDNLLAQIGDQYADLFLAAKNLSDAILLSDILRVNTEITKAPLSASMIKRYDEHHQDLTLLKALVRQQLPEKYKEIFFDQSKNGYAGYIDGGASQEEFYKFIKPILEKMDGTEELLVKLNREDLLRKQRTFDNGSIPHQIHLGELHAILRRQEDFYPFLKDNREKIEKILTFRIPYYVGPLARGNSRFAWMTRKSEETITPWNFEEVVDKGASAQSFIERMTNFDKNLPNEKVLPKHSLLYEYFTVYNELTKVKYVTEGMRKPAFLSGEQKKAIVDLLFKTNRKVTVKQLKEDYFKKIECFDSVEISGVEDRFNASLGTYHDLLKIIKDKDFLDNEENEDILEDIVLTLTLFEDREMIEERLKTYAHLFDDKVMKQLKRRRYTGWGRLSRKLINGIRDKQSGKTILDFLKSDGFANRNFMQLIHDDSLTFKEDIQKAQVSGQGDSLHEHIANLAGSPAIKKGILQTVKVVDELVKVMGRHKPENIVIEMARENQTTQKGQKNSRERMKRIEEGIKELGSQILKEHPVENTQLQNEKLYLYYLQNGRDMYVDQELDINRLSDYDVDHIVPQSFLKDDSIDNKVLTRSDKARGKSDNVPSEEVVKKMKNYWRQLLNAKLITQRKFDNLTKAERGGLSELDKAGFIKRQLVETRQITKHVAQILDSRMNTKYDENDKLIREVKVITLKSKLVSDFRKDFQFYKVREINNYHHAHDAYLNAVVGTALIKKYPKLESEFVYGDYKVYDVRKMIAKSEQEIGKATAKYFFYSNIMNFFKTEITLANGEIRKRPLIETNGETGEIVWDKGRDFATVRKVLSMPQVNIVKKTEVQTGGFSKESILPKRNSDKLIARKKDWDPKKYGGFDSPTVAYSVLVVAKVEKGKSKKLKSVKELLGITIMERSSFEKNPIDFLEAKGYKEVKKDLIIKLPKYSLFELENGRKRMLASAGELQKGNELALPSKYVNFLYLASHYEKLKGSPEDNEQKQLFVEQHKHYLDEIIEQISEFSKRVILADANLDKVLSAYNKHRDKPIREQAENIIHLFTLTNLGAPAAFKYFDTTIDRKRYTSTKEVLDATLIHQSITGLYETRIDLSQLGGDGGGSSGGGEAAAKGGTLNIEDEHRLHETSKEPDVSLGSTWLSDFPQAWAETGGMGLAVRQAPLIIPLKATSTPVSIKQYPMSQEARLGIKPHIQRLLDQGILVPCQSPWNTPLLPVKKPGTNDYRPVQDLREVNKRVEDIHPTVPNPYNLLSGLPPSHQWYTVLDLKDAFFCLRLHPTSQPLFAFEWRDPEMGISGQLTWTRLPQGFKNSPTLFNEALHRDLADFRIQHPDLILLQYVDDLLLAATSELDCQQGTRALLQTLGNLGYRASAKKAQICQKQVKYLGYLLKEGQRWLTEARKETVMGQPTPKTPRQLREFLGKAGFCRLFIPGFAEMAAPLYPLTKPGTLFNWGPDQQKAYQEIKQALLTAPALGLPDLTKPFELFVDEKQGYAKGVLTQKLGPWRRPVAYLSKKLDPVAAGWPPCLRMVAAIAVLTKDAGKLTMGQPLVILAPHAVEALVKQPPDRWLSNARMTHYQALLLDTDRVQFGPVVALNPATLLPLPEEGLQHNCLDILAEAHGTRPDLTDQPLPDADHTWYTDGSSLLQEGQRKAGAAVTTETEVIWAKALPAGTSAQRAELIALTQALKMAEGKKLNVYTDSRYAFATAHIHGEIYRRRGWLTSEGKEIKNKDEILALLKALFLPKRLSIIHCPGHQKGHSAEARGNRMADQAARKAAITETPDTSTLLAGKRTADGSEFEKRTADGSEFESPKKKAKVE

SEQ ID NO: 2811 - skipped

SEQ ID NO: 2812 - protein, 2088 aa, synthetic construct
MPAAKRVKLDGGDKKYSIGLDIGTNSVGWAVITDEYKVPSKKFKVLGNTDRHSIKKNLIGALLFDSGETAEATRLKRTARRRYTRRKNRICYLQEIFSNEMAKVDDSFFHRLEESFLVEEDKKHERHPIFGNIVDEVAYHEKYPTIYHLRKKLVDSTDKADLRLIYLALAHMIKFRGHFLIEGDLNPDNSDVDKLFIQLVQTYNQLFEENPINASGVDAKAILSARLSKSRRLENLIAQLPGEKKNGLFGNLIALSLGLTPNFKSNFDLAEDAKLQLSKDTYDDDLDNLLAQIGDQYADLFLAAKNLSDAILLSDILRVNTEITKAPLSASMIKRYDEHHQDLTLLKALVRQQLPEKYKEIFFDQSKNGYAGYIDGGASQEEFYKFIKPILEKMDGTEELLVKLNREDLLRKQRTFDNGSIPHQIHLGELHAILRRQEDFYPFLKDNREKIEKILTFRIPYYVGPLARGNSRFAWMTRKSEETITPWNFEEVVDKGASAQSFIERMTNFDKNLPNEKVLPKHSLLYEYFTVYNELTKVKYVTEGMRKPAFLSGEQKKAIVDLLFKTNRKVTVKQLKEDYFKKIECFDSVEISGVEDRFNASLGTYHDLLKIIKDKDFLDNEENEDILEDIVLTLTLFEDREMIEERLKTYAHLFDDKVMKQLKRRRYTGWGRLSRKLINGIRDKQSGKTILDFLKSDGFANRNFMQLIHDDSLTFKEDIQKAQVSGQGDSLHEHIANLAGSPAIKKGILQTVKVVDELVKVMGRHKPENIVIEMARENQTTQKGQKNSRERMKRIEEGIKELGSQILKEHPVENTQLQNEKLYLYYLQNGRDMYVDQELDINRLSDYDVDHIVPQSFLKDDSIDNKVLTRSDKARGKSDNVPSEEVVKKMKNYWRQLLNAKLITQRKFDNLTKAERGGLSELDKAGFIKRQLVETRQITKHVAQILDSRMNTKYDENDKLIREVKVITLKSKLVSDFRKDFQFYKVREINNYHHAHDAYLNAVVGTALIKKYPKLESEFVYGDYKVYDVRKMIAKSEQEIGKATAKYFFYSNIMNFFKTEITLANGEIRKRPLIETNGETGEIVWDKGRDFATVRKVLSMPQVNIVKKTEVQTGGFSKESILPKRNSDKLIARKKDWDPKKYGGFDSPTVAYSVLVVAKVEKGKSKKLKSVKELLGITIMERSSFEKNPIDFLEAKGYKEVKKDLIIKLPKYSLFELENGRKRMLASAGELQKGNELALPSKYVNFLYLASHYEKLKGSPEDNEQKQLFVEQHKHYLDEIIEQISEFSKRVILADANLDKVLSAYNKHRDKPIREQAENIIHLFTLTNLGAPAAFKYFDTTIDRKRYTSTKEVLDATLIHQSITGLYETRIDLSQLGGDGGPAPGGTLNIEDEHRLHETSKEPDVSLGSTWLSDFPQAWAETGGMGLAVRQAPLIIPLKATSTPVSIKQYPMSQEARLGIKPHIQRLLDQGILVPCQSPWNTPLLPVKKPGTNDYRPVQDLREVNKRVEDIHPTVPNPYNLLSGLPPSHQWYTVLDLKDAFFCLRLHPTSQPLFAFEWRDPEMGISGQLTWTRLPQGFKNSPTLFNEALHRDLADFRIQHPDLILLQYVDDLLLAATSELDCQQGTRALLQTLGNLGYRASAKKAQICQKQVKYLGYLLKEGQRWLTEARKETVMGQPTPKTPRQLREFLGKAGFCRLFIPGFAEMAAPLYPLTKPGTLFNWGPDQQKAYQEIKQALLTAPALGLPDLTKPFELFVDEKQGYAKGVLTQKLGPWRRPVAYLSKKLDPVAAGWPPCLRMVAAIAVLTKDAGKLTMGQPLVILAPHAVEALVKQPPDRWLSNARMTHYQALLLDTDRVQFGPVVALNPATLLPLPEEGLQHNCLDILAEAHGTRPDLTDQPLPDADHTWYTDGSSLLQEGQRKAGAAVTTETEVIWAKALPAGTSAQRAELIALTQALKMAEGKKLNVYTDSRYAFATAHIHGEIYRRRGWLTSEGKEIKNKDEILALLKALFLPKRLSIIHCPGHQKGHSAEARGNRMADQAARKAAITETPDTSTLLAGKRTADGSEFEKRTADGSEFESPKKKAKVE

SEQ ID NO: 2813 - protein, 2115 aa, synthetic construct
MPAAKRVKLDGGDKKYSIGLDIGTNSVGWAVITDEYKVPSKKFKVLGNTDRHSIKKNLIGALLFDSGETAEATRLKRTARRRYTRRKNRICYLQEIFSNEMAKVDDSFFHRLEESFLVEEDKKHERHPIFGNIVDEVAYHEKYPTIYHLRKKLVDSTDKADLRLIYLALAHMIKFRGHFLIEGDLNPDNSDVDKLFIQLVQTYNQLFEENPINASGVDAKAILSARLSKSRRLENLIAQLPGEKKNGLFGNLIALSLGLTPNFKSNFDLAEDAKLQLSKDTYDDDLDNLLAQIGDQYADLFLAAKNLSDAILLSDILRVNTEITKAPLSASMIKRYDEHHQDLTLLKALVRQQLPEKYKEIFFDQSKNGYAGYIDGGASQEEFYKFIKPILEKMDGTEELLVKLNREDLLRKQRTFDNGSIPHQIHLGELHAILRRQEDFYPFLKDNREKIEKILTFRIPYYVGPLARGNSRFAWMTRKSEETITPWNFEEVVDKGASAQSFIERMTNFDKNLPNEKVLPKHSLLYEYFTVYNELTKVKYVTEGMRKPAFLSGEQKKAIVDLLFKTNRKVTVKQLKEDYFKKIECFDSVEISGVEDRFNASLGTYHDLLKIIKDKDFLDNEENEDILEDIVLTLTLFEDREMIEERLKTYAHLFDDKVMKQLKRRRYTGWGRLSRKLINGIRDKQSGKTILDFLKSDGFANRNFMQLIHDDSLTFKEDIQKAQVSGQGDSLHEHIANLAGSPAIKKGILQTVKVVDELVKVMGRHKPENIVIEMARENQTTQKGQKNSRERMKRIEEGIKELGSQILKEHPVENTQLQNEKLYLYYLQNGRDMYVDQELDINRLSDYDVDHIVPQSFLKDDSIDNKVLTRSDKARGKSDNVPSEEVVKKMKNYWRQLLNAKLITQRKFDNLTKAERGGLSELDKAGFIKRQLVETRQITKHVAQILDSRMNTKYDENDKLIREVKVITLKSKLVSDFRKDFQFYKVREINNYHHAHDAYLNAVVGTALIKKYPKLESEFVYGDYKVYDVRKMIAKSEQEIGKATAKYFFYSNIMNFFKTEITLANGEIRKRPLIETNGETGEIVWDKGRDFATVRKVLSMPQVNIVKKTEVQTGGFSKESILPKRNSDKLIARKKDWDPKKYGGFDSPTVAYSVLVVAKVEKGKSKKLKSVKELLGITIMERSSFEKNPIDFLEAKGYKEVKKDLIIKLPKYSLFELENGRKRMLASAGELQKGNELALPSKYVNFLYLASHYEKLKGSPEDNEQKQLFVEQHKHYLDEIIEQISEFSKRVILADANLDKVLSAYNKHRDKPIREQAENIIHLFTLTNLGAPAAFKYFDTTIDRKRYTSTKEVLDATLIHQSITGLYETRIDLSQLGGDGGEAAAKEAAAKEAAAKEAAAKEAAAKEAAAKGGTLNIEDEHRLHETSKEPDVSLGSTWLSDFPQAWAETGGMGLAVRQAPLIIPLKATSTPVSIKQYPMSQEARLGIKPHIQRLLDQGILVPCQSPWNTPLLPVKKPGTNDYRPVQDLREVNKRVEDIHPTVPNPYNLLSGLPPSHQWYTVLDLKDAFFCLRLHPTSQPLFAFEWRDPEMGISGQLTWTRLPQGFKNSPTLFNEALHRDLADFRIQHPDLILLQYVDDLLLAATSELDCQQGTRALLQTLGNLGYRASAKKAQICQKQVKYLGYLLKEGQRWLTEARKETVMGQPTPKTPRQLREFLGKAGFCRLFIPGFAEMAAPLYPLTKPGTLFNWGPDQQKAYQEIKQALLTAPALGLPDLTKPFELFVDEKQGYAKGVLTQKLGPWRRPVAYLSKKLDPVAAGWPPCLRMVAAIAVLTKDAGKLTMGQPLVILAPHAVEALVKQPPDRWLSNARMTHYQALLLDTDRVQFGPVVALNPATLLPLPEEGLQHNCLDILAEAHGTRPDLTDQPLPDADHTWYTDGSSLLQEGQRKAGAAVTTETEVIWAKALPAGTSAQRAELIALTQALKMAEGKKLNVYTDSRYAFATAHIHGEIYRRRGWLTSEGKEIKNKDEILALLKALFLPKRLSIIHCPGHQKGHSAEARGNRMADQAARKAAITETPDTSTLLAGKRTADGSEFEKRTADGSEFESPKKKAKVE

SEQ ID NO: 2814 - skipped

SEQ ID NO: 2815 - protein, 2096 aa, synthetic construct
MPAAKRVKLDGGDKKYSIGLDIGTNSVGWAVITDEYKVPSKKFKVLGNTDRHSIKKNLIGALLFDSGETAEATRLKRTARRRYTRRKNRICYLQEIFSNEMAKVDDSFFHRLEESFLVEEDKKHERHPIFGNIVDEVAYHEKYPTIYHLRKKLVDSTDKADLRLIYLALAHMIKFRGHFLIEGDLNPDNSDVDKLFIQLVQTYNQLFEENPINASGVDAKAILSARLSKSRRLENLIAQLPGEKKNGLFGNLIALSLGLTPNFKSNFDLAEDAKLQLSKDTYDDDLDNLLAQIGDQYADLFLAAKNLSDAILLSDILRVNTEITKAPLSASMIKRYDEHHQDLTLLKALVRQQLPEKYKEIFFDQSKNGYAGYIDGGASQEEFYKFIKPILEKMDGTEELLVKLNREDLLRKQRTFDNGSIPHQIHLGELHAILRRQEDFYPFLKDNREKIEKILTFRIPYYVGPLARGNSRFAWMTRKSEETITPWNFEEVVDKGASAQSFIERMTNFDKNLPNEKVLPKHSLLYEYFTVYNELTKVKYVTEGMRKPAFLSGEQKKAIVDLLFKTNRKVTVKQLKEDYFKKIECFDSVEISGVEDRFNASLGTYHDLLKIIKDKDFLDNEENEDILEDIVLTLTLFEDREMIEERLKTYAHLFDDKVMKQLKRRRYTGWGRLSRKLINGIRDKQSGKTILDFLKSDGFANRNFMQLIHDDSLTFKEDIQKAQVSGQGDSLHEHIANLAGSPAIKKGILQTVKVVDELVKVMGRHKPENIVIEMARENQTTQKGQKNSRERMKRIEEGIKELGSQILKEHPVENTQLQNEKLYLYYLQNGRDMYVDQELDINRLSDYDVDHIVPQSFLKDDSIDNKVLTRSDKARGKSDNVPSEEVVKKMKNYWRQLLNAKLITQRKFDNLTKAERGGLSELDKAGFIKRQLVETRQITKHVAQILDSRMNTKYDENDKLIREVKVITLKSKLVSDFRKDFQFYKVREINNYHHAHDAYLNAVVGTALIKKYPKLESEFVYGDYKVYDVRKMIAKSEQEIGKATAKYFFYSNIMNFFKTEITLANGEIRKRPLIETNGETGEIVWDKGRDFATVRKVLSMPQVNIVKKTEVQTGGFSKESILPKRNSDKLIARKKDWDPKKYGGFDSPTVAYSVLVVAKVEKGKSKKLKSVKELLGITIMERSSFEKNPIDFLEAKGYKEVKKDLIIKLPKYSLFELENGRKRMLASAGELQKGNELALPSKYVNFLYLASHYEKLKGSPEDNEQKQLFVEQHKHYLDEIIEQISEFSKRVILADANLDKVLSAYNKHRDKPIREQAENIIHLFTLTNLGAPAAFKYFDTTIDRKRYTSTKEVLDATLIHQSITGLYETRIDLSQLGGDGGEAAAKGGGGGSGGTLNIEDEHRLHETSKEPDVSLGSTWLSDFPQAWAETGGMGLAVRQAPLIIPLKATSTPVSIKQYPMSQEARLGIKPHIQRLLDQGILVPCQSPWNTPLLPVKKPGTNDYRPVQDLREVNKRVEDIHPTVPNPYNLLSGLPPSHQWYTVLDLKDAFFCLRLHPTSQPLFAFEWRDPEMGISGQLTWTRLPQGFKNSPTLFNEALHRDLADFRIQHPDLILLQYVDDLLLAATSELDCQQGTRALLQTLGNLGYRASAKKAQICQKQVKYLGYLLKEGQRWLTEARKETVMGQPTPKTPRQLREFLGKAGFCRLFIPGFAEMAAPLYPLTKPGTLFNWGPDQQKAYQEIKQALLTAPALGLPDLTKPFELFVDEKQGYAKGVLTQKLGPWRRPVAYLSKKLDPVAAGWPPCLRMVAAIAVLTKDAGKLTMGQPLVILAPHAVEALVKQPPDRWLSNARMTHYQALLLDTDRVQFGPVVALNPATLLPLPEEGLQHNCLDILAEAHGTRPDLTDQPLPDADHTWYTDGSSLLQEGQRKAGAAVTTETEVIWAKALPAGTSAQRAELIALTQALKMAEGKKLNVYTDSRYAFATAHIHGEIYRRRGWLTSEGKEIKNKDEILALLKALFLPKRLSIIHCPGHQKGHSAEARGNRMADQAARKAAITETPDTSTLLAGKRTADGSEFEKRTADGSEFESPKKKAKVE

SEQ ID NO: 2816 - skipped

SEQ ID NO: 2817 - protein, 2096 aa, synthetic construct
MPAAKRVKLDGGDKKYSIGLDIGTNSVGWAVITDEYKVPSKKFKVLGNTDRHSIKKNLIGALLFDSGETAEATRLKRTARRRYTRRKNRICYLQEIFSNEMAKVDDSFFHRLEESFLVEEDKKHERHPIFGNIVDEVAYHEKYPTIYHLRKKLVDSTDKADLRLIYLALAHMIKFRGHFLIEGDLNPDNSDVDKLFIQLVQTYNQLFEENPINASGVDAKAILSARLSKSRRLENLIAQLPGEKKNGLFGNLIALSLGLTPNFKSNFDLAEDAKLQLSKDTYDDDLDNLLAQIGDQYADLFLAAKNLSDAILLSDILRVNTEITKAPLSASMIKRYDEHHQDLTLLKALVRQQLPEKYKEIFFDQSKNGYAGYIDGGASQEEFYKFIKPILEKMDGTEELLVKLNREDLLRKQRTFDNGSIPHQIHLGELHAILRRQEDFYPFLKDNREKIEKILTFRIPYYVGPLARGNSRFAWMTRKSEETITPWNFEEVVDKGASAQSFIERMTNFDKNLPNEKVLPKHSLLYEYFTVYNELTKVKYVTEGMRKPAFLSGEQKKAIVDLLFKTNRKVTVKQLKEDYFKKIECFDSVEISGVEDRFNASLGTYHDLLKIIKDKDFLDNEENEDILEDIVLTLTLFEDREMIEERLKTYAHLFDDKVMKQLKRRRYTGWGRLSRKLINGIRDKQSGKTILDFLKSDGFANRNFMQLIHDDSLTFKEDIQKAQVSGQGDSLHEHIANLAGSPAIKKGILQTVKVVDELVKVMGRHKPENIVIEMARENQTTQKGQKNSRERMKRIEEGIKELGSQILKEHPVENTQLQNEKLYLYYLQNGRDMYVDQELDINRLSDYDVDHIVPQSFLKDDSIDNKVLTRSDKARGKSDNVPSEEVVKKMKNYWRQLLNAKLITQRKFDNLTKAERGGLSELDKAGFIKRQLVETRQITKHVAQILDSRMNTKYDENDKLIREVKVITLKSKLVSDFRKDFQFYKVREINNYHHAHDAYLNAVVGTALIKKYPKLESEFVYGDYKVYDVRKMIAKSEQEIGKATAKYFFYSNIMNFFKTEITLANGEIRKRPLIETNGETGEIVWDKGRDFATVRKVLSMPQVNIVKKTEVQTGGFSKESILPKRNSDKLIARKKDWDPKKYGGFDSPTVAYSVLVVAKVEKGKSKKLKSVKELLGITIMERSSFEKNPIDFLEAKGYKEVKKDLIIKLPKYSLFELENGRKRMLASAGELQKGNELALPSKYVNFLYLASHYEKLKGSPEDNEQKQLFVEQHKHYLDEIIEQISEFSKRVILADANLDKVLSAYNKHRDKPIREQAENIIHLFTLTNLGAPAAFKYFDTTIDRKRYTSTKEVLDATLIHQSITGLYETRIDLSQLGGDGGEAAAKGGSGSSGGTLNIEDEHRLHETSKEPDVSLGSTWLSDFPQAWAETGGMGLAVRQAPLIIPLKATSTPVSIKQYPMSQEARLGIKPHIQRLLDQGILVPCQSPWNTPLLPVKKPGTNDYRPVQDLREVNKRVEDIHPTVPNPYNLLSGLPPSHQWYTVLDLKDAFFCLRLHPTSQPLFAFEWRDPEMGISGQLTWTRLPQGFKNSPTLFNEALHRDLADFRIQHPDLILLQYVDDLLLAATSELDCQQGTRALLQTLGNLGYRASAKKAQICQKQVKYLGYLLKEGQRWLTEARKETVMGQPTPKTPRQLREFLGKAGFCRLFIPGFAEMAAPLYPLTKPGTLFNWGPDQQKAYQEIKQALLTAPALGLPDLTKPFELFVDEKQGYAKGVLTQKLGPWRRPVAYLSKKLDPVAAGWPPCLRMVAAIAVLTKDAGKLTMGQPLVILAPHAVEALVKQPPDRWLSNARMTHYQALLLDTDRVQFGPVVALNPATLLPLPEEGLQHNCLDILAEAHGTRPDLTDQPLPDADHTWYTDGSSLLQEGQRKAGAAVTTETEVIWAKALPAGTSAQRAELIALTQALKMAEGKKLNVYTDSRYAFATAHIHGEIYRRRGWLTSEGKEIKNKDEILALLKALFLPKRLSIIHCPGHQKGHSAEARGNRMADQAARKAAITETPDTSTLLAGKRTADGSEFEKRTADGSEFESPKKKAKVE

SEQ ID NO: 2818 - protein, 2094 aa, synthetic construct
MPAAKRVKLDGGDKKYSIGLDIGTNSVGWAVITDEYKVPSKKFKVLGNTDRHSIKKNLIGALLFDSGETAEATRLKRTARRRYTRRKNRICYLQEIFSNEMAKVDDSFFHRLEESFLVEEDKKHERHPIFGNIVDEVAYHEKYPTIYHLRKKLVDSTDKADLRLIYLALAHMIKFRGHFLIEGDLNPDNSDVDKLFIQLVQTYNQLFEENPINASGVDAKAILSARLSKSRRLENLIAQLPGEKKNGLFGNLIALSLGLTPNFKSNFDLAEDAKLQLSKDTYDDDLDNLLAQIGDQYADLFLAAKNLSDAILLSDILRVNTEITKAPLSASMIKRYDEHHQDLTLLKALVRQQLPEKYKEIFFDQSKNGYAGYIDGGASQEEFYKFIKPILEKMDGTEELLVKLNREDLLRKQRTFDNGSIPHQIHLGELHAILRRQEDFYPFLKDNREKIEKILTFRIPYYVGPLARGNSRFAWMTRKSEETITPWNFEEVVDKGASAQSFIERMTNFDKNLPNEKVLPKHSLLYEYFTVYNELTKVKYVTEGMRKPAFLSGEQKKAIVDLLFKTNRKVTVKQLKEDYFKKIECFDSVEISGVEDRFNASLGTYHDLLKIIKDKDFLDNEENEDILEDIVLTLTLFEDREMIEERLKTYAHLFDDKVMKQLKRRRYTGWGRLSRKLINGIRDKQSGKTILDFLKSDGFANRNFMQLIHDDSLTFKEDIQKAQVSGQGDSLHEHIANLAGSPAIKKGILQTVKVVDELVKVMGRHKPENIVIEMARENQTTQKGQKNSRERMKRIEEGIKELGSQILKEHPVENTQLQNEKLYLYYLQNGRDMYVDQELDINRLSDYDVDHIVPQSFLKDDSIDNKVLTRSDKARGKSDNVPSEEVVKKMKNYWRQLLNAKLITQRKFDNLTKAERGGLSELDKAGFIKRQLVETRQITKHVAQILDSRMNTKYDENDKLIREVKVITLKSKLVSDFRKDFQFYKVREINNYHHAHDAYLNAVVGTALIKKYPKLESEFVYGDYKVYDVRKMIAKSEQEIGKATAKYFFYSNIMNFFKTEITLANGEIRKRPLIETNGETGEIVWDKGRDFATVRKVLSMPQVNIVKKTEVQTGGFSKESILPKRNSDKLIARKKDWDPKKYGGFDSPTVAYSVLVVAKVEKGKSKKLKSVKELLGITIMERSSFEKNPIDFLEAKGYKEVKKDLIIKLPKYSLFELENGRKRMLASAGELQKGNELALPSKYVNFLYLASHYEKLKGSPEDNEQKQLFVEQHKHYLDEIIEQISEFSKRVILADANLDKVLSAYNKHRDKPIREQAENIIHLFTLTNLGAPAAFKYFDTTIDRKRYTSTKEVLDATLIHQSITGLYETRIDLSQLGGDGGGGSGSSGGGGGTLNIEDEHRLHETSKEPDVSLGSTWLSDFPQAWAETGGMGLAVRQAPLIIPLKATSTPVSIKQYPMSQEARLGIKPHIQRLLDQGILVPCQSPWNTPLLPVKKPGTNDYRPVQDLREVNKRVEDIHPTVPNPYNLLSGLPPSHQWYTVLDLKDAFFCLRLHPTSQPLFAFEWRDPEMGISGQLTWTRLPQGFKNSPTLFNEALHRDLADFRIQHPDLILLQYVDDLLLAATSELDCQQGTRALLQTLGNLGYRASAKKAQICQKQVKYLGYLLKEGQRWLTEARKETVMGQPTPKTPRQLREFLGKAGFCRLFIPGFAEMAAPLYPLTKPGTLFNWGPDQQKAYQEIKQALLTAPALGLPDLTKPFELFVDEKQGYAKGVLTQKLGPWRRPVAYLSKKLDPVAAGWPPCLRMVAAIAVLTKDAGKLTMGQPLVILAPHAVEALVKQPPDRWLSNARMTHYQALLLDTDRVQFGPVVALNPATLLPLPEEGLQHNCLDILAEAHGTRPDLTDQPLPDADHTWYTDGSSLLQEGQRKAGAAVTTETEVIWAKALPAGTSAQRAELIALTQALKMAEGKKLNVYTDSRYAFATAHIHGEIYRRRGWLTSEGKEIKNKDEILALLKALFLPKRLSIIHCPGHQKGHSAEARGNRMADQAARKAAITETPDTSTLLAGKRTADGSEFEKRTADGSEFESPKKKAKVE

SEQ ID NO: 2819 - protein, 2100 aa, synthetic construct
MPAAKRVKLDGGDKKYSIGLDIGTNSVGWAVITDEYKVPSKKFKVLGNTDRHSIKKNLIGALLFDSGETAEATRLKRTARRRYTRRKNRICYLQEIFSNEMAKVDDSFFHRLEESFLVEEDKKHERHPIFGNIVDEVAYHEKYPTIYHLRKKLVDSTDKADLRLIYLALAHMIKFRGHFLIEGDLNPDNSDVDKLFIQLVQTYNQLFEENPINASGVDAKAILSARLSKSRRLENLIAQLPGEKKNGLFGNLIALSLGLTPNFKSNFDLAEDAKLQLSKDTYDDDLDNLLAQIGDQYADLFLAAKNLSDAILLSDILRVNTEITKAPLSASMIKRYDEHHQDLTLLKALVRQQLPEKYKEIFFDQSKNGYAGYIDGGASQEEFYKFIKPILEKMDGTEELLVKLNREDLLRKQRTFDNGSIPHQIHLGELHAILRRQEDFYPFLKDNREKIEKILTFRIPYYVGPLARGNSRFAWMTRKSEETITPWNFEEVVDKGASAQSFIERMTNFDKNLPNEKVLPKHSLLYEYFTVYNELTKVKYVTEGMRKPAFLSGEQKKAIVDLLFKTNRKVTVKQLKEDYFKKIECFDSVEISGVEDRFNASLGTYHDLLKIIKDKDFLDNEENEDILEDIVLTLTLFEDREMIEERLKTYAHLFDDKVMKQLKRRRYTGWGRLSRKLINGIRDKQSGKTILDFLKSDGFANRNFMQLIHDDSLTFKEDIQKAQVSGQGDSLHEHIANLAGSPAIKKGILQTVKVVDELVKVMGRHKPENIVIEMARENQTTQKGQKNSRERMKRIEEGIKELGSQILKEHPVENTQLQNEKLYLYYLQNGRDMYVDQELDINRLSDYDVDHIVPQSFLKDDSIDNKVLTRSDKARGKSDNVPSEEVVKKMKNYWRQLLNAKLITQRKFDNLTKAERGGLSELDKAGFIKRQLVETRQITKHVAQILDSRMNTKYDENDKLIREVKVITLKSKLVSDFRKDFQFYKVREINNYHHAHDAYLNAVVGTALIKKYPKLESEFVYGDYKVYDVRKMIAKSEQEIGKATAKYFFYSNIMNFFKTEITLANGEIRKRPLIETNGETGEIVWDKGRDFATVRKVLSMPQVNIVKKTEVQTGGFSKESILPKRNSDKLIARKKDWDPKKYGGFDSPTVAYSVLVVAKVEKGKSKKLKSVKELLGITIMERSSFEKNPIDFLEAKGYKEVKKDLIIKLPKYSLFELENGRKRMLASAGELQKGNELALPSKYVNFLYLASHYEKLKGSPEDNEQKQLFVEQHKHYLDEIIEQISEFSKRVILADANLDKVLSAYNKHRDKPIREQAENIIHLFTLTNLGAPAAFKYFDTTIDRKRYTSTKEVLDATLIHQSITGLYETRIDLSQLGGDGGGGGGSGGGGSGGGGSGGTLNIEDEHRLHETSKEPDVSLGSTWLSDFPQAWAETGGMGLAVRQAPLIIPLKATSTPVSIKQYPMSQEARLGIKPHIQRLLDQGILVPCQSPWNTPLLPVKKPGTNDYRPVQDLREVNKRVEDIHPTVPNPYNLLSGLPPSHQWYTVLDLKDAFFCLRLHPTSQPLFAFEWRDPEMGISGQLTWTRLPQGFKNSPTLFNEALHRDLADFRIQHPDLILLQYVDDLLLAATSELDCQQGTRALLQTLGNLGYRASAKKAQICQKQVKYLGYLLKEGQRWLTEARKETVMGQPTPKTPRQLREFLGKAGFCRLFIPGFAEMAAPLYPLTKPGTLFNWGPDQQKAYQEIKQALLTAPALGLPDLTKPFELFVDEKQGYAKGVLTQKLGPWRRPVAYLSKKLDPVAAGWPPCLRMVAAIAVLTKDAGKLTMGQPLVILAPHAVEALVKQPPDRWLSNARMTHYQALLLDTDRVQFGPVVALNPATLLPLPEEGLQHNCLDILAEAHGTRPDLTDQPLPDADHTWYTDGSSLLQEGQRKAGAAVTTETEVIWAKALPAGTSAQRAELIALTQALKMAEGKKLNVYTDSRYAFATAHIHGEIYRRRGWLTSEGKEIKNKDEILALLKALFLPKRLSIIHCPGHQKGHSAEARGNRMADQAARKAAITETPDTSTLLAGKRTADGSEFEKRTADGSEFESPKKKAKVE

SEQ ID NO: 2820 - protein, 2091 aa, synthetic construct
MPAAKRVKLDGGDKKYSIGLDIGTNSVGWAVITDEYKVPSKKFKVLGNTDRHSIKKNLIGALLFDSGETAEATRLKRTARRRYTRRKNRICYLQEIFSNEMAKVDDSFFHRLEESFLVEEDKKHERHPIFGNIVDEVAYHEKYPTIYHLRKKLVDSTDKADLRLIYLALAHMIKFRGHFLIEGDLNPDNSDVDKLFIQLVQTYNQLFEENPINASGVDAKAILSARLSKSRRLENLIAQLPGEKKNGLFGNLIALSLGLTPNFKSNFDLAEDAKLQLSKDTYDDDLDNLLAQIGDQYADLFLAAKNLSDAILLSDILRVNTEITKAPLSASMIKRYDEHHQDLTLLKALVRQQLPEKYKEIFFDQSKNGYAGYIDGGASQEEFYKFIKPILEKMDGTEELLVKLNREDLLRKQRTFDNGSIPHQIHLGELHAILRRQEDFYPFLKDNREKIEKILTFRIPYYVGPLARGNSRFAWMTRKSEETITPWNFEEVVDKGASAQSFIERMTNFDKNLPNEKVLPKHSLLYEYFTVYNELTKVKYVTEGMRKPAFLSGEQKKAIVDLLFKTNRKVTVKQLKEDYFKKIECFDSVEISGVEDRFNASLGTYHDLLKIIKDKDFLDNEENEDILEDIVLTLTLFEDREMIEERLKTYAHLFDDKVMKQLKRRRYTGWGRLSRKLINGIRDKQSGKTILDFLKSDGFANRNFMQLIHDDSLTFKEDIQKAQVSGQGDSLHEHIANLAGSPAIKKGILQTVKVVDELVKVMGRHKPENIVIEMARENQTTQKGQKNSRERMKRIEEGIKELGSQILKEHPVENTQLQNEKLYLYYLQNGRDMYVDQELDINRLSDYDVDHIVPQSFLKDDSIDNKVLTRSDKARGKSDNVPSEEVVKKMKNYWRQLLNAKLITQRKFDNLTKAERGGLSELDKAGFIKRQLVETRQITKHVAQILDSRMNTKYDENDKLIREVKVITLKSKLVSDFRKDFQFYKVREINNYHHAHDAYLNAVVGTALIKKYPKLESEFVYGDYKVYDVRKMIAKSEQEIGKATAKYFFYSNIMNFFKTEITLANGEIRKRPLIETNGETGEIVWDKGRDFATVRKVLSMPQVNIVKKTEVQTGGFSKESILPKRNSDKLIARKKDWDPKKYGGFDSPTVAYSVLVVAKVEKGKSKKLKSVKELLGITIMERSSFEKNPIDFLEAKGYKEVKKDLIIKLPKYSLFELENGRKRMLASAGELQKGNELALPSKYVNFLYLASHYEKLKGSPEDNEQKQLFVEQHKHYLDEIIEQISEFSKRVILADANLDKVLSAYNKHRDKPIREQAENIIHLFTLTNLGAPAAFKYFDTTIDRKRYTSTKEVLDATLIHQSITGLYETRIDLSQLGGDGGGGGGSSGGTLNIEDEHRLHETSKEPDVSLGSTWLSDFPQAWAETGGMGLAVRQAPLIIPLKATSTPVSIKQYPMSQEARLGIKPHIQRLLDQGILVPCQSPWNTPLLPVKKPGTNDYRPVQDLREVNKRVEDIHPTVPNPYNLLSGLPPSHQWYTVLDLKDAFFCLRLHPTSQPLFAFEWRDPEMGISGQLTWTRLPQGFKNSPTLFNEALHRDLADFRIQHPDLILLQYVDDLLLAATSELDCQQGTRALLQTLGNLGYRASAKKAQICQKQVKYLGYLLKEGQRWLTEARKETVMGQPTPKTPRQLREFLGKAGFCRLFIPGFAEMAAPLYPLTKPGTLFNWGPDQQKAYQEIKQALLTAPALGLPDLTKPFELFVDEKQGYAKGVLTQKLGPWRRPVAYLSKKLDPVAAGWPPCLRMVAAIAVLTKDAGKLTMGQPLVILAPHAVEALVKQPPDRWLSNARMTHYQALLLDTDRVQFGPVVALNPATLLPLPEEGLQHNCLDILAEAHGTRPDLTDQPLPDADHTWYTDGSSLLQEGQRKAGAAVTTETEVIWAKALPAGTSAQRAELIALTQALKMAEGKKLNVYTDSRYAFATAHIHGEIYRRRGWLTSEGKEIKNKDEILALLKALFLPKRLSIIHCPGHQKGHSAEARGNRMADQAARKAAITETPDTSTLLAGKRTADGSEFEKRTADGSEFESPKKKAKVE

SEQ ID NO: 2821 - skipped

SEQ ID NO: 2822 - protein, 2096 aa, synthetic construct
MPAAKRVKLDGGDKKYSIGLDIGTNSVGWAVITDEYKVPSKKFKVLGNTDRHSIKKNLIGALLFDSGETAEATRLKRTARRRYTRRKNRICYLQEIFSNEMAKVDDSFFHRLEESFLVEEDKKHERHPIFGNIVDEVAYHEKYPTIYHLRKKLVDSTDKADLRLIYLALAHMIKFRGHFLIEGDLNPDNSDVDKLFIQLVQTYNQLFEENPINASGVDAKAILSARLSKSRRLENLIAQLPGEKKNGLFGNLIALSLGLTPNFKSNFDLAEDAKLQLSKDTYDDDLDNLLAQIGDQYADLFLAAKNLSDAILLSDILRVNTEITKAPLSASMIKRYDEHHQDLTLLKALVRQQLPEKYKEIFFDQSKNGYAGYIDGGASQEEFYKFIKPILEKMDGTEELLVKLNREDLLRKQRTFDNGSIPHQIHLGELHAILRRQEDFYPFLKDNREKIEKILTFRIPYYVGPLARGNSRFAWMTRKSEETITPWNFEEVVDKGASAQSFIERMTNFDKNLPNEKVLPKHSLLYEYFTVYNELTKVKYVTEGMRKPAFLSGEQKKAIVDLLFKTNRKVTVKQLKEDYFKKIECFDSVEISGVEDRFNASLGTYHDLLKIIKDKDFLDNEENEDILEDIVLTLTLFEDREMIEERLKTYAHLFDDKVMKQLKRRRYTGWGRLSRKLINGIRDKQSGKTILDFLKSDGFANRNFMQLIHDDSLTFKEDIQKAQVSGQGDSLHEHIANLAGSPAIKKGILQTVKVVDELVKVMGRHKPENIVIEMARENQTTQKGQKNSRERMKRIEEGIKELGSQILKEHPVENTQLQNEKLYLYYLQNGRDMYVDQELDINRLSDYDVDHIVPQSFLKDDSIDNKVLTRSDKARGKSDNVPSEEVVKKMKNYWRQLLNAKLITQRKFDNLTKAERGGLSELDKAGFIKRQLVETRQITKHVAQILDSRMNTKYDENDKLIREVKVITLKSKLVSDFRKDFQFYKVREINNYHHAHDAYLNAVVGTALIKKYPKLESEFVYGDYKVYDVRKMIAKSEQEIGKATAKYFFYSNIMNFFKTEITLANGEIRKRPLIETNGETGEIVWDKGRDFATVRKVLSMPQVNIVKKTEVQTGGFSKESILPKRNSDKLIARKKDWDPKKYGGFDSPTVAYSVLVVAKVEKGKSKKLKSVKELLGITIMERSSFEKNPIDFLEAKGYKEVKKDLIIKLPKYSLFELENGRKRMLASAGELQKGNELALPSKYVNFLYLASHYEKLKGSPEDNEQKQLFVEQHKHYLDEIIEQISEFSKRVILADANLDKVLSAYNKHRDKPIREQAENIIHLFTLTNLGAPAAFKYFDTTIDRKRYTSTKEVLDATLIHQSITGLYETRIDLSQLGGDGGPAPGGGEAAAKGGTLNIEDEHRLHETSKEPDVSLGSTWLSDFPQAWAETGGMGLAVRQAPLIIPLKATSTPVSIKQYPMSQEARLGIKPHIQRLLDQGILVPCQSPWNTPLLPVKKPGTNDYRPVQDLREVNKRVEDIHPTVPNPYNLLSGLPPSHQWYTVLDLKDAFFCLRLHPTSQPLFAFEWRDPEMGISGQLTWTRLPQGFKNSPTLFNEALHRDLADFRIQHPDLILLQYVDDLLLAATSELDCQQGTRALLQTLGNLGYRASAKKAQICQKQVKYLGYLLKEGQRWLTEARKETVMGQPTPKTPRQLREFLGKAGFCRLFIPGFAEMAAPLYPLTKPGTLFNWGPDQQKAYQEIKQALLTAPALGLPDLTKPFELFVDEKQGYAKGVLTQKLGPWRRPVAYLSKKLDPVAAGWPPCLRMVAAIAVLTKDAGKLTMGQPLVILAPHAVEALVKQPPDRWLSNARMTHYQALLLDTDRVQFGPVVALNPATLLPLPEEGLQHNCLDILAEAHGTRPDLTDQPLPDADHTWYTDGSSLLQEGQRKAGAAVTTETEVIWAKALPAGTSAQRAELIALTQALKMAEGKKLNVYTDSRYAFATAHIHGEIYRRRGWLTSEGKEIKNKDEILALLKALFLPKRLSIIHCPGHQKGHSAEARGNRMADQAARKAAITETPDTSTLLAGKRTADGSEFEKRTADGSEFESPKKKAKVE

SEQ ID NO: 2823 - protein, 2090 aa, synthetic construct
MPAAKRVKLDGGDKKYSIGLDIGTNSVGWAVITDEYKVPSKKFKVLGNTDRHSIKKNLIGALLFDSGETAEATRLKRTARRRYTRRKNRICYLQEIFSNEMAKVDDSFFHRLEESFLVEEDKKHERHPIFGNIVDEVAYHEKYPTIYHLRKKLVDSTDKADLRLIYLALAHMIKFRGHFLIEGDLNPDNSDVDKLFIQLVQTYNQLFEENPINASGVDAKAILSARLSKSRRLENLIAQLPGEKKNGLFGNLIALSLGLTPNFKSNFDLAEDAKLQLSKDTYDDDLDNLLAQIGDQYADLFLAAKNLSDAILLSDILRVNTEITKAPLSASMIKRYDEHHQDLTLLKALVRQQLPEKYKEIFFDQSKNGYAGYIDGGASQEEFYKFIKPILEKMDGTEELLVKLNREDLLRKQRTFDNGSIPHQIHLGELHAILRRQEDFYPFLKDNREKIEKILTFRIPYYVGPLARGNSRFAWMTRKSEETITPWNFEEVVDKGASAQSFIERMTNFDKNLPNEKVLPKHSLLYEYFTVYNELTKVKYVTEGMRKPAFLSGEQKKAIVDLLFKTNRKVTVKQLKEDYFKKIECFDSVEISGVEDRFNASLGTYHDLLKIIKDKDFLDNEENEDILEDIVLTLTLFEDREMIEERLKTYAHLFDDKVMKQLKRRRYTGWGRLSRKLINGIRDKQSGKTILDFLKSDGFANRNFMQLIHDDSLTFKEDIQKAQVSGQGDSLHEHIANLAGSPAIKKGILQTVKVVDELVKVMGRHKPENIVIEMARENQTTQKGQKNSRERMKRIEEGIKELGSQILKEHPVENTQLQNEKLYLYYLQNGRDMYVDQELDINRLSDYDVDHIVPQSFLKDDSIDNKVLTRSDKARGKSDNVPSEEVVKKMKNYWRQLLNAKLITQRKFDNLTKAERGGLSELDKAGFIKRQLVETRQITKHVAQILDSRMNTKYDENDKLIREVKVITLKSKLVSDFRKDFQFYKVREINNYHHAHDAYLNAVVGTALIKKYPKLESEFVYGDYKVYDVRKMIAKSEQEIGKATAKYFFYSNIMNFFKTEITLANGEIRKRPLIETNGETGEIVWDKGRDFATVRKVLSMPQVNIVKKTEVQTGGFSKESILPKRNSDKLIARKKDWDPKKYGGFDSPTVAYSVLVVAKVEKGKSKKLKSVKELLGITIMERSSFEKNPIDFLEAKGYKEVKKDLIIKLPKYSLFELENGRKRMLASAGELQKGNELALPSKYVNFLYLASHYEKLKGSPEDNEQKQLFVEQHKHYLDEIIEQISEFSKRVILADANLDKVLSAYNKHRDKPIREQAENIIHLFTLTNLGAPAAFKYFDTTIDRKRYTSTKEVLDATLIHQSITGLYETRIDLSQLGGDGGEAAAKGGTLNIEDEHRLHETSKEPDVSLGSTWLSDFPQAWAETGGMGLAVRQAPLIIPLKATSTPVSIKQYPMSQEARLGIKPHIQRLLDQGILVPCQSPWNTPLLPVKKPGTNDYRPVQDLREVNKRVEDIHPTVPNPYNLLSGLPPSHQWYTVLDLKDAFFCLRLHPTSQPLFAFEWRDPEMGISGQLTWTRLPQGFKNSPTLFNEALHRDLADFRIQHPDLILLQYVDDLLLAATSELDCQQGTRALLQTLGNLGYRASAKKAQICQKQVKYLGYLLKEGQRWLTEARKETVMGQPTPKTPRQLREFLGKAGFCRLFIPGFAEMAAPLYPLTKPGTLFNWGPDQQKAYQEIKQALLTAPALGLPDLTKPFELFVDEKQGYAKGVLTQKLGPWRRPVAYLSKKLDPVAAGWPPCLRMVAAIAVLTKDAGKLTMGQPLVILAPHAVEALVKQPPDRWLSNARMTHYQALLLDTDRVQFGPVVALNPATLLPLPEEGLQHNCLDILAEAHGTRPDLTDQPLPDADHTWYTDGSSLLQEGQRKAGAAVTTETEVIWAKALPAGTSAQRAELIALTQALKMAEGKKLNVYTDSRYAFATAHIHGEIYRRRGWLTSEGKEIKNKDEILALLKALFLPKRLSIIHCPGHQKGHSAEARGNRMADQAARKAAITETPDTSTLLAGKRTADGSEFEKRTADGSEFESPKKKAKVE

SEQ ID NO: 2824 - skipped

SEQ ID NO: 2825 - protein, 2090 aa, synthetic construct
MPAAKRVKLDGGDKKYSIGLDIGTNSVGWAVITDEYKVPSKKFKVLGNTDRHSIKKNLIGALLFDSGETAEATRLKRTARRRYTRRKNRICYLQEIFSNEMAKVDDSFFHRLEESFLVEEDKKHERHPIFGNIVDEVAYHEKYPTIYHLRKKLVDSTDKADLRLIYLALAHMIKFRGHFLIEGDLNPDNSDVDKLFIQLVQTYNQLFEENPINASGVDAKAILSARLSKSRRLENLIAQLPGEKKNGLFGNLIALSLGLTPNFKSNFDLAEDAKLQLSKDTYDDDLDNLLAQIGDQYADLFLAAKNLSDAILLSDILRVNTEITKAPLSASMIKRYDEHHQDLTLLKALVRQQLPEKYKEIFFDQSKNGYAGYIDGGASQEEFYKFIKPILEKMDGTEELLVKLNREDLLRKQRTFDNGSIPHQIHLGELHAILRRQEDFYPFLKDNREKIEKILTFRIPYYVGPLARGNSRFAWMTRKSEETITPWNFEEVVDKGASAQSFIERMTNFDKNLPNEKVLPKHSLLYEYFTVYNELTKVKYVTEGMRKPAFLSGEQKKAIVDLLFKTNRKVTVKQLKEDYFKKIECFDSVEISGVEDRFNASLGTYHDLLKIIKDKDFLDNEENEDILEDIVLTLTLFEDREMIEERLKTYAHLFDDKVMKQLKRRRYTGWGRLSRKLINGIRDKQSGKTILDFLKSDGFANRNFMQLIHDDSLTFKEDIQKAQVSGQGDSLHEHIANLAGSPAIKKGILQTVKVVDELVKVMGRHKPENIVIEMARENQTTQKGQKNSRERMKRIEEGIKELGSQILKEHPVENTQLQNEKLYLYYLQNGRDMYVDQELDINRLSDYDVDHIVPQSFLKDDSIDNKVLTRSDKARGKSDNVPSEEVVKKMKNYWRQLLNAKLITQRKFDNLTKAERGGLSELDKAGFIKRQLVETRQITKHVAQILDSRMNTKYDENDKLIREVKVITLKSKLVSDFRKDFQFYKVREINNYHHAHDAYLNAVVGTALIKKYPKLESEFVYGDYKVYDVRKMIAKSEQEIGKATAKYFFYSNIMNFFKTEITLANGEIRKRPLIETNGETGEIVWDKGRDFATVRKVLSMPQVNIVKKTEVQTGGFSKESILPKRNSDKLIARKKDWDPKKYGGFDSPTVAYSVLVVAKVEKGKSKKLKSVKELLGITIMERSSFEKNPIDFLEAKGYKEVKKDLIIKLPKYSLFELENGRKRMLASAGELQKGNELALPSKYVNFLYLASHYEKLKGSPEDNEQKQLFVEQHKHYLDEIIEQISEFSKRVILADANLDKVLSAYNKHRDKPIREQAENIIHLFTLTNLGAPAAFKYFDTTIDRKRYTSTKEVLDATLIHQSITGLYETRIDLSQLGGDGGGGGGSGGTLNIEDEHRLHETSKEPDVSLGSTWLSDFPQAWAETGGMGLAVRQAPLIIPLKATSTPVSIKQYPMSQEARLGIKPHIQRLLDQGILVPCQSPWNTPLLPVKKPGTNDYRPVQDLREVNKRVEDIHPTVPNPYNLLSGLPPSHQWYTVLDLKDAFFCLRLHPTSQPLFAFEWRDPEMGISGQLTWTRLPQGFKNSPTLFNEALHRDLADFRIQHPDLILLQYVDDLLLAATSELDCQQGTRALLQTLGNLGYRASAKKAQICQKQVKYLGYLLKEGQRWLTEARKETVMGQPTPKTPRQLREFLGKAGFCRLFIPGFAEMAAPLYPLTKPGTLFNWGPDQQKAYQEIKQALLTAPALGLPDLTKPFELFVDEKQGYAKGVLTQKLGPWRRPVAYLSKKLDPVAAGWPPCLRMVAAIAVLTKDAGKLTMGQPLVILAPHAVEALVKQPPDRWLSNARMTHYQALLLDTDRVQFGPVVALNPATLLPLPEEGLQHNCLDILAEAHGTRPDLTDQPLPDADHTWYTDGSSLLQEGQRKAGAAVTTETEVIWAKALPAGTSAQRAELIALTQALKMAEGKKLNVYTDSRYAFATAHIHGEIYRRRGWLTSEGKEIKNKDEILALLKALFLPKRLSIIHCPGHQKGHSAEARGNRMADQAARKAAITETPDTSTLLAGKRTADGSEFEKRTADGSEFESPKKKAKVE

SEQ ID NO: 2826 - protein, 2096 aa, synthetic construct
MPAAKRVKLDGGDKKYSIGLDIGTNSVGWAVITDEYKVPSKKFKVLGNTDRHSIKKNLIGALLFDSGETAEATRLKRTARRRYTRRKNRICYLQEIFSNEMAKVDDSFFHRLEESFLVEEDKKHERHPIFGNIVDEVAYHEKYPTIYHLRKKLVDSTDKADLRLIYLALAHMIKFRGHFLIEGDLNPDNSDVDKLFIQLVQTYNQLFEENPINASGVDAKAILSARLSKSRRLENLIAQLPGEKKNGLFGNLIALSLGLTPNFKSNFDLAEDAKLQLSKDTYDDDLDNLLAQIGDQYADLFLAAKNLSDAILLSDILRVNTEITKAPLSASMIKRYDEHHQDLTLLKALVRQQLPEKYKEIFFDQSKNGYAGYIDGGASQEEFYKFIKPILEKMDGTEELLVKLNREDLLRKQRTFDNGSIPHQIHLGELHAILRRQEDFYPFLKDNREKIEKILTFRIPYYVGPLARGNSRFAWMTRKSEETITPWNFEEVVDKGASAQSFIERMTNFDKNLPNEKVLPKHSLLYEYFTVYNELTKVKYVTEGMRKPAFLSGEQKKAIVDLLFKTNRKVTVKQLKEDYFKKIECFDSVEISGVEDRFNASLGTYHDLLKIIKDKDFLDNEENEDILEDIVLTLTLFEDREMIEERLKTYAHLFDDKVMKQLKRRRYTGWGRLSRKLINGIRDKQSGKTILDFLKSDGFANRNFMQLIHDDSLTFKEDIQKAQVSGQGDSLHEHIANLAGSPAIKKGILQTVKVVDELVKVMGRHKPENIVIEMARENQTTQKGQKNSRERMKRIEEGIKELGSQILKEHPVENTQLQNEKLYLYYLQNGRDMYVDQELDINRLSDYDVDHIVPQSFLKDDSIDNKVLTRSDKARGKSDNVPSEEVVKKMKNYWRQLLNAKLITQRKFDNLTKAERGGLSELDKAGFIKRQLVETRQITKHVAQILDSRMNTKYDENDKLIREVKVITLKSKLVSDFRKDFQFYKVREINNYHHAHDAYLNAVVGTALIKKYPKLESEFVYGDYKVYDVRKMIAKSEQEIGKATAKYFFYSNIMNFFKTEITLANGEIRKRPLIETNGETGEIVWDKGRDFATVRKVLSMPQVNIVKKTEVQTGGFSKESILPKRNSDKLIARKKDWDPKKYGGFDSPTVAYSVLVVAKVEKGKSKKLKSVKELLGITIMERSSFEKNPIDFLEAKGYKEVKKDLIIKLPKYSLFELENGRKRMLASAGELQKGNELALPSKYVNFLYLASHYEKLKGSPEDNEQKQLFVEQHKHYLDEIIEQISEFSKRVILADANLDKVLSAYNKHRDKPIREQAENIIHLFTLTNLGAPAAFKYFDTTIDRKRYTSTKEVLDATLIHQSITGLYETRIDLSQLGGDGGGGSEAAAKGSSGGTLNIEDEHRLHETSKEPDVSLGSTWLSDFPQAWAETGGMGLAVRQAPLIIPLKATSTPVSIKQYPMSQEARLGIKPHIQRLLDQGILVPCQSPWNTPLLPVKKPGTNDYRPVQDLREVNKRVEDIHPTVPNPYNLLSGLPPSHQWYTVLDLKDAFFCLRLHPTSQPLFAFEWRDPEMGISGQLTWTRLPQGFKNSPTLFNEALHRDLADFRIQHPDLILLQYVDDLLLAATSELDCQQGTRALLQTLGNLGYRASAKKAQICQKQVKYLGYLLKEGQRWLTEARKETVMGQPTPKTPRQLREFLGKAGFCRLFIPGFAEMAAPLYPLTKPGTLFNWGPDQQKAYQEIKQALLTAPALGLPDLTKPFELFVDEKQGYAKGVLTQKLGPWRRPVAYLSKKLDPVAAGWPPCLRMVAAIAVLTKDAGKLTMGQPLVILAPHAVEALVKQPPDRWLSNARMTHYQALLLDTDRVQFGPVVALNPATLLPLPEEGLQHNCLDILAEAHGTRPDLTDQPLPDADHTWYTDGSSLLQEGQRKAGAAVTTETEVIWAKALPAGTSAQRAELIALTQALKMAEGKKLNVYTDSRYAFATAHIHGEIYRRRGWLTSEGKEIKNKDEILALLKALFLPKRLSIIHCPGHQKGHSAEARGNRMADQAARKAAITETPDTSTLLAGKRTADGSEFEKRTADGSEFESPKKKAKVE

SEQ ID NO: 2827 - protein, 2115 aa, synthetic construct
MPAAKRVKLDGGDKKYSIGLDIGTNSVGWAVITDEYKVPSKKFKVLGNTDRHSIKKNLIGALLFDSGETAEATRLKRTARRRYTRRKNRICYLQEIFSNEMAKVDDSFFHRLEESFLVEEDKKHERHPIFGNIVDEVAYHEKYPTIYHLRKKLVDSTDKADLRLIYLALAHMIKFRGHFLIEGDLNPDNSDVDKLFIQLVQTYNQLFEENPINASGVDAKAILSARLSKSRRLENLIAQLPGEKKNGLFGNLIALSLGLTPNFKSNFDLAEDAKLQLSKDTYDDDLDNLLAQIGDQYADLFLAAKNLSDAILLSDILRVNTEITKAPLSASMIKRYDEHHQDLTLLKALVRQQLPEKYKEIFFDQSKNGYAGYIDGGASQEEFYKFIKPILEKMDGTEELLVKLNREDLLRKQRTFDNGSIPHQIHLGELHAILRRQEDFYPFLKDNREKIEKILTFRIPYYVGPLARGNSRFAWMTRKSEETITPWNFEEVVDKGASAQSFIERMTNFDKNLPNEKVLPKHSLLYEYFTVYNELTKVKYVTEGMRKPAFLSGEQKKAIVDLLFKTNRKVTVKQLKEDYFKKIECFDSVEISGVEDRFNASLGTYHDLLKIIKDKDFLDNEENEDILEDIVLTLTLFEDREMIEERLKTYAHLFDDKVMKQLKRRRYTGWGRLSRKLINGIRDKQSGKTILDFLKSDGFANRNFMQLIHDDSLTFKEDIQKAQVSGQGDSLHEHIANLAGSPAIKKGILQTVKVVDELVKVMGRHKPENIVIEMARENQTTQKGQKNSRERMKRIEEGIKELGSQILKEHPVENTQLQNEKLYLYYLQNGRDMYVDQELDINRLSDYDVDHIVPQSFLKDDSIDNKVLTRSDKARGKSDNVPSEEVVKKMKNYWRQLLNAKLITQRKFDNLTKAERGGLSELDKAGFIKRQLVETRQITKHVAQILDSRMNTKYDENDKLIREVKVITLKSKLVSDFRKDFQFYKVREINNYHHAHDAYLNAVVGTALIKKYPKLESEFVYGDYKVYDVRKMIAKSEQEIGKATAKYFFYSNIMNFFKTEITLANGEIRKRPLIETNGETGEIVWDKGRDFATVRKVLSMPQVNIVKKTEVQTGGFSKESILPKRNSDKLIARKKDWDPKKYGGFDSPTVAYSVLVVAKVEKGKSKKLKSVKELLGITIMERSSFEKNPIDFLEAKGYKEVKKDLIIKLPKYSLFELENGRKRMLASAGELQKGNELALPSKYVNFLYLASHYEKLKGSPEDNEQKQLFVEQHKHYLDEIIEQISEFSKRVILADANLDKVLSAYNKHRDKPIREQAENIIHLFTLTNLGAPAAFKYFDTTIDRKRYTSTKEVLDATLIHQSITGLYETRIDLSQLGGDGGGGGGSGGGGSGGGGSGGGGSGGGGSGGGGSGGTLNIEDEHRLHETSKEPDVSLGSTWLSDFPQAWAETGGMGLAVRQAPLIIPLKATSTPVSIKQYPMSQEARLGIKPHIQRLLDQGILVPCQSPWNTPLLPVKKPGTNDYRPVQDLREVNKRVEDIHPTVPNPYNLLSGLPPSHQWYTVLDLKDAFFCLRLHPTSQPLFAFEWRDPEMGISGQLTWTRLPQGFKNSPTLFNEALHRDLADFRIQHPDLILLQYVDDLLLAATSELDCQQGTRALLQTLGNLGYRASAKKAQICQKQVKYLGYLLKEGQRWLTEARKETVMGQPTPKTPRQLREFLGKAGFCRLFIPGFAEMAAPLYPLTKPGTLFNWGPDQQKAYQEIKQALLTAPALGLPDLTKPFELFVDEKQGYAKGVLTQKLGPWRRPVAYLSKKLDPVAAGWPPCLRMVAAIAVLTKDAGKLTMGQPLVILAPHAVEALVKQPPDRWLSNARMTHYQALLLDTDRVQFGPVVALNPATLLPLPEEGLQHNCLDILAEAHGTRPDLTDQPLPDADHTWYTDGSSLLQEGQRKAGAAVTTETEVIWAKALPAGTSAQRAELIALTQALKMAEGKKLNVYTDSRYAFATAHIHGEIYRRRGWLTSEGKEIKNKDEILALLKALFLPKRLSIIHCPGHQKGHSAEARGNRMADQAARKAAITETPDTSTLLAGKRTADGSEFEKRTADGSEFESPKKKAKVE

SEQ ID NO: 2828 - protein, 2093 aa, synthetic construct
MPAAKRVKLDGGDKKYSIGLDIGTNSVGWAVITDEYKVPSKKFKVLGNTDRHSIKKNLIGALLFDSGETAEATRLKRTARRRYTRRKNRICYLQEIFSNEMAKVDDSFFHRLEESFLVEEDKKHERHPIFGNIVDEVAYHEKYPTIYHLRKKLVDSTDKADLRLIYLALAHMIKFRGHFLIEGDLNPDNSDVDKLFIQLVQTYNQLFEENPINASGVDAKAILSARLSKSRRLENLIAQLPGEKKNGLFGNLIALSLGLTPNFKSNFDLAEDAKLQLSKDTYDDDLDNLLAQIGDQYADLFLAAKNLSDAILLSDILRVNTEITKAPLSASMIKRYDEHHQDLTLLKALVRQQLPEKYKEIFFDQSKNGYAGYIDGGASQEEFYKFIKPILEKMDGTEELLVKLNREDLLRKQRTFDNGSIPHQIHLGELHAILRRQEDFYPFLKDNREKIEKILTFRIPYYVGPLARGNSRFAWMTRKSEETITPWNFEEVVDKGASAQSFIERMTNFDKNLPNEKVLPKHSLLYEYFTVYNELTKVKYVTEGMRKPAFLSGEQKKAIVDLLFKTNRKVTVKQLKEDYFKKIECFDSVEISGVEDRFNASLGTYHDLLKIIKDKDFLDNEENEDILEDIVLTLTLFEDREMIEERLKTYAHLFDDKVMKQLKRRRYTGWGRLSRKLINGIRDKQSGKTILDFLKSDGFANRNFMQLIHDDSLTFKEDIQKAQVSGQGDSLHEHIANLAGSPAIKKGILQTVKVVDELVKVMGRHKPENIVIEMARENQTTQKGQKNSRERMKRIEEGIKELGSQILKEHPVENTQLQNEKLYLYYLQNGRDMYVDQELDINRLSDYDVDHIVPQSFLKDDSIDNKVLTRSDKARGKSDNVPSEEVVKKMKNYWRQLLNAKLITQRKFDNLTKAERGGLSELDKAGFIKRQLVETRQITKHVAQILDSRMNTKYDENDKLIREVKVITLKSKLVSDFRKDFQFYKVREINNYHHAHDAYLNAVVGTALIKKYPKLESEFVYGDYKVYDVRKMIAKSEQEIGKATAKYFFYSNIMNFFKTEITLANGEIRKRPLIETNGETGEIVWDKGRDFATVRKVLSMPQVNIVKKTEVQTGGFSKESILPKRNSDKLIARKKDWDPKKYGGFDSPTVAYSVLVVAKVEKGKSKKLKSVKELLGITIMERSSFEKNPIDFLEAKGYKEVKKDLIIKLPKYSLFELENGRKRMLASAGELQKGNELALPSKYVNFLYLASHYEKLKGSPEDNEQKQLFVEQHKHYLDEIIEQISEFSKRVILADANLDKVLSAYNKHRDKPIREQAENIIHLFTLTNLGAPAAFKYFDTTIDRKRYTSTKEVLDATLIHQSITGLYETRIDLSQLGGDGGGSSEAAAKGGTLNIEDEHRLHETSKEPDVSLGSTWLSDFPQAWAETGGMGLAVRQAPLIIPLKATSTPVSIKQYPMSQEARLGIKPHIQRLLDQGILVPCQSPWNTPLLPVKKPGTNDYRPVQDLREVNKRVEDIHPTVPNPYNLLSGLPPSHQWYTVLDLKDAFFCLRLHPTSQPLFAFEWRDPEMGISGQLTWTRLPQGFKNSPTLFNEALHRDLADFRIQHPDLILLQYVDDLLLAATSELDCQQGTRALLQTLGNLGYRASAKKAQICQKQVKYLGYLLKEGQRWLTEARKETVMGQPTPKTPRQLREFLGKAGFCRLFIPGFAEMAAPLYPLTKPGTLFNWGPDQQKAYQEIKQALLTAPALGLPDLTKPFELFVDEKQGYAKGVLTQKLGPWRRPVAYLSKKLDPVAAGWPPCLRMVAAIAVLTKDAGKLTMGQPLVILAPHAVEALVKQPPDRWLSNARMTHYQALLLDTDRVQFGPVVALNPATLLPLPEEGLQHNCLDILAEAHGTRPDLTDQPLPDADHTWYTDGSSLLQEGQRKAGAAVTTETEVIWAKALPAGTSAQRAELIALTQALKMAEGKKLNVYTDSRYAFATAHIHGEIYRRRGWLTSEGKEIKNKDEILALLKALFLPKRLSIIHCPGHQKGHSAEARGNRMADQAARKAAITETPDTSTLLAGKRTADGSEFEKRTADGSEFESPKKKAKVE

SEQ ID NO: 2829 - protein, 2096 aa, synthetic construct
MPAAKRVKLDGGDKKYSIGLDIGTNSVGWAVITDEYKVPSKKFKVLGNTDRHSIKKNLIGALLFDSGETAEATRLKRTARRRYTRRKNRICYLQEIFSNEMAKVDDSFFHRLEESFLVEEDKKHERHPIFGNIVDEVAYHEKYPTIYHLRKKLVDSTDKADLRLIYLALAHMIKFRGHFLIEGDLNPDNSDVDKLFIQLVQTYNQLFEENPINASGVDAKAILSARLSKSRRLENLIAQLPGEKKNGLFGNLIALSLGLTPNFKSNFDLAEDAKLQLSKDTYDDDLDNLLAQIGDQYADLFLAAKNLSDAILLSDILRVNTEITKAPLSASMIKRYDEHHQDLTLLKALVRQQLPEKYKEIFFDQSKNGYAGYIDGGASQEEFYKFIKPILEKMDGTEELLVKLNREDLLRKQRTFDNGSIPHQIHLGELHAILRRQEDFYPFLKDNREKIEKILTFRIPYYVGPLARGNSRFAWMTRKSEETITPWNFEEVVDKGASAQSFIERMTNFDKNLPNEKVLPKHSLLYEYFTVYNELTKVKYVTEGMRKPAFLSGEQKKAIVDLLFKTNRKVTVKQLKEDYFKKIECFDSVEISGVEDRFNASLGTYHDLLKIIKDKDFLDNEENEDILEDIVLTLTLFEDREMIEERLKTYAHLFDDKVMKQLKRRRYTGWGRLSRKLINGIRDKQSGKTILDFLKSDGFANRNFMQLIHDDSLTFKEDIQKAQVSGQGDSLHEHIANLAGSPAIKKGILQTVKVVDELVKVMGRHKPENIVIEMARENQTTQKGQKNSRERMKRIEEGIKELGSQILKEHPVENTQLQNEKLYLYYLQNGRDMYVDQELDINRLSDYDVDHIVPQSFLKDDSIDNKVLTRSDKARGKSDNVPSEEVVKKMKNYWRQLLNAKLITQRKFDNLTKAERGGLSELDKAGFIKRQLVETRQITKHVAQILDSRMNTKYDENDKLIREVKVITLKSKLVSDFRKDFQFYKVREINNYHHAHDAYLNAVVGTALIKKYPKLESEFVYGDYKVYDVRKMIAKSEQEIGKATAKYFFYSNIMNFFKTEITLANGEIRKRPLIETNGETGEIVWDKGRDFATVRKVLSMPQVNIVKKTEVQTGGFSKESILPKRNSDKLIARKKDWDPKKYGGFDSPTVAYSVLVVAKVEKGKSKKLKSVKELLGITIMERSSFEKNPIDFLEAKGYKEVKKDLIIKLPKYSLFELENGRKRMLASAGELQKGNELALPSKYVNFLYLASHYEKLKGSPEDNEQKQLFVEQHKHYLDEIIEQISEFSKRVILADANLDKVLSAYNKHRDKPIREQAENIIHLFTLTNLGAPAAFKYFDTTIDRKRYTSTKEVLDATLIHQSITGLYETRIDLSQLGGDGGPAPEAAAKGGSGGTLNIEDEHRLHETSKEPDVSLGSTWLSDFPQAWAETGGMGLAVRQAPLIIPLKATSTPVSIKQYPMSQEARLGIKPHIQRLLDQGILVPCQSPWNTPLLPVKKPGTNDYRPVQDLREVNKRVEDIHPTVPNPYNLLSGLPPSHQWYTVLDLKDAFFCLRLHPTSQPLFAFEWRDPEMGISGQLTWTRLPQGFKNSPTLFNEALHRDLADFRIQHPDLILLQYVDDLLLAATSELDCQQGTRALLQTLGNLGYRASAKKAQICQKQVKYLGYLLKEGQRWLTEARKETVMGQPTPKTPRQLREFLGKAGFCRLFIPGFAEMAAPLYPLTKPGTLFNWGPDQQKAYQEIKQALLTAPALGLPDLTKPFELFVDEKQGYAKGVLTQKLGPWRRPVAYLSKKLDPVAAGWPPCLRMVAAIAVLTKDAGKLTMGQPLVILAPHAVEALVKQPPDRWLSNARMTHYQALLLDTDRVQFGPVVALNPATLLPLPEEGLQHNCLDILAEAHGTRPDLTDQPLPDADHTWYTDGSSLLQEGQRKAGAAVTTETEVIWAKALPAGTSAQRAELIALTQALKMAEGKKLNVYTDSRYAFATAHIHGEIYRRRGWLTSEGKEIKNKDEILALLKALFLPKRLSIIHCPGHQKGHSAEARGNRMADQAARKAAITETPDTSTLLAGKRTADGSEFEKRTADGSEFESPKKKAKVE

SEQ ID NO: 2830 - protein, 2096 aa, synthetic construct
MPAAKRVKLDGGDKKYSIGLDIGTNSVGWAVITDEYKVPSKKFKVLGNTDRHSIKKNLIGALLFDSGETAEATRLKRTARRRYTRRKNRICYLQEIFSNEMAKVDDSFFHRLEESFLVEEDKKHERHPIFGNIVDEVAYHEKYPTIYHLRKKLVDSTDKADLRLIYLALAHMIKFRGHFLIEGDLNPDNSDVDKLFIQLVQTYNQLFEENPINASGVDAKAILSARLSKSRRLENLIAQLPGEKKNGLFGNLIALSLGLTPNFKSNFDLAEDAKLQLSKDTYDDDLDNLLAQIGDQYADLFLAAKNLSDAILLSDILRVNTEITKAPLSASMIKRYDEHHQDLTLLKALVRQQLPEKYKEIFFDQSKNGYAGYIDGGASQEEFYKFIKPILEKMDGTEELLVKLNREDLLRKQRTFDNGSIPHQIHLGELHAILRRQEDFYPFLKDNREKIEKILTFRIPYYVGPLARGNSRFAWMTRKSEETITPWNFEEVVDKGASAQSFIERMTNFDKNLPNEKVLPKHSLLYEYFTVYNELTKVKYVTEGMRKPAFLSGEQKKAIVDLLFKTNRKVTVKQLKEDYFKKIECFDSVEISGVEDRFNASLGTYHDLLKIIKDKDFLDNEENEDILEDIVLTLTLFEDREMIEERLKTYAHLFDDKVMKQLKRRRYTGWGRLSRKLINGIRDKQSGKTILDFLKSDGFANRNFMQLIHDDSLTFKEDIQKAQVSGQGDSLHEHIANLAGSPAIKKGILQTVKVVDELVKVMGRHKPENIVIEMARENQTTQKGQKNSRERMKRIEEGIKELGSQILKEHPVENTQLQNEKLYLYYLQNGRDMYVDQELDINRLSDYDVDHIVPQSFLKDDSIDNKVLTRSDKARGKSDNVPSEEVVKKMKNYWRQLLNAKLITQRKFDNLTKAERGGLSELDKAGFIKRQLVETRQITKHVAQILDSRMNTKYDENDKLIREVKVITLKSKLVSDFRKDFQFYKVREINNYHHAHDAYLNAVVGTALIKKYPKLESEFVYGDYKVYDVRKMIAKSEQEIGKATAKYFFYSNIMNFFKTEITLANGEIRKRPLIETNGETGEIVWDKGRDFATVRKVLSMPQVNIVKKTEVQTGGFSKESILPKRNSDKLIARKKDWDPKKYGGFDSPTVAYSVLVVAKVEKGKSKKLKSVKELLGITIMERSSFEKNPIDFLEAKGYKEVKKDLIIKLPKYSLFELENGRKRMLASAGELQKGNELALPSKYVNFLYLASHYEKLKGSPEDNEQKQLFVEQHKHYLDEIIEQISEFSKRVILADANLDKVLSAYNKHRDKPIREQAENIIHLFTLTNLGAPAAFKYFDTTIDRKRYTSTKEVLDATLIHQSITGLYETRIDLSQLGGDGGGGGEAAAKPAPGGTLNIEDEHRLHETSKEPDVSLGSTWLSDFPQAWAETGGMGLAVRQAPLIIPLKATSTPVSIKQYPMSQEARLGIKPHIQRLLDQGILVPCQSPWNTPLLPVKKPGTNDYRPVQDLREVNKRVEDIHPTVPNPYNLLSGLPPSHQWYTVLDLKDAFFCLRLHPTSQPLFAFEWRDPEMGISGQLTWTRLPQGFKNSPTLFNEALHRDLADFRIQHPDLILLQYVDDLLLAATSELDCQQGTRALLQTLGNLGYRASAKKAQICQKQVKYLGYLLKEGQRWLTEARKETVMGQPTPKTPRQLREFLGKAGFCRLFIPGFAEMAAPLYPLTKPGTLFNWGPDQQKAYQEIKQALLTAPALGLPDLTKPFELFVDEKQGYAKGVLTQKLGPWRRPVAYLSKKLDPVAAGWPPCLRMVAAIAVLTKDAGKLTMGQPLVILAPHAVEALVKQPPDRWLSNARMTHYQALLLDTDRVQFGPVVALNPATLLPLPEEGLQHNCLDILAEAHGTRPDLTDQPLPDADHTWYTDGSSLLQEGQRKAGAAVTTETEVIWAKALPAGTSAQRAELIALTQALKMAEGKKLNVYTDSRYAFATAHIHGEIYRRRGWLTSEGKEIKNKDEILALLKALFLPKRLSIIHCPGHQKGHSAEARGNRMADQAARKAAITETPDTSTLLAGKRTADGSEFEKRTADGSEFESPKKKAKVE

SEQ ID NO: 2831 - protein, 2096 aa, synthetic construct
MPAAKRVKLDGGDKKYSIGLDIGTNSVGWAVITDEYKVPSKKFKVLGNTDRHSIKKNLIGALLFDSGETAEATRLKRTARRRYTRRKNRICYLQEIFSNEMAKVDDSFFHRLEESFLVEEDKKHERHPIFGNIVDEVAYHEKYPTIYHLRKKLVDSTDKADLRLIYLALAHMIKFRGHFLIEGDLNPDNSDVDKLFIQLVQTYNQLFEENPINASGVDAKAILSARLSKSRRLENLIAQLPGEKKNGLFGNLIALSLGLTPNFKSNFDLAEDAKLQLSKDTYDDDLDNLLAQIGDQYADLFLAAKNLSDAILLSDILRVNTEITKAPLSASMIKRYDEHHQDLTLLKALVRQQLPEKYKEIFFDQSKNGYAGYIDGGASQEEFYKFIKPILEKMDGTEELLVKLNREDLLRKQRTFDNGSIPHQIHLGELHAILRRQEDFYPFLKDNREKIEKILTFRIPYYVGPLARGNSRFAWMTRKSEETITPWNFEEVVDKGASAQSFIERMTNFDKNLPNEKVLPKHSLLYEYFTVYNELTKVKYVTEGMRKPAFLSGEQKKAIVDLLFKTNRKVTVKQLKEDYFKKIECFDSVEISGVEDRFNASLGTYHDLLKIIKDKDFLDNEENEDILEDIVLTLTLFEDREMIEERLKTYAHLFDDKVMKQLKRRRYTGWGRLSRKLINGIRDKQSGKTILDFLKSDGFANRNFMQLIHDDSLTFKEDIQKAQVSGQGDSLHEHIANLAGSPAIKKGILQTVKVVDELVKVMGRHKPENIVIEMARENQTTQKGQKNSRERMKRIEEGIKELGSQILKEHPVENTQLQNEKLYLYYLQNGRDMYVDQELDINRLSDYDVDHIVPQSFLKDDSIDNKVLTRSDKARGKSDNVPSEEVVKKMKNYWRQLLNAKLITQRKFDNLTKAERGGLSELDKAGFIKRQLVETRQITKHVAQILDSRMNTKYDENDKLIREVKVITLKSKLVSDFRKDFQFYKVREINNYHHAHDAYLNAVVGTALIKKYPKLESEFVYGDYKVYDVRKMIAKSEQEIGKATAKYFFYSNIMNFFKTEITLANGEIRKRPLIETNGETGEIVWDKGRDFATVRKVLSMPQVNIVKKTEVQTGGFSKESILPKRNSDKLIARKKDWDPKKYGGFDSPTVAYSVLVVAKVEKGKSKKLKSVKELLGITIMERSSFEKNPIDFLEAKGYKEVKKDLIIKLPKYSLFELENGRKRMLASAGELQKGNELALPSKYVNFLYLASHYEKLKGSPEDNEQKQLFVEQHKHYLDEIIEQISEFSKRVILADANLDKVLSAYNKHRDKPIREQAENIIHLFTLTNLGAPAAFKYFDTTIDRKRYTSTKEVLDATLIHQSITGLYETRIDLSQLGGDGGGGGGSSEAAAKGGTLNIEDEHRLHETSKEPDVSLGSTWLSDFPQAWAETGGMGLAVRQAPLIIPLKATSTPVSIKQYPMSQEARLGIKPHIQRLLDQGILVPCQSPWNTPLLPVKKPGTNDYRPVQDLREVNKRVEDIHPTVPNPYNLLSGLPPSHQWYTVLDLKDAFFCLRLHPTSQPLFAFEWRDPEMGISGQLTWTRLPQGFKNSPTLFNEALHRDLADFRIQHPDLILLQYVDDLLLAATSELDCQQGTRALLQTLGNLGYRASAKKAQICQKQVKYLGYLLKEGQRWLTEARKETVMGQPTPKTPRQLREFLGKAGFCRLFIPGFAEMAAPLYPLTKPGTLFNWGPDQQKAYQEIKQALLTAPALGLPDLTKPFELFVDEKQGYAKGVLTQKLGPWRRPVAYLSKKLDPVAAGWPPCLRMVAAIAVLTKDAGKLTMGQPLVILAPHAVEALVKQPPDRWLSNARMTHYQALLLDTDRVQFGPVVALNPATLLPLPEEGLQHNCLDILAEAHGTRPDLTDQPLPDADHTWYTDGSSLLQEGQRKAGAAVTTETEVIWAKALPAGTSAQRAELIALTQALKMAEGKKLNVYTDSRYAFATAHIHGEIYRRRGWLTSEGKEIKNKDEILALLKALFLPKRLSIIHCPGHQKGHSAEARGNRMADQAARKAAITETPDTSTLLAGKRTADGSEFEKRTADGSEFESPKKKAKVE

SEQ ID NO: 2832 - skipped

SEQ ID NO: 2833 - protein, 2094 aa, synthetic construct
MPAAKRVKLDGGDKKYSIGLDIGTNSVGWAVITDEYKVPSKKFKVLGNTDRHSIKKNLIGALLFDSGETAEATRLKRTARRRYTRRKNRICYLQEIFSNEMAKVDDSFFHRLEESFLVEEDKKHERHPIFGNIVDEVAYHEKYPTIYHLRKKLVDSTDKADLRLIYLALAHMIKFRGHFLIEGDLNPDNSDVDKLFIQLVQTYNQLFEENPINASGVDAKAILSARLSKSRRLENLIAQLPGEKKNGLFGNLIALSLGLTPNFKSNFDLAEDAKLQLSKDTYDDDLDNLLAQIGDQYADLFLAAKNLSDAILLSDILRVNTEITKAPLSASMIKRYDEHHQDLTLLKALVRQQLPEKYKEIFFDQSKNGYAGYIDGGASQEEFYKFIKPILEKMDGTEELLVKLNREDLLRKQRTFDNGSIPHQIHLGELHAILRRQEDFYPFLKDNREKIEKILTFRIPYYVGPLARGNSRFAWMTRKSEETITPWNFEEVVDKGASAQSFIERMTNFDKNLPNEKVLPKHSLLYEYFTVYNELTKVKYVTEGMRKPAFLSGEQKKAIVDLLFKTNRKVTVKQLKEDYFKKIECFDSVEISGVEDRFNASLGTYHDLLKIIKDKDFLDNEENEDILEDIVLTLTLFEDREMIEERLKTYAHLFDDKVMKQLKRRRYTGWGRLSRKLINGIRDKQSGKTILDFLKSDGFANRNFMQLIHDDSLTFKEDIQKAQVSGQGDSLHEHIANLAGSPAIKKGILQTVKVVDELVKVMGRHKPENIVIEMARENQTTQKGQKNSRERMKRIEEGIKELGSQILKEHPVENTQLQNEKLYLYYLQNGRDMYVDQELDINRLSDYDVDHIVPQSFLKDDSIDNKVLTRSDKARGKSDNVPSEEVVKKMKNYWRQLLNAKLITQRKFDNLTKAERGGLSELDKAGFIKRQLVETRQITKHVAQILDSRMNTKYDENDKLIREVKVITLKSKLVSDFRKDFQFYKVREINNYHHAHDAYLNAVVGTALIKKYPKLESEFVYGDYKVYDVRKMIAKSEQEIGKATAKYFFYSNIMNFFKTEITLANGEIRKRPLIETNGETGEIVWDKGRDFATVRKVLSMPQVNIVKKTEVQTGGFSKESILPKRNSDKLIARKKDWDPKKYGGFDSPTVAYSVLVVAKVEKGKSKKLKSVKELLGITIMERSSFEKNPIDFLEAKGYKEVKKDLIIKLPKYSLFELENGRKRMLASAGELQKGNELALPSKYVNFLYLASHYEKLKGSPEDNEQKQLFVEQHKHYLDEIIEQISEFSKRVILADANLDKVLSAYNKHRDKPIREQAENIIHLFTLTNLGAPAAFKYFDTTIDRKRYTSTKEVLDATLIHQSITGLYETRIDLSQLGGDGGPAPGGSGGGGGTLNIEDEHRLHETSKEPDVSLGSTWLSDFPQAWAETGGMGLAVRQAPLIIPLKATSTPVSIKQYPMSQEARLGIKPHIQRLLDQGILVPCQSPWNTPLLPVKKPGTNDYRPVQDLREVNKRVEDIHPTVPNPYNLLSGLPPSHQWYTVLDLKDAFFCLRLHPTSQPLFAFEWRDPEMGISGQLTWTRLPQGFKNSPTLFNEALHRDLADFRIQHPDLILLQYVDDLLLAATSELDCQQGTRALLQTLGNLGYRASAKKAQICQKQVKYLGYLLKEGQRWLTEARKETVMGQPTPKTPRQLREFLGKAGFCRLFIPGFAEMAAPLYPLTKPGTLFNWGPDQQKAYQEIKQALLTAPALGLPDLTKPFELFVDEKQGYAKGVLTQKLGPWRRPVAYLSKKLDPVAAGWPPCLRMVAAIAVLTKDAGKLTMGQPLVILAPHAVEALVKQPPDRWLSNARMTHYQALLLDTDRVQFGPVVALNPATLLPLPEEGLQHNCLDILAEAHGTRPDLTDQPLPDADHTWYTDGSSLLQEGQRKAGAAVTTETEVIWAKALPAGTSAQRAELIALTQALKMAEGKKLNVYTDSRYAFATAHIHGEIYRRRGWLTSEGKEIKNKDEILALLKALFLPKRLSIIHCPGHQKGHSAEARGNRMADQAARKAAITETPDTSTLLAGKRTADGSEFEKRTADGSEFESPKKKAKVE

SEQ ID NO: 2834 - protein, 2090 aa, synthetic construct
MPAAKRVKLDGGDKKYSIGLDIGTNSVGWAVITDEYKVPSKKFKVLGNTDRHSIKKNLIGALLFDSGETAEATRLKRTARRRYTRRKNRICYLQEIFSNEMAKVDDSFFHRLEESFLVEEDKKHERHPIFGNIVDEVAYHEKYPTIYHLRKKLVDSTDKADLRLIYLALAHMIKFRGHFLIEGDLNPDNSDVDKLFIQLVQTYNQLFEENPINASGVDAKAILSARLSKSRRLENLIAQLPGEKKNGLFGNLIALSLGLTPNFKSNFDLAEDAKLQLSKDTYDDDLDNLLAQIGDQYADLFLAAKNLSDAILLSDILRVNTEITKAPLSASMIKRYDEHHQDLTLLKALVRQQLPEKYKEIFFDQSKNGYAGYIDGGASQEEFYKFIKPILEKMDGTEELLVKLNREDLLRKQRTFDNGSIPHQIHLGELHAILRRQEDFYPFLKDNREKIEKILTFRIPYYVGPLARGNSRFAWMTRKSEETITPWNFEEVVDKGASAQSFIERMTNFDKNLPNEKVLPKHSLLYEYFTVYNELTKVKYVTEGMRKPAFLSGEQKKAIVDLLFKTNRKVTVKQLKEDYFKKIECFDSVEISGVEDRFNASLGTYHDLLKIIKDKDFLDNEENEDILEDIVLTLTLFEDREMIEERLKTYAHLFDDKVMKQLKRRRYTGWGRLSRKLINGIRDKQSGKTILDFLKSDGFANRNFMQLIHDDSLTFKEDIQKAQVSGQGDSLHEHIANLAGSPAIKKGILQTVKVVDELVKVMGRHKPENIVIEMARENQTTQKGQKNSRERMKRIEEGIKELGSQILKEHPVENTQLQNEKLYLYYLQNGRDMYVDQELDINRLSDYDVDHIVPQSFLKDDSIDNKVLTRSDKARGKSDNVPSEEVVKKMKNYWRQLLNAKLITQRKFDNLTKAERGGLSELDKAGFIKRQLVETRQITKHVAQILDSRMNTKYDENDKLIREVKVITLKSKLVSDFRKDFQFYKVREINNYHHAHDAYLNAVVGTALIKKYPKLESEFVYGDYKVYDVRKMIAKSEQEIGKATAKYFFYSNIMNFFKTEITLANGEIRKRPLIETNGETGEIVWDKGRDFATVRKVLSMPQVNIVKKTEVQTGGFSKESILPKRNSDKLIARKKDWDPKKYGGFDSPTVAYSVLVVAKVEKGKSKKLKSVKELLGITIMERSSFEKNPIDFLEAKGYKEVKKDLIIKLPKYSLFELENGRKRMLASAGELQKGNELALPSKYVNFLYLASHYEKLKGSPEDNEQKQLFVEQHKHYLDEIIEQISEFSKRVILADANLDKVLSAYNKHRDKPIREQAENIIHLFTLTNLGAPAAFKYFDTTIDRKRYTSTKEVLDATLIHQSITGLYETRIDLSQLGGDGGGGGGGGGTLNIEDEHRLHETSKEPDVSLGSTWLSDFPQAWAETGGMGLAVRQAPLIIPLKATSTPVSIKQYPMSQEARLGIKPHIQRLLDQGILVPCQSPWNTPLLPVKKPGTNDYRPVQDLREVNKRVEDIHPTVPNPYNLLSGLPPSHQWYTVLDLKDAFFCLRLHPTSQPLFAFEWRDPEMGISGQLTWTRLPQGFKNSPTLFNEALHRDLADFRIQHPDLILLQYVDDLLLAATSELDCQQGTRALLQTLGNLGYRASAKKAQICQKQVKYLGYLLKEGQRWLTEARKETVMGQPTPKTPRQLREFLGKAGFCRLFIPGFAEMAAPLYPLTKPGTLFNWGPDQQKAYQEIKQALLTAPALGLPDLTKPFELFVDEKQGYAKGVLTQKLGPWRRPVAYLSKKLDPVAAGWPPCLRMVAAIAVLTKDAGKLTMGQPLVILAPHAVEALVKQPPDRWLSNARMTHYQALLLDTDRVQFGPVVALNPATLLPLPEEGLQHNCLDILAEAHGTRPDLTDQPLPDADHTWYTDGSSLLQEGQRKAGAAVTTETEVIWAKALPAGTSAQRAELIALTQALKMAEGKKLNVYTDSRYAFATAHIHGEIYRRRGWLTSEGKEIKNKDEILALLKALFLPKRLSIIHCPGHQKGHSAEARGNRMADQAARKAAITETPDTSTLLAGKRTADGSEFEKRTADGSEFESPKKKAKVE

SEQ ID NO: 2835 - protein, 2094 aa, synthetic construct
MPAAKRVKLDGGDKKYSIGLDIGTNSVGWAVITDEYKVPSKKFKVLGNTDRHSIKKNLIGALLFDSGETAEATRLKRTARRRYTRRKNRICYLQEIFSNEMAKVDDSFFHRLEESFLVEEDKKHERHPIFGNIVDEVAYHEKYPTIYHLRKKLVDSTDKADLRLIYLALAHMIKFRGHFLIEGDLNPDNSDVDKLFIQLVQTYNQLFEENPINASGVDAKAILSARLSKSRRLENLIAQLPGEKKNGLFGNLIALSLGLTPNFKSNFDLAEDAKLQLSKDTYDDDLDNLLAQIGDQYADLFLAAKNLSDAILLSDILRVNTEITKAPLSASMIKRYDEHHQDLTLLKALVRQQLPEKYKEIFFDQSKNGYAGYIDGGASQEEFYKFIKPILEKMDGTEELLVKLNREDLLRKQRTFDNGSIPHQIHLGELHAILRRQEDFYPFLKDNREKIEKILTFRIPYYVGPLARGNSRFAWMTRKSEETITPWNFEEVVDKGASAQSFIERMTNFDKNLPNEKVLPKHSLLYEYFTVYNELTKVKYVTEGMRKPAFLSGEQKKAIVDLLFKTNRKVTVKQLKEDYFKKIECFDSVEISGVEDRFNASLGTYHDLLKIIKDKDFLDNEENEDILEDIVLTLTLFEDREMIEERLKTYAHLFDDKVMKQLKRRRYTGWGRLSRKLINGIRDKQSGKTILDFLKSDGFANRNFMQLIHDDSLTFKEDIQKAQVSGQGDSLHEHIANLAGSPAIKKGILQTVKVVDELVKVMGRHKPENIVIEMARENQTTQKGQKNSRERMKRIEEGIKELGSQILKEHPVENTQLQNEKLYLYYLQNGRDMYVDQELDINRLSDYDVDHIVPQSFLKDDSIDNKVLTRSDKARGKSDNVPSEEVVKKMKNYWRQLLNAKLITQRKFDNLTKAERGGLSELDKAGFIKRQLVETRQITKHVAQILDSRMNTKYDENDKLIREVKVITLKSKLVSDFRKDFQFYKVREINNYHHAHDAYLNAVVGTALIKKYPKLESEFVYGDYKVYDVRKMIAKSEQEIGKATAKYFFYSNIMNFFKTEITLANGEIRKRPLIETNGETGEIVWDKGRDFATVRKVLSMPQVNIVKKTEVQTGGFSKESILPKRNSDKLIARKKDWDPKKYGGFDSPTVAYSVLVVAKVEKGKSKKLKSVKELLGITIMERSSFEKNPIDFLEAKGYKEVKKDLIIKLPKYSLFELENGRKRMLASAGELQKGNELALPSKYVNFLYLASHYEKLKGSPEDNEQKQLFVEQHKHYLDEIIEQISEFSKRVILADANLDKVLSAYNKHRDKPIREQAENIIHLFTLTNLGAPAAFKYFDTTIDRKRYTSTKEVLDATLIHQSITGLYETRIDLSQLGGDGGGSSPAPGGGGGTLNIEDEHRLHETSKEPDVSLGSTWLSDFPQAWAETGGMGLAVRQAPLIIPLKATSTPVSIKQYPMSQEARLGIKPHIQRLLDQGILVPCQSPWNTPLLPVKKPGTNDYRPVQDLREVNKRVEDIHPTVPNPYNLLSGLPPSHQWYTVLDLKDAFFCLRLHPTSQPLFAFEWRDPEMGISGQLTWTRLPQGFKNSPTLFNEALHRDLADFRIQHPDLILLQYVDDLLLAATSELDCQQGTRALLQTLGNLGYRASAKKAQICQKQVKYLGYLLKEGQRWLTEARKETVMGQPTPKTPRQLREFLGKAGFCRLFIPGFAEMAAPLYPLTKPGTLFNWGPDQQKAYQEIKQALLTAPALGLPDLTKPFELFVDEKQGYAKGVLTQKLGPWRRPVAYLSKKLDPVAAGWPPCLRMVAAIAVLTKDAGKLTMGQPLVILAPHAVEALVKQPPDRWLSNARMTHYQALLLDTDRVQFGPVVALNPATLLPLPEEGLQHNCLDILAEAHGTRPDLTDQPLPDADHTWYTDGSSLLQEGQRKAGAAVTTETEVIWAKALPAGTSAQRAELIALTQALKMAEGKKLNVYTDSRYAFATAHIHGEIYRRRGWLTSEGKEIKNKDEILALLKALFLPKRLSIIHCPGHQKGHSAEARGNRMADQAARKAAITETPDTSTLLAGKRTADGSEFEKRTADGSEFESPKKKAKVE

SEQ ID NO: 2836 - protein, 2100 aa, synthetic construct
MPAAKRVKLDGGDKKYSIGLDIGTNSVGWAVITDEYKVPSKKFKVLGNTDRHSIKKNLIGALLFDSGETAEATRLKRTARRRYTRRKNRICYLQEIFSNEMAKVDDSFFHRLEESFLVEEDKKHERHPIFGNIVDEVAYHEKYPTIYHLRKKLVDSTDKADLRLIYLALAHMIKFRGHFLIEGDLNPDNSDVDKLFIQLVQTYNQLFEENPINASGVDAKAILSARLSKSRRLENLIAQLPGEKKNGLFGNLIALSLGLTPNFKSNFDLAEDAKLQLSKDTYDDDLDNLLAQIGDQYADLFLAAKNLSDAILLSDILRVNTEITKAPLSASMIKRYDEHHQDLTLLKALVRQQLPEKYKEIFFDQSKNGYAGYIDGGASQEEFYKFIKPILEKMDGTEELLVKLNREDLLRKQRTFDNGSIPHQIHLGELHAILRRQEDFYPFLKDNREKIEKILTFRIPYYVGPLARGNSRFAWMTRKSEETITPWNFEEVVDKGASAQSFIERMTNFDKNLPNEKVLPKHSLLYEYFTVYNELTKVKYVTEGMRKPAFLSGEQKKAIVDLLFKTNRKVTVKQLKEDYFKKIECFDSVEISGVEDRFNASLGTYHDLLKIIKDKDFLDNEENEDILEDIVLTLTLFEDREMIEERLKTYAHLFDDKVMKQLKRRRYTGWGRLSRKLINGIRDKQSGKTILDFLKSDGFANRNFMQLIHDDSLTFKEDIQKAQVSGQGDSLHEHIANLAGSPAIKKGILQTVKVVDELVKVMGRHKPENIVIEMARENQTTQKGQKNSRERMKRIEEGIKELGSQILKEHPVENTQLQNEKLYLYYLQNGRDMYVDQELDINRLSDYDVDHIVPQSFLKDDSIDNKVLTRSDKARGKSDNVPSEEVVKKMKNYWRQLLNAKLITQRKFDNLTKAERGGLSELDKAGFIKRQLVETRQITKHVAQILDSRMNTKYDENDKLIREVKVITLKSKLVSDFRKDFQFYKVREINNYHHAHDAYLNAVVGTALIKKYPKLESEFVYGDYKVYDVRKMIAKSEQEIGKATAKYFFYSNIMNFFKTEITLANGEIRKRPLIETNGETGEIVWDKGRDFATVRKVLSMPQVNIVKKTEVQTGGFSKESILPKRNSDKLIARKKDWDPKKYGGFDSPTVAYSVLVVAKVEKGKSKKLKSVKELLGITIMERSSFEKNPIDFLEAKGYKEVKKDLIIKLPKYSLFELENGRKRMLASAGELQKGNELALPSKYVNFLYLASHYEKLKGSPEDNEQKQLFVEQHKHYLDEIIEQISEFSKRVILADANLDKVLSAYNKHRDKPIREQAENIIHLFTLTNLGAPAAFKYFDTTIDRKRYTSTKEVLDATLIHQSITGLYETRIDLSQLGGDGGGGGGSEAAAKGGGGSGGTLNIEDEHRLHETSKEPDVSLGSTWLSDFPQAWAETGGMGLAVRQAPLIIPLKATSTPVSIKQYPMSQEARLGIKPHIQRLLDQGILVPCQSPWNTPLLPVKKPGTNDYRPVQDLREVNKRVEDIHPTVPNPYNLLSGLPPSHQWYTVLDLKDAFFCLRLHPTSQPLFAFEWRDPEMGISGQLTWTRLPQGFKNSPTLFNEALHRDLADFRIQHPDLILLQYVDDLLLAATSELDCQQGTRALLQTLGNLGYRASAKKAQICQKQVKYLGYLLKEGQRWLTEARKETVMGQPTPKTPRQLREFLGKAGFCRLFIPGFAEMAAPLYPLTKPGTLFNWGPDQQKAYQEIKQALLTAPALGLPDLTKPFELFVDEKQGYAKGVLTQKLGPWRRPVAYLSKKLDPVAAGWPPCLRMVAAIAVLTKDAGKLTMGQPLVILAPHAVEALVKQPPDRWLSNARMTHYQALLLDTDRVQFGPVVALNPATLLPLPEEGLQHNCLDILAEAHGTRPDLTDQPLPDADHTWYTDGSSLLQEGQRKAGAAVTTETEVIWAKALPAGTSAQRAELIALTQALKMAEGKKLNVYTDSRYAFATAHIHGEIYRRRGWLTSEGKEIKNKDEILALLKALFLPKRLSIIHCPGHQKGHSAEARGNRMADQAARKAAITETPDTSTLLAGKRTADGSEFEKRTADGSEFESPKKKAKVE

SEQ ID NO: 2837 - skipped

SEQ ID NO: 2838 - protein, 2096 aa, synthetic construct
MPAAKRVKLDGGDKKYSIGLDIGTNSVGWAVITDEYKVPSKKFKVLGNTDRHSIKKNLIGALLFDSGETAEATRLKRTARRRYTRRKNRICYLQEIFSNEMAKVDDSFFHRLEESFLVEEDKKHERHPIFGNIVDEVAYHEKYPTIYHLRKKLVDSTDKADLRLIYLALAHMIKFRGHFLIEGDLNPDNSDVDKLFIQLVQTYNQLFEENPINASGVDAKAILSARLSKSRRLENLIAQLPGEKKNGLFGNLIALSLGLTPNFKSNFDLAEDAKLQLSKDTYDDDLDNLLAQIGDQYADLFLAAKNLSDAILLSDILRVNTEITKAPLSASMIKRYDEHHQDLTLLKALVRQQLPEKYKEIFFDQSKNGYAGYIDGGASQEEFYKFIKPILEKMDGTEELLVKLNREDLLRKQRTFDNGSIPHQIHLGELHAILRRQEDFYPFLKDNREKIEKILTFRIPYYVGPLARGNSRFAWMTRKSEETITPWNFEEVVDKGASAQSFIERMTNFDKNLPNEKVLPKHSLLYEYFTVYNELTKVKYVTEGMRKPAFLSGEQKKAIVDLLFKTNRKVTVKQLKEDYFKKIECFDSVEISGVEDRFNASLGTYHDLLKIIKDKDFLDNEENEDILEDIVLTLTLFEDREMIEERLKTYAHLFDDKVMKQLKRRRYTGWGRLSRKLINGIRDKQSGKTILDFLKSDGFANRNFMQLIHDDSLTFKEDIQKAQVSGQGDSLHEHIANLAGSPAIKKGILQTVKVVDELVKVMGRHKPENIVIEMARENQTTQKGQKNSRERMKRIEEGIKELGSQILKEHPVENTQLQNEKLYLYYLQNGRDMYVDQELDINRLSDYDVDHIVPQSFLKDDSIDNKVLTRSDKARGKSDNVPSEEVVKKMKNYWRQLLNAKLITQRKFDNLTKAERGGLSELDKAGFIKRQLVETRQITKHVAQILDSRMNTKYDENDKLIREVKVITLKSKLVSDFRKDFQFYKVREINNYHHAHDAYLNAVVGTALIKKYPKLESEFVYGDYKVYDVRKMIAKSEQEIGKATAKYFFYSNIMNFFKTEITLANGEIRKRPLIETNGETGEIVWDKGRDFATVRKVLSMPQVNIVKKTEVQTGGFSKESILPKRNSDKLIARKKDWDPKKYGGFDSPTVAYSVLVVAKVEKGKSKKLKSVKELLGITIMERSSFEKNPIDFLEAKGYKEVKKDLIIKLPKYSLFELENGRKRMLASAGELQKGNELALPSKYVNFLYLASHYEKLKGSPEDNEQKQLFVEQHKHYLDEIIEQISEFSKRVILADANLDKVLSAYNKHRDKPIREQAENIIHLFTLTNLGAPAAFKYFDTTIDRKRYTSTKEVLDATLIHQSITGLYETRIDLSQLGGDGGEAAAKPAPGGGGGTLNIEDEHRLHETSKEPDVSLGSTWLSDFPQAWAETGGMGLAVRQAPLIIPLKATSTPVSIKQYPMSQEARLGIKPHIQRLLDQGILVPCQSPWNTPLLPVKKPGTNDYRPVQDLREVNKRVEDIHPTVPNPYNLLSGLPPSHQWYTVLDLKDAFFCLRLHPTSQPLFAFEWRDPEMGISGQLTWTRLPQGFKNSPTLFNEALHRDLADFRIQHPDLILLQYVDDLLLAATSELDCQQGTRALLQTLGNLGYRASAKKAQICQKQVKYLGYLLKEGQRWLTEARKETVMGQPTPKTPRQLREFLGKAGFCRLFIPGFAEMAAPLYPLTKPGTLFNWGPDQQKAYQEIKQALLTAPALGLPDLTKPFELFVDEKQGYAKGVLTQKLGPWRRPVAYLSKKLDPVAAGWPPCLRMVAAIAVLTKDAGKLTMGQPLVILAPHAVEALVKQPPDRWLSNARMTHYQALLLDTDRVQFGPVVALNPATLLPLPEEGLQHNCLDILAEAHGTRPDLTDQPLPDADHTWYTDGSSLLQEGQRKAGAAVTTETEVIWAKALPAGTSAQRAELIALTQALKMAEGKKLNVYTDSRYAFATAHIHGEIYRRRGWLTSEGKEIKNKDEILALLKALFLPKRLSIIHCPGHQKGHSAEARGNRMADQAARKAAITETPDTSTLLAGKRTADGSEFEKRTADGSEFESPKKKAKVE

SEQ ID NO: 2839 - protein, 2096 aa, synthetic construct
MPAAKRVKLDGGDKKYSIGLDIGTNSVGWAVITDEYKVPSKKFKVLGNTDRHSIKKNLIGALLFDSGETAEATRLKRTARRRYTRRKNRICYLQEIFSNEMAKVDDSFFHRLEESFLVEEDKKHERHPIFGNIVDEVAYHEKYPTIYHLRKKLVDSTDKADLRLIYLALAHMIKFRGHFLIEGDLNPDNSDVDKLFIQLVQTYNQLFEENPINASGVDAKAILSARLSKSRRLENLIAQLPGEKKNGLFGNLIALSLGLTPNFKSNFDLAEDAKLQLSKDTYDDDLDNLLAQIGDQYADLFLAAKNLSDAILLSDILRVNTEITKAPLSASMIKRYDEHHQDLTLLKALVRQQLPEKYKEIFFDQSKNGYAGYIDGGASQEEFYKFIKPILEKMDGTEELLVKLNREDLLRKQRTFDNGSIPHQIHLGELHAILRRQEDFYPFLKDNREKIEKILTFRIPYYVGPLARGNSRFAWMTRKSEETITPWNFEEVVDKGASAQSFIERMTNFDKNLPNEKVLPKHSLLYEYFTVYNELTKVKYVTEGMRKPAFLSGEQKKAIVDLLFKTNRKVTVKQLKEDYFKKIECFDSVEISGVEDRFNASLGTYHDLLKIIKDKDFLDNEENEDILEDIVLTLTLFEDREMIEERLKTYAHLFDDKVMKQLKRRRYTGWGRLSRKLINGIRDKQSGKTILDFLKSDGFANRNFMQLIHDDSLTFKEDIQKAQVSGQGDSLHEHIANLAGSPAIKKGILQTVKVVDELVKVMGRHKPENIVIEMARENQTTQKGQKNSRERMKRIEEGIKELGSQILKEHPVENTQLQNEKLYLYYLQNGRDMYVDQELDINRLSDYDVDHIVPQSFLKDDSIDNKVLTRSDKARGKSDNVPSEEVVKKMKNYWRQLLNAKLITQRKFDNLTKAERGGLSELDKAGFIKRQLVETRQITKHVAQILDSRMNTKYDENDKLIREVKVITLKSKLVSDFRKDFQFYKVREINNYHHAHDAYLNAVVGTALIKKYPKLESEFVYGDYKVYDVRKMIAKSEQEIGKATAKYFFYSNIMNFFKTEITLANGEIRKRPLIETNGETGEIVWDKGRDFATVRKVLSMPQVNIVKKTEVQTGGFSKESILPKRNSDKLIARKKDWDPKKYGGFDSPTVAYSVLVVAKVEKGKSKKLKSVKELLGITIMERSSFEKNPIDFLEAKGYKEVKKDLIIKLPKYSLFELENGRKRMLASAGELQKGNELALPSKYVNFLYLASHYEKLKGSPEDNEQKQLFVEQHKHYLDEIIEQISEFSKRVILADANLDKVLSAYNKHRDKPIREQAENIIHLFTLTNLGAPAAFKYFDTTIDRKRYTSTKEVLDATLIHQSITGLYETRIDLSQLGGDGGGSSPAPEAAAKGGTLNIEDEHRLHETSKEPDVSLGSTWLSDFPQAWAETGGMGLAVRQAPLIIPLKATSTPVSIKQYPMSQEARLGIKPHIQRLLDQGILVPCQSPWNTPLLPVKKPGTNDYRPVQDLREVNKRVEDIHPTVPNPYNLLSGLPPSHQWYTVLDLKDAFFCLRLHPTSQPLFAFEWRDPEMGISGQLTWTRLPQGFKNSPTLFNEALHRDLADFRIQHPDLILLQYVDDLLLAATSELDCQQGTRALLQTLGNLGYRASAKKAQICQKQVKYLGYLLKEGQRWLTEARKETVMGQPTPKTPRQLREFLGKAGFCRLFIPGFAEMAAPLYPLTKPGTLFNWGPDQQKAYQEIKQALLTAPALGLPDLTKPFELFVDEKQGYAKGVLTQKLGPWRRPVAYLSKKLDPVAAGWPPCLRMVAAIAVLTKDAGKLTMGQPLVILAPHAVEALVKQPPDRWLSNARMTHYQALLLDTDRVQFGPVVALNPATLLPLPEEGLQHNCLDILAEAHGTRPDLTDQPLPDADHTWYTDGSSLLQEGQRKAGAAVTTETEVIWAKALPAGTSAQRAELIALTQALKMAEGKKLNVYTDSRYAFATAHIHGEIYRRRGWLTSEGKEIKNKDEILALLKALFLPKRLSIIHCPGHQKGHSAEARGNRMADQAARKAAITETPDTSTLLAGKRTADGSEFEKRTADGSEFESPKKKAKVE

SEQ ID NO: 2840 - protein, 2094 aa, synthetic construct
MPAAKRVKLDGGDKKYSIGLDIGTNSVGWAVITDEYKVPSKKFKVLGNTDRHSIKKNLIGALLFDSGETAEATRLKRTARRRYTRRKNRICYLQEIFSNEMAKVDDSFFHRLEESFLVEEDKKHERHPIFGNIVDEVAYHEKYPTIYHLRKKLVDSTDKADLRLIYLALAHMIKFRGHFLIEGDLNPDNSDVDKLFIQLVQTYNQLFEENPINASGVDAKAILSARLSKSRRLENLIAQLPGEKKNGLFGNLIALSLGLTPNFKSNFDLAEDAKLQLSKDTYDDDLDNLLAQIGDQYADLFLAAKNLSDAILLSDILRVNTEITKAPLSASMIKRYDEHHQDLTLLKALVRQQLPEKYKEIFFDQSKNGYAGYIDGGASQEEFYKFIKPILEKMDGTEELLVKLNREDLLRKQRTFDNGSIPHQIHLGELHAILRRQEDFYPFLKDNREKIEKILTFRIPYYVGPLARGNSRFAWMTRKSEETITPWNFEEVVDKGASAQSFIERMTNFDKNLPNEKVLPKHSLLYEYFTVYNELTKVKYVTEGMRKPAFLSGEQKKAIVDLLFKTNRKVTVKQLKEDYFKKIECFDSVEISGVEDRFNASLGTYHDLLKIIKDKDFLDNEENEDILEDIVLTLTLFEDREMIEERLKTYAHLFDDKVMKQLKRRRYTGWGRLSRKLINGIRDKQSGKTILDFLKSDGFANRNFMQLIHDDSLTFKEDIQKAQVSGQGDSLHEHIANLAGSPAIKKGILQTVKVVDELVKVMGRHKPENIVIEMARENQTTQKGQKNSRERMKRIEEGIKELGSQILKEHPVENTQLQNEKLYLYYLQNGRDMYVDQELDINRLSDYDVDHIVPQSFLKDDSIDNKVLTRSDKARGKSDNVPSEEVVKKMKNYWRQLLNAKLITQRKFDNLTKAERGGLSELDKAGFIKRQLVETRQITKHVAQILDSRMNTKYDENDKLIREVKVITLKSKLVSDFRKDFQFYKVREINNYHHAHDAYLNAVVGTALIKKYPKLESEFVYGDYKVYDVRKMIAKSEQEIGKATAKYFFYSNIMNFFKTEITLANGEIRKRPLIETNGETGEIVWDKGRDFATVRKVLSMPQVNIVKKTEVQTGGFSKESILPKRNSDKLIARKKDWDPKKYGGFDSPTVAYSVLVVAKVEKGKSKKLKSVKELLGITIMERSSFEKNPIDFLEAKGYKEVKKDLIIKLPKYSLFELENGRKRMLASAGELQKGNELALPSKYVNFLYLASHYEKLKGSPEDNEQKQLFVEQHKHYLDEIIEQISEFSKRVILADANLDKVLSAYNKHRDKPIREQAENIIHLFTLTNLGAPAAFKYFDTTIDRKRYTSTKEVLDATLIHQSITGLYETRIDLSQLGGDGGGGGGGSPAPGGTLNIEDEHRLHETSKEPDVSLGSTWLSDFPQAWAETGGMGLAVRQAPLIIPLKATSTPVSIKQYPMSQEARLGIKPHIQRLLDQGILVPCQSPWNTPLLPVKKPGTNDYRPVQDLREVNKRVEDIHPTVPNPYNLLSGLPPSHQWYTVLDLKDAFFCLRLHPTSQPLFAFEWRDPEMGISGQLTWTRLPQGFKNSPTLFNEALHRDLADFRIQHPDLILLQYVDDLLLAATSELDCQQGTRALLQTLGNLGYRASAKKAQICQKQVKYLGYLLKEGQRWLTEARKETVMGQPTPKTPRQLREFLGKAGFCRLFIPGFAEMAAPLYPLTKPGTLFNWGPDQQKAYQEIKQALLTAPALGLPDLTKPFELFVDEKQGYAKGVLTQKLGPWRRPVAYLSKKLDPVAAGWPPCLRMVAAIAVLTKDAGKLTMGQPLVILAPHAVEALVKQPPDRWLSNARMTHYQALLLDTDRVQFGPVVALNPATLLPLPEEGLQHNCLDILAEAHGTRPDLTDQPLPDADHTWYTDGSSLLQEGQRKAGAAVTTETEVIWAKALPAGTSAQRAELIALTQALKMAEGKKLNVYTDSRYAFATAHIHGEIYRRRGWLTSEGKEIKNKDEILALLKALFLPKRLSIIHCPGHQKGHSAEARGNRMADQAARKAAITETPDTSTLLAGKRTADGSEFEKRTADGSEFESPKKKAKVE

SEQ ID NO: 2841-2843 - skipped (3 entries)

SEQ ID NO: 2844 - protein, 2105 aa, synthetic construct
MPAAKRVKLDGGDKKYSIGLDIGTNSVGWAVITDEYKVPSKKFKVLGNTDRHSIKKNLIGALLFDSGETAEATRLKRTARRRYTRRKNRICYLQEIFSNEMAKVDDSFFHRLEESFLVEEDKKHERHPIFGNIVDEVAYHEKYPTIYHLRKKLVDSTDKADLRLIYLALAHMIKFRGHFLIEGDLNPDNSDVDKLFIQLVQTYNQLFEENPINASGVDAKAILSARLSKSRRLENLIAQLPGEKKNGLFGNLIALSLGLTPNFKSNFDLAEDAKLQLSKDTYDDDLDNLLAQIGDQYADLFLAAKNLSDAILLSDILRVNTEITKAPLSASMIKRYDEHHQDLTLLKALVRQQLPEKYKEIFFDQSKNGYAGYIDGGASQEEFYKFIKPILEKMDGTEELLVKLNREDLLRKQRTFDNGSIPHQIHLGELHAILRRQEDFYPFLKDNREKIEKILTFRIPYYVGPLARGNSRFAWMTRKSEETITPWNFEEVVDKGASAQSFIERMTNFDKNLPNEKVLPKHSLLYEYFTVYNELTKVKYVTEGMRKPAFLSGEQKKAIVDLLFKTNRKVTVKQLKEDYFKKIECFDSVEISGVEDRFNASLGTYHDLLKIIKDKDFLDNEENEDILEDIVLTLTLFEDREMIEERLKTYAHLFDDKVMKQLKRRRYTGWGRLSRKLINGIRDKQSGKTILDFLKSDGFANRNFMQLIHDDSLTFKEDIQKAQVSGQGDSLHEHIANLAGSPAIKKGILQTVKVVDELVKVMGRHKPENIVIEMARENQTTQKGQKNSRERMKRIEEGIKELGSQILKEHPVENTQLQNEKLYLYYLQNGRDMYVDQELDINRLSDYDVDHIVPQSFLKDDSIDNKVLTRSDKARGKSDNVPSEEVVKKMKNYWRQLLNAKLITQRKFDNLTKAERGGLSELDKAGFIKRQLVETRQITKHVAQILDSRMNTKYDENDKLIREVKVITLKSKLVSDFRKDFQFYKVREINNYHHAHDAYLNAVVGTALIKKYPKLESEFVYGDYKVYDVRKMIAKSEQEIGKATAKYFFYSNIMNFFKTEITLANGEIRKRPLIETNGETGEIVWDKGRDFATVRKVLSMPQVNIVKKTEVQTGGFSKESILPKRNSDKLIARKKDWDPKKYGGFDSPTVAYSVLVVAKVEKGKSKKLKSVKELLGITIMERSSFEKNPIDFLEAKGYKEVKKDLIIKLPKYSLFELENGRKRMLASAGELQKGNELALPSKYVNFLYLASHYEKLKGSPEDNEQKQLFVEQHKHYLDEIIEQISEFSKRVILADANLDKVLSAYNKHRDKPIREQAENIIHLFTLTNLGAPAAFKYFDTTIDRKRYTSTKEVLDATLIHQSITGLYETRIDLSQLGGDGGEAAAKEAAAKEAAAKEAAAKGGTLNIEDEHRLHETSKEPDVSLGSTWLSDFPQAWAETGGMGLAVRQAPLIIPLKATSTPVSIKQYPMSQEARLGIKPHIQRLLDQGILVPCQSPWNTPLLPVKKPGTNDYRPVQDLREVNKRVEDIHPTVPNPYNLLSGLPPSHQWYTVLDLKDAFFCLRLHPTSQPLFAFEWRDPEMGISGQLTWTRLPQGFKNSPTLFNEALHRDLADFRIQHPDLILLQYVDDLLLAATSELDCQQGTRALLQTLGNLGYRASAKKAQICQKQVKYLGYLLKEGQRWLTEARKETVMGQPTPKTPRQLREFLGKAGFCRLFIPGFAEMAAPLYPLTKPGTLFNWGPDQQKAYQEIKQALLTAPALGLPDLTKPFELFVDEKQGYAKGVLTQKLGPWRRPVAYLSKKLDPVAAGWPPCLRMVAAIAVLTKDAGKLTMGQPLVILAPHAVEALVKQPPDRWLSNARMTHYQALLLDTDRVQFGPVVALNPATLLPLPEEGLQHNCLDILAEAHGTRPDLTDQPLPDADHTWYTDGSSLLQEGQRKAGAAVTTETEVIWAKALPAGTSAQRAELIALTQALKMAEGKKLNVYTDSRYAFATAHIHGEIYRRRGWLTSEGKEIKNKDEILALLKALFLPKRLSIIHCPGHQKGHSAEARGNRMADQAARKAAITETPDTSTLLAGKRTADGSEFEKRTADGSEFESPKKKAKVE

SEQ ID NO: 2845 - protein, 2095 aa, synthetic construct
MPAAKRVKLDGGDKKYSIGLDIGTNSVGWAVITDEYKVPSKKFKVLGNTDRHSIKKNLIGALLFDSGETAEATRLKRTARRRYTRRKNRICYLQEIFSNEMAKVDDSFFHRLEESFLVEEDKKHERHPIFGNIVDEVAYHEKYPTIYHLRKKLVDSTDKADLRLIYLALAHMIKFRGHFLIEGDLNPDNSDVDKLFIQLVQTYNQLFEENPINASGVDAKAILSARLSKSRRLENLIAQLPGEKKNGLFGNLIALSLGLTPNFKSNFDLAEDAKLQLSKDTYDDDLDNLLAQIGDQYADLFLAAKNLSDAILLSDILRVNTEITKAPLSASMIKRYDEHHQDLTLLKALVRQQLPEKYKEIFFDQSKNGYAGYIDGGASQEEFYKFIKPILEKMDGTEELLVKLNREDLLRKQRTFDNGSIPHQIHLGELHAILRRQEDFYPFLKDNREKIEKILTFRIPYYVGPLARGNSRFAWMTRKSEETITPWNFEEVVDKGASAQSFIERMTNFDKNLPNEKVLPKHSLLYEYFTVYNELTKVKYVTEGMRKPAFLSGEQKKAIVDLLFKTNRKVTVKQLKEDYFKKIECFDSVEISGVEDRFNASLGTYHDLLKIIKDKDFLDNEENEDILEDIVLTLTLFEDREMIEERLKTYAHLFDDKVMKQLKRRRYTGWGRLSRKLINGIRDKQSGKTILDFLKSDGFANRNFMQLIHDDSLTFKEDIQKAQVSGQGDSLHEHIANLAGSPAIKKGILQTVKVVDELVKVMGRHKPENIVIEMARENQTTQKGQKNSRERMKRIEEGIKELGSQILKEHPVENTQLQNEKLYLYYLQNGRDMYVDQELDINRLSDYDVDHIVPQSFLKDDSIDNKVLTRSDKARGKSDNVPSEEVVKKMKNYWRQLLNAKLITQRKFDNLTKAERGGLSELDKAGFIKRQLVETRQITKHVAQILDSRMNTKYDENDKLIREVKVITLKSKLVSDFRKDFQFYKVREINNYHHAHDAYLNAVVGTALIKKYPKLESEFVYGDYKVYDVRKMIAKSEQEIGKATAKYFFYSNIMNFFKTEITLANGEIRKRPLIETNGETGEIVWDKGRDFATVRKVLSMPQVNIVKKTEVQTGGFSKESILPKRNSDKLIARKKDWDPKKYGGFDSPTVAYSVLVVAKVEKGKSKKLKSVKELLGITIMERSSFEKNPIDFLEAKGYKEVKKDLIIKLPKYSLFELENGRKRMLASAGELQKGNELALPSKYVNFLYLASHYEKLKGSPEDNEQKQLFVEQHKHYLDEIIEQISEFSKRVILADANLDKVLSAYNKHRDKPIREQAENIIHLFTLTNLGAPAAFKYFDTTIDRKRYTSTKEVLDATLIHQSITGLYETRIDLSQLGGDGGEAAAKEAAAKGGTLNIEDEHRLHETSKEPDVSLGSTWLSDFPQAWAETGGMGLAVRQAPLIIPLKATSTPVSIKQYPMSQEARLGIKPHIQRLLDQGILVPCQSPWNTPLLPVKKPGTNDYRPVQDLREVNKRVEDIHPTVPNPYNLLSGLPPSHQWYTVLDLKDAFFCLRLHPTSQPLFAFEWRDPEMGISGQLTWTRLPQGFKNSPTLFNEALHRDLADFRIQHPDLILLQYVDDLLLAATSELDCQQGTRALLQTLGNLGYRASAKKAQICQKQVKYLGYLLKEGQRWLTEARKETVMGQPTPKTPRQLREFLGKAGFCRLFIPGFAEMAAPLYPLTKPGTLFNWGPDQQKAYQEIKQALLTAPALGLPDLTKPFELFVDEKQGYAKGVLTQKLGPWRRPVAYLSKKLDPVAAGWPPCLRMVAAIAVLTKDAGKLTMGQPLVILAPHAVEALVKQPPDRWLSNARMTHYQALLLDTDRVQFGPVVALNPATLLPLPEEGLQHNCLDILAEAHGTRPDLTDQPLPDADHTWYTDGSSLLQEGQRKAGAAVTTETEVIWAKALPAGTSAQRAELIALTQALKMAEGKKLNVYTDSRYAFATAHIHGEIYRRRGWLTSEGKEIKNKDEILALLKALFLPKRLSIIHCPGHQKGHSAEARGNRMADQAARKAAITETPDTSTLLAGKRTADGSEFEKRTADGSEFESPKKKAKVE

SEQ ID NO: 2846 - protein, 2094 aa, synthetic construct
MPAAKRVKLDGGDKKYSIGLDIGTNSVGWAVITDEYKVPSKKFKVLGNTDRHSIKKNLIGALLFDSGETAEATRLKRTARRRYTRRKNRICYLQEIFSNEMAKVDDSFFHRLEESFLVEEDKKHERHPIFGNIVDEVAYHEKYPTIYHLRKKLVDSTDKADLRLIYLALAHMIKFRGHFLIEGDLNPDNSDVDKLFIQLVQTYNQLFEENPINASGVDAKAILSARLSKSRRLENLIAQLPGEKKNGLFGNLIALSLGLTPNFKSNFDLAEDAKLQLSKDTYDDDLDNLLAQIGDQYADLFLAAKNLSDAILLSDILRVNTEITKAPLSASMIKRYDEHHQDLTLLKALVRQQLPEKYKEIFFDQSKNGYAGYIDGGASQEEFYKFIKPILEKMDGTEELLVKLNREDLLRKQRTFDNGSIPHQIHLGELHAILRRQEDFYPFLKDNREKIEKILTFRIPYYVGPLARGNSRFAWMTRKSEETITPWNFEEVVDKGASAQSFIERMTNFDKNLPNEKVLPKHSLLYEYFTVYNELTKVKYVTEGMRKPAFLSGEQKKAIVDLLFKTNRKVTVKQLKEDYFKKIECFDSVEISGVEDRFNASLGTYHDLLKIIKDKDFLDNEENEDILEDIVLTLTLFEDREMIEERLKTYAHLFDDKVMKQLKRRRYTGWGRLSRKLINGIRDKQSGKTILDFLKSDGFANRNFMQLIHDDSLTFKEDIQKAQVSGQGDSLHEHIANLAGSPAIKKGILQTVKVVDELVKVMGRHKPENIVIEMARENQTTQKGQKNSRERMKRIEEGIKELGSQILKEHPVENTQLQNEKLYLYYLQNGRDMYVDQELDINRLSDYDVDHIVPQSFLKDDSIDNKVLTRSDKARGKSDNVPSEEVVKKMKNYWRQLLNAKLITQRKFDNLTKAERGGLSELDKAGFIKRQLVETRQITKHVAQILDSRMNTKYDENDKLIREVKVITLKSKLVSDFRKDFQFYKVREINNYHHAHDAYLNAVVGTALIKKYPKLESEFVYGDYKVYDVRKMIAKSEQEIGKATAKYFFYSNIMNFFKTEITLANGEIRKRPLIETNGETGEIVWDKGRDFATVRKVLSMPQVNIVKKTEVQTGGFSKESILPKRNSDKLIARKKDWDPKKYGGFDSPTVAYSVLVVAKVEKGKSKKLKSVKELLGITIMERSSFEKNPIDFLEAKGYKEVKKDLIIKLPKYSLFELENGRKRMLASAGELQKGNELALPSKYVNFLYLASHYEKLKGSPEDNEQKQLFVEQHKHYLDEIIEQISEFSKRVILADANLDKVLSAYNKHRDKPIREQAENIIHLFTLTNLGAPAAFKYFDTTIDRKRYTSTKEVLDATLIHQSITGLYETRIDLSQLGGDGGGGGGGSGSSGGTLNIEDEHRLHETSKEPDVSLGSTWLSDFPQAWAETGGMGLAVRQAPLIIPLKATSTPVSIKQYPMSQEARLGIKPHIQRLLDQGILVPCQSPWNTPLLPVKKPGTNDYRPVQDLREVNKRVEDIHPTVPNPYNLLSGLPPSHQWYTVLDLKDAFFCLRLHPTSQPLFAFEWRDPEMGISGQLTWTRLPQGFKNSPTLFNEALHRDLADFRIQHPDLILLQYVDDLLLAATSELDCQQGTRALLQTLGNLGYRASAKKAQICQKQVKYLGYLLKEGQRWLTEARKETVMGQPTPKTPRQLREFLGKAGFCRLFIPGFAEMAAPLYPLTKPGTLFNWGPDQQKAYQEIKQALLTAPALGLPDLTKPFELFVDEKQGYAKGVLTQKLGPWRRPVAYLSKKLDPVAAGWPPCLRMVAAIAVLTKDAGKLTMGQPLVILAPHAVEALVKQPPDRWLSNARMTHYQALLLDTDRVQFGPVVALNPATLLPLPEEGLQHNCLDILAEAHGTRPDLTDQPLPDADHTWYTDGSSLLQEGQRKAGAAVTTETEVIWAKALPAGTSAQRAELIALTQALKMAEGKKLNVYTDSRYAFATAHIHGEIYRRRGWLTSEGKEIKNKDEILALLKALFLPKRLSIIHCPGHQKGHSAEARGNRMADQAARKAAITETPDTSTLLAGKRTADGSEFEKRTADGSEFESPKKKAKVE

SEQ ID NO: 2847 - skipped

SEQ ID NO: 2848 - protein, 2094 aa, synthetic construct
MPAAKRVKLDGGDKKYSIGLDIGTNSVGWAVITDEYKVPSKKFKVLGNTDRHSIKKNLIGALLFDSGETAEATRLKRTARRRYTRRKNRICYLQEIFSNEMAKVDDSFFHRLEESFLVEEDKKHERHPIFGNIVDEVAYHEKYPTIYHLRKKLVDSTDKADLRLIYLALAHMIKFRGHFLIEGDLNPDNSDVDKLFIQLVQTYNQLFEENPINASGVDAKAILSARLSKSRRLENLIAQLPGEKKNGLFGNLIALSLGLTPNFKSNFDLAEDAKLQLSKDTYDDDLDNLLAQIGDQYADLFLAAKNLSDAILLSDILRVNTEITKAPLSASMIKRYDEHHQDLTLLKALVRQQLPEKYKEIFFDQSKNGYAGYIDGGASQEEFYKFIKPILEKMDGTEELLVKLNREDLLRKQRTFDNGSIPHQIHLGELHAILRRQEDFYPFLKDNREKIEKILTFRIPYYVGPLARGNSRFAWMTRKSEETITPWNFEEVVDKGASAQSFIERMTNFDKNLPNEKVLPKHSLLYEYFTVYNELTKVKYVTEGMRKPAFLSGEQKKAIVDLLFKTNRKVTVKQLKEDYFKKIECFDSVEISGVEDRFNASLGTYHDLLKIIKDKDFLDNEENEDILEDIVLTLTLFEDREMIEERLKTYAHLFDDKVMKQLKRRRYTGWGRLSRKLINGIRDKQSGKTILDFLKSDGFANRNFMQLIHDDSLTFKEDIQKAQVSGQGDSLHEHIANLAGSPAIKKGILQTVKVVDELVKVMGRHKPENIVIEMARENQTTQKGQKNSRERMKRIEEGIKELGSQILKEHPVENTQLQNEKLYLYYLQNGRDMYVDQELDINRLSDYDVDHIVPQSFLKDDSIDNKVLTRSDKARGKSDNVPSEEVVKKMKNYWRQLLNAKLITQRKFDNLTKAERGGLSELDKAGFIKRQLVETRQITKHVAQILDSRMNTKYDENDKLIREVKVITLKSKLVSDFRKDFQFYKVREINNYHHAHDAYLNAVVGTALIKKYPKLESEFVYGDYKVYDVRKMIAKSEQEIGKATAKYFFYSNIMNFFKTEITLANGEIRKRPLIETNGETGEIVWDKGRDFATVRKVLSMPQVNIVKKTEVQTGGFSKESILPKRNSDKLIARKKDWDPKKYGGFDSPTVAYSVLVVAKVEKGKSKKLKSVKELLGITIMERSSFEKNPIDFLEAKGYKEVKKDLIIKLPKYSLFELENGRKRMLASAGELQKGNELALPSKYVNFLYLASHYEKLKGSPEDNEQKQLFVEQHKHYLDEIIEQISEFSKRVILADANLDKVLSAYNKHRDKPIREQAENIIHLFTLTNLGAPAAFKYFDTTIDRKRYTSTKEVLDATLIHQSITGLYETRIDLSQLGGDGGGGGGSSPAPGGTLNIEDEHRLHETSKEPDVSLGSTWLSDFPQAWAETGGMGLAVRQAPLIIPLKATSTPVSIKQYPMSQEARLGIKPHIQRLLDQGILVPCQSPWNTPLLPVKKPGTNDYRPVQDLREVNKRVEDIHPTVPNPYNLLSGLPPSHQWYTVLDLKDAFFCLRLHPTSQPLFAFEWRDPEMGISGQLTWTRLPQGFKNSPTLFNEALHRDLADFRIQHPDLILLQYVDDLLLAATSELDCQQGTRALLQTLGNLGYRASAKKAQICQKQVKYLGYLLKEGQRWLTEARKETVMGQPTPKTPRQLREFLGKAGFCRLFIPGFAEMAAPLYPLTKPGTLFNWGPDQQKAYQEIKQALLTAPALGLPDLTKPFELFVDEKQGYAKGVLTQKLGPWRRPVAYLSKKLDPVAAGWPPCLRMVAAIAVLTKDAGKLTMGQPLVILAPHAVEALVKQPPDRWLSNARMTHYQALLLDTDRVQFGPVVALNPATLLPLPEEGLQHNCLDILAEAHGTRPDLTDQPLPDADHTWYTDGSSLLQEGQRKAGAAVTTETEVIWAKALPAGTSAQRAELIALTQALKMAEGKKLNVYTDSRYAFATAHIHGEIYRRRGWLTSEGKEIKNKDEILALLKALFLPKRLSIIHCPGHQKGHSAEARGNRMADQAARKAAITETPDTSTLLAGKRTADGSEFEKRTADGSEFESPKKKAKVE

SEQ ID NO: 2849 - protein, 2093 aa, synthetic construct
MPAAKRVKLDGGDKKYSIGLDIGTNSVGWAVITDEYKVPSKKFKVLGNTDRHSIKKNLIGALLFDSGETAEATRLKRTARRRYTRRKNRICYLQEIFSNEMAKVDDSFFHRLEESFLVEEDKKHERHPIFGNIVDEVAYHEKYPTIYHLRKKLVDSTDKADLRLIYLALAHMIKFRGHFLIEGDLNPDNSDVDKLFIQLVQTYNQLFEENPINASGVDAKAILSARLSKSRRLENLIAQLPGEKKNGLFGNLIALSLGLTPNFKSNFDLAEDAKLQLSKDTYDDDLDNLLAQIGDQYADLFLAAKNLSDAILLSDILRVNTEITKAPLSASMIKRYDEHHQDLTLLKALVRQQLPEKYKEIFFDQSKNGYAGYIDGGASQEEFYKFIKPILEKMDGTEELLVKLNREDLLRKQRTFDNGSIPHQIHLGELHAILRRQEDFYPFLKDNREKIEKILTFRIPYYVGPLARGNSRFAWMTRKSEETITPWNFEEVVDKGASAQSFIERMTNFDKNLPNEKVLPKHSLLYEYFTVYNELTKVKYVTEGMRKPAFLSGEQKKAIVDLLFKTNRKVTVKQLKEDYFKKIECFDSVEISGVEDRFNASLGTYHDLLKIIKDKDFLDNEENEDILEDIVLTLTLFEDREMIEERLKTYAHLFDDKVMKQLKRRRYTGWGRLSRKLINGIRDKQSGKTILDFLKSDGFANRNFMQLIHDDSLTFKEDIQKAQVSGQGDSLHEHIANLAGSPAIKKGILQTVKVVDELVKVMGRHKPENIVIEMARENQTTQKGQKNSRERMKRIEEGIKELGSQILKEHPVENTQLQNEKLYLYYLQNGRDMYVDQELDINRLSDYDVDHIVPQSFLKDDSIDNKVLTRSDKARGKSDNVPSEEVVKKMKNYWRQLLNAKLITQRKFDNLTKAERGGLSELDKAGFIKRQLVETRQITKHVAQILDSRMNTKYDENDKLIREVKVITLKSKLVSDFRKDFQFYKVREINNYHHAHDAYLNAVVGTALIKKYPKLESEFVYGDYKVYDVRKMIAKSEQEIGKATAKYFFYSNIMNFFKTEITLANGEIRKRPLIETNGETGEIVWDKGRDFATVRKVLSMPQVNIVKKTEVQTGGFSKESILPKRNSDKLIARKKDWDPKKYGGFDSPTVAYSVLVVAKVEKGKSKKLKSVKELLGITIMERSSFEKNPIDFLEAKGYKEVKKDLIIKLPKYSLFELENGRKRMLASAGELQKGNELALPSKYVNFLYLASHYEKLKGSPEDNEQKQLFVEQHKHYLDEIIEQISEFSKRVILADANLDKVLSAYNKHRDKPIREQAENIIHLFTLTNLGAPAAFKYFDTTIDRKRYTSTKEVLDATLIHQSITGLYETRIDLSQLGGDGGGGSEAAAKGGTLNIEDEHRLHETSKEPDVSLGSTWLSDFPQAWAETGGMGLAVRQAPLIIPLKATSTPVSIKQYPMSQEARLGIKPHIQRLLDQGILVPCQSPWNTPLLPVKKPGTNDYRPVQDLREVNKRVEDIHPTVPNPYNLLSGLPPSHQWYTVLDLKDAFFCLRLHPTSQPLFAFEWRDPEMGISGQLTWTRLPQGFKNSPTLFNEALHRDLADFRIQHPDLILLQYVDDLLLAATSELDCQQGTRALLQTLGNLGYRASAKKAQICQKQVKYLGYLLKEGQRWLTEARKETVMGQPTPKTPRQLREFLGKAGFCRLFIPGFAEMAAPLYPLTKPGTLFNWGPDQQKAYQEIKQALLTAPALGLPDLTKPFELFVDEKQGYAKGVLTQKLGPWRRPVAYLSKKLDPVAAGWPPCLRMVAAIAVLTKDAGKLTMGQPLVILAPHAVEALVKQPPDRWLSNARMTHYQALLLDTDRVQFGPVVALNPATLLPLPEEGLQHNCLDILAEAHGTRPDLTDQPLPDADHTWYTDGSSLLQEGQRKAGAAVTTETEVIWAKALPAGTSAQRAELIALTQALKMAEGKKLNVYTDSRYAFATAHIHGEIYRRRGWLTSEGKEIKNKDEILALLKALFLPKRLSIIHCPGHQKGHSAEARGNRMADQAARKAAITETPDTSTLLAGKRTADGSEFEKRTADGSEFESPKKKAKVE

SEQ ID NO: 2850 - protein, 2093 aa, synthetic construct
MPAAKRVKLDGGDKKYSIGLDIGTNSVGWAVITDEYKVPSKKFKVLGNTDRHSIKKNLIGALLFDSGETAEATRLKRTARRRYTRRKNRICYLQEIFSNEMAKVDDSFFHRLEESFLVEEDKKHERHPIFGNIVDEVAYHEKYPTIYHLRKKLVDSTDKADLRLIYLALAHMIKFRGHFLIEGDLNPDNSDVDKLFIQLVQTYNQLFEENPINASGVDAKAILSARLSKSRRLENLIAQLPGEKKNGLFGNLIALSLGLTPNFKSNFDLAEDAKLQLSKDTYDDDLDNLLAQIGDQYADLFLAAKNLSDAILLSDILRVNTEITKAPLSASMIKRYDEHHQDLTLLKALVRQQLPEKYKEIFFDQSKNGYAGYIDGGASQEEFYKFIKPILEKMDGTEELLVKLNREDLLRKQRTFDNGSIPHQIHLGELHAILRRQEDFYPFLKDNREKIEKILTFRIPYYVGPLARGNSRFAWMTRKSEETITPWNFEEVVDKGASAQSFIERMTNFDKNLPNEKVLPKHSLLYEYFTVYNELTKVKYVTEGMRKPAFLSGEQKKAIVDLLFKTNRKVTVKQLKEDYFKKIECFDSVEISGVEDRFNASLGTYHDLLKIIKDKDFLDNEENEDILEDIVLTLTLFEDREMIEERLKTYAHLFDDKVMKQLKRRRYTGWGRLSRKLINGIRDKQSGKTILDFLKSDGFANRNFMQLIHDDSLTFKEDIQKAQVSGQGDSLHEHIANLAGSPAIKKGILQTVKVVDELVKVMGRHKPENIVIEMARENQTTQKGQKNSRERMKRIEEGIKELGSQILKEHPVENTQLQNEKLYLYYLQNGRDMYVDQELDINRLSDYDVDHIVPQSFLKDDSIDNKVLTRSDKARGKSDNVPSEEVVKKMKNYWRQLLNAKLITQRKFDNLTKAERGGLSELDKAGFIKRQLVETRQITKHVAQILDSRMNTKYDENDKLIREVKVITLKSKLVSDFRKDFQFYKVREINNYHHAHDAYLNAVVGTALIKKYPKLESEFVYGDYKVYDVRKMIAKSEQEIGKATAKYFFYSNIMNFFKTEITLANGEIRKRPLIETNGETGEIVWDKGRDFATVRKVLSMPQVNIVKKTEVQTGGFSKESILPKRNSDKLIARKKDWDPKKYGGFDSPTVAYSVLVVAKVEKGKSKKLKSVKELLGITIMERSSFEKNPIDFLEAKGYKEVKKDLIIKLPKYSLFELENGRKRMLASAGELQKGNELALPSKYVNFLYLASHYEKLKGSPEDNEQKQLFVEQHKHYLDEIIEQISEFSKRVILADANLDKVLSAYNKHRDKPIREQAENIIHLFTLTNLGAPAAFKYFDTTIDRKRYTSTKEVLDATLIHQSITGLYETRIDLSQLGGDGGEAAAKPAPGGTLNIEDEHRLHETSKEPDVSLGSTWLSDFPQAWAETGGMGLAVRQAPLIIPLKATSTPVSIKQYPMSQEARLGIKPHIQRLLDQGILVPCQSPWNTPLLPVKKPGTNDYRPVQDLREVNKRVEDIHPTVPNPYNLLSGLPPSHQWYTVLDLKDAFFCLRLHPTSQPLFAFEWRDPEMGISGQLTWTRLPQGFKNSPTLFNEALHRDLADFRIQHPDLILLQYVDDLLLAATSELDCQQGTRALLQTLGNLGYRASAKKAQICQKQVKYLGYLLKEGQRWLTEARKETVMGQPTPKTPRQLREFLGKAGFCRLFIPGFAEMAAPLYPLTKPGTLFNWGPDQQKAYQEIKQALLTAPALGLPDLTKPFELFVDEKQGYAKGVLTQKLGPWRRPVAYLSKKLDPVAAGWPPCLRMVAAIAVLTKDAGKLTMGQPLVILAPHAVEALVKQPPDRWLSNARMTHYQALLLDTDRVQFGPVVALNPATLLPLPEEGLQHNCLDILAEAHGTRPDLTDQPLPDADHTWYTDGSSLLQEGQRKAGAAVTTETEVIWAKALPAGTSAQRAELIALTQALKMAEGKKLNVYTDSRYAFATAHIHGEIYRRRGWLTSEGKEIKNKDEILALLKALFLPKRLSIIHCPGHQKGHSAEARGNRMADQAARKAAITETPDTSTLLAGKRTADGSEFEKRTADGSEFESPKKKAKVE

SEQ ID NO: 2851 - protein, 2096 aa, synthetic construct
MPAAKRVKLDGGDKKYSIGLDIGTNSVGWAVITDEYKVPSKKFKVLGNTDRHSIKKNLIGALLFDSGETAEATRLKRTARRRYTRRKNRICYLQEIFSNEMAKVDDSFFHRLEESFLVEEDKKHERHPIFGNIVDEVAYHEKYPTIYHLRKKLVDSTDKADLRLIYLALAHMIKFRGHFLIEGDLNPDNSDVDKLFIQLVQTYNQLFEENPINASGVDAKAILSARLSKSRRLENLIAQLPGEKKNGLFGNLIALSLGLTPNFKSNFDLAEDAKLQLSKDTYDDDLDNLLAQIGDQYADLFLAAKNLSDAILLSDILRVNTEITKAPLSASMIKRYDEHHQDLTLLKALVRQQLPEKYKEIFFDQSKNGYAGYIDGGASQEEFYKFIKPILEKMDGTEELLVKLNREDLLRKQRTFDNGSIPHQIHLGELHAILRRQEDFYPFLKDNREKIEKILTFRIPYYVGPLARGNSRFAWMTRKSEETITPWNFEEVVDKGASAQSFIERMTNFDKNLPNEKVLPKHSLLYEYFTVYNELTKVKYVTEGMRKPAFLSGEQKKAIVDLLFKTNRKVTVKQLKEDYFKKIECFDSVEISGVEDRFNASLGTYHDLLKIIKDKDFLDNEENEDILEDIVLTLTLFEDREMIEERLKTYAHLFDDKVMKQLKRRRYTGWGRLSRKLINGIRDKQSGKTILDFLKSDGFANRNFMQLIHDDSLTFKEDIQKAQVSGQGDSLHEHIANLAGSPAIKKGILQTVKVVDELVKVMGRHKPENIVIEMARENQTTQKGQKNSRERMKRIEEGIKELGSQILKEHPVENTQLQNEKLYLYYLQNGRDMYVDQELDINRLSDYDVDHIVPQSFLKDDSIDNKVLTRSDKARGKSDNVPSEEVVKKMKNYWRQLLNAKLITQRKFDNLTKAERGGLSELDKAGFIKRQLVETRQITKHVAQILDSRMNTKYDENDKLIREVKVITLKSKLVSDFRKDFQFYKVREINNYHHAHDAYLNAVVGTALIKKYPKLESEFVYGDYKVYDVRKMIAKSEQEIGKATAKYFFYSNIMNFFKTEITLANGEIRKRPLIETNGETGEIVWDKGRDFATVRKVLSMPQVNIVKKTEVQTGGFSKESILPKRNSDKLIARKKDWDPKKYGGFDSPTVAYSVLVVAKVEKGKSKKLKSVKELLGITIMERSSFEKNPIDFLEAKGYKEVKKDLIIKLPKYSLFELENGRKRMLASAGELQKGNELALPSKYVNFLYLASHYEKLKGSPEDNEQKQLFVEQHKHYLDEIIEQISEFSKRVILADANLDKVLSAYNKHRDKPIREQAENIIHLFTLTNLGAPAAFKYFDTTIDRKRYTSTKEVLDATLIHQSITGLYETRIDLSQLGGDGGPAPAPAPAPAPGGTLNIEDEHRLHETSKEPDVSLGSTWLSDFPQAWAETGGMGLAVRQAPLIIPLKATSTPVSIKQYPMSQEARLGIKPHIQRLLDQGILVPCQSPWNTPLLPVKKPGTNDYRPVQDLREVNKRVEDIHPTVPNPYNLLSGLPPSHQWYTVLDLKDAFFCLRLHPTSQPLFAFEWRDPEMGISGQLTWTRLPQGFKNSPTLFNEALHRDLADFRIQHPDLILLQYVDDLLLAATSELDCQQGTRALLQTLGNLGYRASAKKAQICQKQVKYLGYLLKEGQRWLTEARKETVMGQPTPKTPRQLREFLGKAGFCRLFIPGFAEMAAPLYPLTKPGTLFNWGPDQQKAYQEIKQALLTAPALGLPDLTKPFELFVDEKQGYAKGVLTQKLGPWRRPVAYLSKKLDPVAAGWPPCLRMVAAIAVLTKDAGKLTMGQPLVILAPHAVEALVKQPPDRWLSNARMTHYQALLLDTDRVQFGPVVALNPATLLPLPEEGLQHNCLDILAEAHGTRPDLTDQPLPDADHTWYTDGSSLLQEGQRKAGAAVTTETEVIWAKALPAGTSAQRAELIALTQALKMAEGKKLNVYTDSRYAFATAHIHGEIYRRRGWLTSEGKEIKNKDEILALLKALFLPKRLSIIHCPGHQKGHSAEARGNRMADQAARKAAITETPDTSTLLAGKRTADGSEFEKRTADGSEFESPKKKAKVE

SEQ ID NO: 2852 - protein, 2094 aa, synthetic construct
MPAAKRVKLDGGDKKYSIGLDIGTNSVGWAVITDEYKVPSKKFKVLGNTDRHSIKKNLIGALLFDSGETAEATRLKRTARRRYTRRKNRICYLQEIFSNEMAKVDDSFFHRLEESFLVEEDKKHERHPIFGNIVDEVAYHEKYPTIYHLRKKLVDSTDKADLRLIYLALAHMIKFRGHFLIEGDLNPDNSDVDKLFIQLVQTYNQLFEENPINASGVDAKAILSARLSKSRRLENLIAQLPGEKKNGLFGNLIALSLGLTPNFKSNFDLAEDAKLQLSKDTYDDDLDNLLAQIGDQYADLFLAAKNLSDAILLSDILRVNTEITKAPLSASMIKRYDEHHQDLTLLKALVRQQLPEKYKEIFFDQSKNGYAGYIDGGASQEEFYKFIKPILEKMDGTEELLVKLNREDLLRKQRTFDNGSIPHQIHLGELHAILRRQEDFYPFLKDNREKIEKILTFRIPYYVGPLARGNSRFAWMTRKSEETITPWNFEEVVDKGASAQSFIERMTNFDKNLPNEKVLPKHSLLYEYFTVYNELTKVKYVTEGMRKPAFLSGEQKKAIVDLLFKTNRKVTVKQLKEDYFKKIECFDSVEISGVEDRFNASLGTYHDLLKIIKDKDFLDNEENEDILEDIVLTLTLFEDREMIEERLKTYAHLFDDKVMKQLKRRRYTGWGRLSRKLINGIRDKQSGKTILDFLKSDGFANRNFMQLIHDDSLTFKEDIQKAQVSGQGDSLHEHIANLAGSPAIKKGILQTVKVVDELVKVMGRHKPENIVIEMARENQTTQKGQKNSRERMKRIEEGIKELGSQILKEHPVENTQLQNEKLYLYYLQNGRDMYVDQELDINRLSDYDVDHIVPQSFLKDDSIDNKVLTRSDKARGKSDNVPSEEVVKKMKNYWRQLLNAKLITQRKFDNLTKAERGGLSELDKAGFIKRQLVETRQITKHVAQILDSRMNTKYDENDKLIREVKVITLKSKLVSDFRKDFQFYKVREINNYHHAHDAYLNAVVGTALIKKYPKLESEFVYGDYKVYDVRKMIAKSEQEIGKATAKYFFYSNIMNFFKTEITLANGEIRKRPLIETNGETGEIVWDKGRDFATVRKVLSMPQVNIVKKTEVQTGGFSKESILPKRNSDKLIARKKDWDPKKYGGFDSPTVAYSVLVVAKVEKGKSKKLKSVKELLGITIMERSSFEKNPIDFLEAKGYKEVKKDLIIKLPKYSLFELENGRKRMLASAGELQKGNELALPSKYVNFLYLASHYEKLKGSPEDNEQKQLFVEQHKHYLDEIIEQISEFSKRVILADANLDKVLSAYNKHRDKPIREQAENIIHLFTLTNLGAPAAFKYFDTTIDRKRYTSTKEVLDATLIHQSITGLYETRIDLSQLGGDGGGGSPAPGSSGGTLNIEDEHRLHETSKEPDVSLGSTWLSDFPQAWAETGGMGLAVRQAPLIIPLKATSTPVSIKQYPMSQEARLGIKPHIQRLLDQGILVPCQSPWNTPLLPVKKPGTNDYRPVQDLREVNKRVEDIHPTVPNPYNLLSGLPPSHQWYTVLDLKDAFFCLRLHPTSQPLFAFEWRDPEMGISGQLTWTRLPQGFKNSPTLFNEALHRDLADFRIQHPDLILLQYVDDLLLAATSELDCQQGTRALLQTLGNLGYRASAKKAQICQKQVKYLGYLLKEGQRWLTEARKETVMGQPTPKTPRQLREFLGKAGFCRLFIPGFAEMAAPLYPLTKPGTLFNWGPDQQKAYQEIKQALLTAPALGLPDLTKPFELFVDEKQGYAKGVLTQKLGPWRRPVAYLSKKLDPVAAGWPPCLRMVAAIAVLTKDAGKLTMGQPLVILAPHAVEALVKQPPDRWLSNARMTHYQALLLDTDRVQFGPVVALNPATLLPLPEEGLQHNCLDILAEAHGTRPDLTDQPLPDADHTWYTDGSSLLQEGQRKAGAAVTTETEVIWAKALPAGTSAQRAELIALTQALKMAEGKKLNVYTDSRYAFATAHIHGEIYRRRGWLTSEGKEIKNKDEILALLKALFLPKRLSIIHCPGHQKGHSAEARGNRMADQAARKAAITETPDTSTLLAGKRTADGSEFEKRTADGSEFESPKKKAKVE

SEQ ID NO: 2853-2854 - skipped (2 entries)

SEQ ID NO: 2855 - protein, 2091 aa, synthetic construct
MPAAKRVKLDGGDKKYSIGLDIGTNSVGWAVITDEYKVPSKKFKVLGNTDRHSIKKNLIGALLFDSGETAEATRLKRTARRRYTRRKNRICYLQEIFSNEMAKVDDSFFHRLEESFLVEEDKKHERHPIFGNIVDEVAYHEKYPTIYHLRKKLVDSTDKADLRLIYLALAHMIKFRGHFLIEGDLNPDNSDVDKLFIQLVQTYNQLFEENPINASGVDAKAILSARLSKSRRLENLIAQLPGEKKNGLFGNLIALSLGLTPNFKSNFDLAEDAKLQLSKDTYDDDLDNLLAQIGDQYADLFLAAKNLSDAILLSDILRVNTEITKAPLSASMIKRYDEHHQDLTLLKALVRQQLPEKYKEIFFDQSKNGYAGYIDGGASQEEFYKFIKPILEKMDGTEELLVKLNREDLLRKQRTFDNGSIPHQIHLGELHAILRRQEDFYPFLKDNREKIEKILTFRIPYYVGPLARGNSRFAWMTRKSEETITPWNFEEVVDKGASAQSFIERMTNFDKNLPNEKVLPKHSLLYEYFTVYNELTKVKYVTEGMRKPAFLSGEQKKAIVDLLFKTNRKVTVKQLKEDYFKKIECFDSVEISGVEDRFNASLGTYHDLLKIIKDKDFLDNEENEDILEDIVLTLTLFEDREMIEERLKTYAHLFDDKVMKQLKRRRYTGWGRLSRKLINGIRDKQSGKTILDFLKSDGFANRNFMQLIHDDSLTFKEDIQKAQVSGQGDSLHEHIANLAGSPAIKKGILQTVKVVDELVKVMGRHKPENIVIEMARENQTTQKGQKNSRERMKRIEEGIKELGSQILKEHPVENTQLQNEKLYLYYLQNGRDMYVDQELDINRLSDYDVDHIVPQSFLKDDSIDNKVLTRSDKARGKSDNVPSEEVVKKMKNYWRQLLNAKLITQRKFDNLTKAERGGLSELDKAGFIKRQLVETRQITKHVAQILDSRMNTKYDENDKLIREVKVITLKSKLVSDFRKDFQFYKVREINNYHHAHDAYLNAVVGTALIKKYPKLESEFVYGDYKVYDVRKMIAKSEQEIGKATAKYFFYSNIMNFFKTEITLANGEIRKRPLIETNGETGEIVWDKGRDFATVRKVLSMPQVNIVKKTEVQTGGFSKESILPKRNSDKLIARKKDWDPKKYGGFDSPTVAYSVLVVAKVEKGKSKKLKSVKELLGITIMERSSFEKNPIDFLEAKGYKEVKKDLIIKLPKYSLFELENGRKRMLASAGELQKGNELALPSKYVNFLYLASHYEKLKGSPEDNEQKQLFVEQHKHYLDEIIEQISEFSKRVILADANLDKVLSAYNKHRDKPIREQAENIIHLFTLTNLGAPAAFKYFDTTIDRKRYTSTKEVLDATLIHQSITGLYETRIDLSQLGGDGGGSSGGSGGTLNIEDEHRLHETSKEPDVSLGSTWLSDFPQAWAETGGMGLAVRQAPLIIPLKATSTPVSIKQYPMSQEARLGIKPHIQRLLDQGILVPCQSPWNTPLLPVKKPGTNDYRPVQDLREVNKRVEDIHPTVPNPYNLLSGLPPSHQWYTVLDLKDAFFCLRLHPTSQPLFAFEWRDPEMGISGQLTWTRLPQGFKNSPTLFNEALHRDLADFRIQHPDLILLQYVDDLLLAATSELDCQQGTRALLQTLGNLGYRASAKKAQICQKQVKYLGYLLKEGQRWLTEARKETVMGQPTPKTPRQLREFLGKAGFCRLFIPGFAEMAAPLYPLTKPGTLFNWGPDQQKAYQEIKQALLTAPALGLPDLTKPFELFVDEKQGYAKGVLTQKLGPWRRPVAYLSKKLDPVAAGWPPCLRMVAAIAVLTKDAGKLTMGQPLVILAPHAVEALVKQPPDRWLSNARMTHYQALLLDTDRVQFGPVVALNPATLLPLPEEGLQHNCLDILAEAHGTRPDLTDQPLPDADHTWYTDGSSLLQEGQRKAGAAVTTETEVIWAKALPAGTSAQRAELIALTQALKMAEGKKLNVYTDSRYAFATAHIHGEIYRRRGWLTSEGKEIKNKDEILALLKALFLPKRLSIIHCPGHQKGHSAEARGNRMADQAARKAAITETPDTSTLLAGKRTADGSEFEKRTADGSEFESPKKKAKVE

SEQ ID NO: 2856 - skipped

SEQ ID NO: 2857 - protein, 2096 aa, synthetic construct
MPAAKRVKLDGGDKKYSIGLDIGTNSVGWAVITDEYKVPSKKFKVLGNTDRHSIKKNLIGALLFDSGETAEATRLKRTARRRYTRRKNRICYLQEIFSNEMAKVDDSFFHRLEESFLVEEDKKHERHPIFGNIVDEVAYHEKYPTIYHLRKKLVDSTDKADLRLIYLALAHMIKFRGHFLIEGDLNPDNSDVDKLFIQLVQTYNQLFEENPINASGVDAKAILSARLSKSRRLENLIAQLPGEKKNGLFGNLIALSLGLTPNFKSNFDLAEDAKLQLSKDTYDDDLDNLLAQIGDQYADLFLAAKNLSDAILLSDILRVNTEITKAPLSASMIKRYDEHHQDLTLLKALVRQQLPEKYKEIFFDQSKNGYAGYIDGGASQEEFYKFIKPILEKMDGTEELLVKLNREDLLRKQRTFDNGSIPHQIHLGELHAILRRQEDFYPFLKDNREKIEKILTFRIPYYVGPLARGNSRFAWMTRKSEETITPWNFEEVVDKGASAQSFIERMTNFDKNLPNEKVLPKHSLLYEYFTVYNELTKVKYVTEGMRKPAFLSGEQKKAIVDLLFKTNRKVTVKQLKEDYFKKIECFDSVEISGVEDRFNASLGTYHDLLKIIKDKDFLDNEENEDILEDIVLTLTLFEDREMIEERLKTYAHLFDDKVMKQLKRRRYTGWGRLSRKLINGIRDKQSGKTILDFLKSDGFANRNFMQLIHDDSLTFKEDIQKAQVSGQGDSLHEHIANLAGSPAIKKGILQTVKVVDELVKVMGRHKPENIVIEMARENQTTQKGQKNSRERMKRIEEGIKELGSQILKEHPVENTQLQNEKLYLYYLQNGRDMYVDQELDINRLSDYDVDHIVPQSFLKDDSIDNKVLTRSDKARGKSDNVPSEEVVKKMKNYWRQLLNAKLITQRKFDNLTKAERGGLSELDKAGFIKRQLVETRQITKHVAQILDSRMNTKYDENDKLIREVKVITLKSKLVSDFRKDFQFYKVREINNYHHAHDAYLNAVVGTALIKKYPKLESEFVYGDYKVYDVRKMIAKSEQEIGKATAKYFFYSNIMNFFKTEITLANGEIRKRPLIETNGETGEIVWDKGRDFATVRKVLSMPQVNIVKKTEVQTGGFSKESILPKRNSDKLIARKKDWDPKKYGGFDSPTVAYSVLVVAKVEKGKSKKLKSVKELLGITIMERSSFEKNPIDFLEAKGYKEVKKDLIIKLPKYSLFELENGRKRMLASAGELQKGNELALPSKYVNFLYLASHYEKLKGSPEDNEQKQLFVEQHKHYLDEIIEQISEFSKRVILADANLDKVLSAYNKHRDKPIREQAENIIHLFTLTNLGAPAAFKYFDTTIDRKRYTSTKEVLDATLIHQSITGLYETRIDLSQLGGDGGGGSEAAAKPAPGGTLNIEDEHRLHETSKEPDVSLGSTWLSDFPQAWAETGGMGLAVRQAPLIIPLKATSTPVSIKQYPMSQEARLGIKPHIQRLLDQGILVPCQSPWNTPLLPVKKPGTNDYRPVQDLREVNKRVEDIHPTVPNPYNLLSGLPPSHQWYTVLDLKDAFFCLRLHPTSQPLFAFEWRDPEMGISGQLTWTRLPQGFKNSPTLFNEALHRDLADFRIQHPDLILLQYVDDLLLAATSELDCQQGTRALLQTLGNLGYRASAKKAQICQKQVKYLGYLLKEGQRWLTEARKETVMGQPTPKTPRQLREFLGKAGFCRLFIPGFAEMAAPLYPLTKPGTLFNWGPDQQKAYQEIKQALLTAPALGLPDLTKPFELFVDEKQGYAKGVLTQKLGPWRRPVAYLSKKLDPVAAGWPPCLRMVAAIAVLTKDAGKLTMGQPLVILAPHAVEALVKQPPDRWLSNARMTHYQALLLDTDRVQFGPVVALNPATLLPLPEEGLQHNCLDILAEAHGTRPDLTDQPLPDADHTWYTDGSSLLQEGQRKAGAAVTTETEVIWAKALPAGTSAQRAELIALTQALKMAEGKKLNVYTDSRYAFATAHIHGEIYRRRGWLTSEGKEIKNKDEILALLKALFLPKRLSIIHCPGHQKGHSAEARGNRMADQAARKAAITETPDTSTLLAGKRTADGSEFEKRTADGSEFESPKKKAKVE

SEQ ID NO: 2858-2859 - skipped (2 entries)

SEQ ID NO: 2860 - protein, 2096 aa, synthetic construct
MPAAKRVKLDGGDKKYSIGLDIGTNSVGWAVITDEYKVPSKKFKVLGNTDRHSIKKNLIGALLFDSGETAEATRLKRTARRRYTRRKNRICYLQEIFSNEMAKVDDSFFHRLEESFLVEEDKKHERHPIFGNIVDEVAYHEKYPTIYHLRKKLVDSTDKADLRLIYLALAHMIKFRGHFLIEGDLNPDNSDVDKLFIQLVQTYNQLFEENPINASGVDAKAILSARLSKSRRLENLIAQLPGEKKNGLFGNLIALSLGLTPNFKSNFDLAEDAKLQLSKDTYDDDLDNLLAQIGDQYADLFLAAKNLSDAILLSDILRVNTEITKAPLSASMIKRYDEHHQDLTLLKALVRQQLPEKYKEIFFDQSKNGYAGYIDGGASQEEFYKFIKPILEKMDGTEELLVKLNREDLLRKQRTFDNGSIPHQIHLGELHAILRRQEDFYPFLKDNREKIEKILTFRIPYYVGPLARGNSRFAWMTRKSEETITPWNFEEVVDKGASAQSFIERMTNFDKNLPNEKVLPKHSLLYEYFTVYNELTKVKYVTEGMRKPAFLSGEQKKAIVDLLFKTNRKVTVKQLKEDYFKKIECFDSVEISGVEDRFNASLGTYHDLLKIIKDKDFLDNEENEDILEDIVLTLTLFEDREMIEERLKTYAHLFDDKVMKQLKRRRYTGWGRLSRKLINGIRDKQSGKTILDFLKSDGFANRNFMQLIHDDSLTFKEDIQKAQVSGQGDSLHEHIANLAGSPAIKKGILQTVKVVDELVKVMGRHKPENIVIEMARENQTTQKGQKNSRERMKRIEEGIKELGSQILKEHPVENTQLQNEKLYLYYLQNGRDMYVDQELDINRLSDYDVDHIVPQSFLKDDSIDNKVLTRSDKARGKSDNVPSEEVVKKMKNYWRQLLNAKLITQRKFDNLTKAERGGLSELDKAGFIKRQLVETRQITKHVAQILDSRMNTKYDENDKLIREVKVITLKSKLVSDFRKDFQFYKVREINNYHHAHDAYLNAVVGTALIKKYPKLESEFVYGDYKVYDVRKMIAKSEQEIGKATAKYFFYSNIMNFFKTEITLANGEIRKRPLIETNGETGEIVWDKGRDFATVRKVLSMPQVNIVKKTEVQTGGFSKESILPKRNSDKLIARKKDWDPKKYGGFDSPTVAYSVLVVAKVEKGKSKKLKSVKELLGITIMERSSFEKNPIDFLEAKGYKEVKKDLIIKLPKYSLFELENGRKRMLASAGELQKGNELALPSKYVNFLYLASHYEKLKGSPEDNEQKQLFVEQHKHYLDEIIEQISEFSKRVILADANLDKVLSAYNKHRDKPIREQAENIIHLFTLTNLGAPAAFKYFDTTIDRKRYTSTKEVLDATLIHQSITGLYETRIDLSQLGGDGGGSSGGSEAAAKGGTLNIEDEHRLHETSKEPDVSLGSTWLSDFPQAWAETGGMGLAVRQAPLIIPLKATSTPVSIKQYPMSQEARLGIKPHIQRLLDQGILVPCQSPWNTPLLPVKKPGTNDYRPVQDLREVNKRVEDIHPTVPNPYNLLSGLPPSHQWYTVLDLKDAFFCLRLHPTSQPLFAFEWRDPEMGISGQLTWTRLPQGFKNSPTLFNEALHRDLADFRIQHPDLILLQYVDDLLLAATSELDCQQGTRALLQTLGNLGYRASAKKAQICQKQVKYLGYLLKEGQRWLTEARKETVMGQPTPKTPRQLREFLGKAGFCRLFIPGFAEMAAPLYPLTKPGTLFNWGPDQQKAYQEIKQALLTAPALGLPDLTKPFELFVDEKQGYAKGVLTQKLGPWRRPVAYLSKKLDPVAAGWPPCLRMVAAIAVLTKDAGKLTMGQPLVILAPHAVEALVKQPPDRWLSNARMTHYQALLLDTDRVQFGPVVALNPATLLPLPEEGLQHNCLDILAEAHGTRPDLTDQPLPDADHTWYTDGSSLLQEGQRKAGAAVTTETEVIWAKALPAGTSAQRAELIALTQALKMAEGKKLNVYTDSRYAFATAHIHGEIYRRRGWLTSEGKEIKNKDEILALLKALFLPKRLSIIHCPGHQKGHSAEARGNRMADQAARKAAITETPDTSTLLAGKRTADGSEFEKRTADGSEFESPKKKAKVE

SEQ ID NO: 2861 - skipped

SEQ ID NO: 2862 - protein, 2116 aa, synthetic construct; identical to SEQ ID NO: 2637

SEQ ID NO: 2863 - protein, 2116 aa, synthetic construct
MPAAKRVKLDGGDKKYSIGLDIGTNSVGWAVITDEYKVPSKKFKVLGNTDRHSIKKNLIGALLFDSGETAEATRLKRTARRRYTRRKNRICYLQEIFSNEMAKVDDSFFHRLEESFLVEEDKKHERHPIFGNIVDEVAYHEKYPTIYHLRKKLVDSTDKADLRLIYLALAHMIKFRGHFLIEGDLNPDNSDVDKLFIQLVQTYNQLFEENPINASGVDAKAILSARLSKSRRLENLIAQLPGEKKNGLFGNLIALSLGLTPNFKSNFDLAEDAKLQLSKDTYDDDLDNLLAQIGDQYADLFLAAKNLSDAILLSDILRVNTEITKAPLSASMIKRYDEHHQDLTLLKALVRQQLPEKYKEIFFDQSKNGYAGYIDGGASQEEFYKFIKPILEKMDGTEELLVKLNREDLLRKQRTFDNGSIPHQIHLGELHAILRRQEDFYPFLKDNREKIEKILTFRIPYYVGPLARGNSRFAWMTRKSEETITPWNFEEVVDKGASAQSFIERMTNFDKNLPNEKVLPKHSLLYEYFTVYNELTKVKYVTEGMRKPAFLSGEQKKAIVDLLFKTNRKVTVKQLKEDYFKKIECFDSVEISGVEDRFNASLGTYHDLLKIIKDKDFLDNEENEDILEDIVLTLTLFEDREMIEERLKTYAHLFDDKVMKQLKRRRYTGWGRLSRKLINGIRDKQSGKTILDFLKSDGFANRNFMQLIHDDSLTFKEDIQKAQVSGQGDSLHEHIANLAGSPAIKKGILQTVKVVDELVKVMGRHKPENIVIEMARENQTTQKGQKNSRERMKRIEEGIKELGSQILKEHPVENTQLQNEKLYLYYLQNGRDMYVDQELDINRLSDYDVDHIVPQSFLKDDSIDNKVLTRSDKARGKSDNVPSEEVVKKMKNYWRQLLNAKLITQRKFDNLTKAERGGLSELDKAGFIKRQLVETRQITKHVAQILDSRMNTKYDENDKLIREVKVITLKSKLVSDFRKDFQFYKVREINNYHHAHDAYLNAVVGTALIKKYPKLESEFVYGDYKVYDVRKMIAKSEQEIGKATAKYFFYSNIMNFFKTEITLANGEIRKRPLIETNGETGEIVWDKGRDFATVRKVLSMPQVNIVKKTEVQTGGFSKESILPKRNSDKLIARKKDWDPKKYGGFDSPTVAYSVLVVAKVEKGKSKKLKSVKELLGITIMERSSFEKNPIDFLEAKGYKEVKKDLIIKLPKYSLFELENGRKRMLASAGELQKGNELALPSKYVNFLYLASHYEKLKGSPEDNEQKQLFVEQHKHYLDEIIEQISEFSKRVILADANLDKVLSAYNKHRDKPIREQAENIIHLFTLTNLGAPAAFKYFDTTIDRKRYTSTKEVLDATLIHQSITGLYETRIDLSQLGGDGGEAAAKGGGGGSGGTLNIEDEYRLHETSKEPDVSLGSTWLSDFPQAWAETGGMGLAVRQAPLIIPLKATSTPVSIKQYPMSQEARLGIKPHIQRLLDQGILVPCQSPWNTPLLPVKKPGTNDYRPVQDLREVNKRVEDIHPTVPNPYNLLSGLPPSHQWYTVLDLKDAFFCLRLHPTSQPLFAFEWRDPEMGISGQLTWTRLPQGFKNSPTLFNEALHRDLADFRIQHPDLILLQYVDDLLLAATSELDCQQGTRALLQTLGNLGYRASAKKAQICQKQVKYLGYLLKEGQRWLTEARKETVMGQPTPKTPRQLREFLGKAGFCRLFIPGFAEMAAPLYPLTKPGTLFNWGPDQQKAYQEIKQALLTAPALGLPDLTKPFELFVDEKQGYAKGVLTQKLGPWRRPVAYLSKKLDPVAAGWPPCLRMVAAIAVLTKDAGKLTMGQPLVILAPHAVEALVKQPPDRWLSNARMTHYQALLLDTDRVQFGPVVALNPATLLPLPEEGLQHNCLDILAEAHGTRPDLTDQPLPDADHTWYTDGSSLLQEGQRKAGAAVTTETEVIWAKALPAGTSAQRAELIALTQALKMAEGKKLNVYTDSRYAFATAHIHGEIYRRRGWLTSEGKEIKNKDEILALLKALFLPKRLSIIHCPGHQKGHSAEARGNRMADQAARKAAITETPDTSTLLIENSSPSGGSKRTADGSEFEAGKRTADGSEFEKRTADGSEFESPKKKAKVE

SEQ ID NO: 2864 - protein, 2108 aa, synthetic construct; identical to SEQ ID NO: 2655

SEQ ID NO: 2865 - protein, 2108 aa, synthetic construct; identical to SEQ ID NO: 2624

SEQ ID NO: 2866 - protein, 2116 aa, synthetic construct; identical to SEQ ID NO: 2692

SEQ ID NO: 2867 - protein, 2117 aa, synthetic construct; identical to SEQ ID NO: 2665

SEQ ID NO: 2868 - protein, 2118 aa, synthetic construct
MPAAKRVKLDGGDKKYSIGLDIGTNSVGWAVITDEYKVPSKKFKVLGNTDRHSIKKNLIGALLFDSGETAEATRLKRTARRRYTRRKNRICYLQEIFSNEMAKVDDSFFHRLEESFLVEEDKKHERHPIFGNIVDEVAYHEKYPTIYHLRKKLVDSTDKADLRLIYLALAHMIKFRGHFLIEGDLNPDNSDVDKLFIQLVQTYNQLFEENPINASGVDAKAILSARLSKSRRLENLIAQLPGEKKNGLFGNLIALSLGLTPNFKSNFDLAEDAKLQLSKDTYDDDLDNLLAQIGDQYADLFLAAKNLSDAILLSDILRVNTEITKAPLSASMIKRYDEHHQDLTLLKALVRQQLPEKYKEIFFDQSKNGYAGYIDGGASQEEFYKFIKPILEKMDGTEELLVKLNREDLLRKQRTFDNGSIPHQIHLGELHAILRRQEDFYPFLKDNREKIEKILTFRIPYYVGPLARGNSRFAWMTRKSEETITPWNFEEVVDKGASAQSFIERMTNFDKNLPNEKVLPKHSLLYEYFTVYNELTKVKYVTEGMRKPAFLSGEQKKAIVDLLFKTNRKVTVKQLKEDYFKKIECFDSVEISGVEDRFNASLGTYHDLLKIIKDKDFLDNEENEDILEDIVLTLTLFEDREMIEERLKTYAHLFDDKVMKQLKRRRYTGWGRLSRKLINGIRDKQSGKTILDFLKSDGFANRNFMQLIHDDSLTFKEDIQKAQVSGQGDSLHEHIANLAGSPAIKKGILQTVKVVDELVKVMGRHKPENIVIEMARENQTTQKGQKNSRERMKRIEEGIKELGSQILKEHPVENTQLQNEKLYLYYLQNGRDMYVDQELDINRLSDYDVDHIVPQSFLKDDSIDNKVLTRSDKARGKSDNVPSEEVVKKMKNYWRQLLNAKLITQRKFDNLTKAERGGLSELDKAGFIKRQLVETRQITKHVAQILDSRMNTKYDENDKLIREVKVITLKSKLVSDFRKDFQFYKVREINNYHHAHDAYLNAVVGTALIKKYPKLESEFVYGDYKVYDVRKMIAKSEQEIGKATAKYFFYSNIMNFFKTEITLANGEIRKRPLIETNGETGEIVWDKGRDFATVRKVLSMPQVNIVKKTEVQTGGFSKESILPKRNSDKLIARKKDWDPKKYGGFDSPTVAYSVLVVAKVEKGKSKKLKSVKELLGITIMERSSFEKNPIDFLEAKGYKEVKKDLIIKLPKYSLFELENGRKRMLASAGELQKGNELALPSKYVNFLYLASHYEKLKGSPEDNEQKQLFVEQHKHYLDEIIEQISEFSKRVILADANLDKVLSAYNKHRDKPIREQAENIIHLFTLTNLGAPAAFKYFDTTIDRKRYTSTKEVLDATLIHQSITGLYETRIDLSQLGGDGGPAPAPAPAPAPAPGGTLNIEDEYRLHETSKEPDVSLGSTWLSDFPQAWAETGGMGLAVRQAPLIIPLKATSTPVSIKQYPMSQEARLGIKPHIQRLLDQGILVPCQSPWNTPLLPVKKPGTNDYRPVQDLREVNKRVEDIHPTVPNPYNLLSGLPPSHQWYTVLDLKDAFFCLRLHPTSQPLFAFEWRDPEMGISGQLTWTRLPQGFKNSPTLFNEALHRDLADFRIQHPDLILLQYVDDLLLAATSELDCQQGTRALLQTLGNLGYRASAKKAQICQKQVKYLGYLLKEGQRWLTEARKETVMGQPTPKTPRQLREFLGKAGFCRLFIPGFAEMAAPLYPLTKPGTLFNWGPDQQKAYQEIKQALLTAPALGLPDLTKPFELFVDEKQGYAKGVLTQKLGPWRRPVAYLSKKLDPVAAGWPPCLRMVAAIAVLTKDAGKLTMGQPLVILAPHAVEALVKQPPDRWLSNARMTHYQALLLDTDRVQFGPVVALNPATLLPLPEEGLQHNCLDILAEAHGTRPDLTDQPLPDADHTWYTDGSSLLQEGQRKAGAAVTTETEVIWAKALPAGTSAQRAELIALTQALKMAEGKKLNVYTDSRYAFATAHIHGEIYRRRGWLTSEGKEIKNKDEILALLKALFLPKRLSIIHCPGHQKGHSAEARGNRMADQAARKAAITETPDTSTLLIENSSPSGGSKRTADGSEFEAGKRTADGSEFEKRTADGSEFESPKKKAKVE

SEQ ID NO: 2869 - protein, 2114 aa, synthetic construct
MPAAKRVKLDGGDKKYSIGLDIGTNSVGWAVITDEYKVPSKKFKVLGNTDRHSIKKNLIGALLFDSGETAEATRLKRTARRRYTRRKNRICYLQEIFSNEMAKVDDSFFHRLEESFLVEEDKKHERHPIFGNIVDEVAYHEKYPTIYHLRKKLVDSTDKADLRLIYLALAHMIKFRGHFLIEGDLNPDNSDVDKLFIQLVQTYNQLFEENPINASGVDAKAILSARLSKSRRLENLIAQLPGEKKNGLFGNLIALSLGLTPNFKSNFDLAEDAKLQLSKDTYDDDLDNLLAQIGDQYADLFLAAKNLSDAILLSDILRVNTEITKAPLSASMIKRYDEHHQDLTLLKALVRQQLPEKYKEIFFDQSKNGYAGYIDGGASQEEFYKFIKPILEKMDGTEELLVKLNREDLLRKQRTFDNGSIPHQIHLGELHAILRRQEDFYPFLKDNREKIEKILTFRIPYYVGPLARGNSRFAWMTRKSEETITPWNFEEVVDKGASAQSFIERMTNFDKNLPNEKVLPKHSLLYEYFTVYNELTKVKYVTEGMRKPAFLSGEQKKAIVDLLFKTNRKVTVKQLKEDYFKKIECFDSVEISGVEDRFNASLGTYHDLLKIIKDKDFLDNEENEDILEDIVLTLTLFEDREMIEERLKTYAHLFDDKVMKQLKRRRYTGWGRLSRKLINGIRDKQSGKTILDFLKSDGFANRNFMQLIHDDSLTFKEDIQKAQVSGQGDSLHEHIANLAGSPAIKKGILQTVKVVDELVKVMGRHKPENIVIEMARENQTTQKGQKNSRERMKRIEEGIKELGSQILKEHPVENTQLQNEKLYLYYLQNGRDMYVDQELDINRLSDYDVDHIVPQSFLKDDSIDNKVLTRSDKARGKSDNVPSEEVVKKMKNYWRQLLNAKLITQRKFDNLTKAERGGLSELDKAGFIKRQLVETRQITKHVAQILDSRMNTKYDENDKLIREVKVITLKSKLVSDFRKDFQFYKVREINNYHHAHDAYLNAVVGTALIKKYPKLESEFVYGDYKVYDVRKMIAKSEQEIGKATAKYFFYSNIMNFFKTEITLANGEIRKRPLIETNGETGEIVWDKGRDFATVRKVLSMPQVNIVKKTEVQTGGFSKESILPKRNSDKLIARKKDWDPKKYGGFDSPTVAYSVLVVAKVEKGKSKKLKSVKELLGITIMERSSFEKNPIDFLEAKGYKEVKKDLIIKLPKYSLFELENGRKRMLASAGELQKGNELALPSKYVNFLYLASHYEKLKGSPEDNEQKQLFVEQHKHYLDEIIEQISEFSKRVILADANLDKVLSAYNKHRDKPIREQAENIIHLFTLTNLGAPAAFKYFDTTIDRKRYTSTKEVLDATLIHQSITGLYETRIDLSQLGGDGGPAPGGGGSSGGTLNIEDEYRLHETSKEPDVSLGSTWLSDFPQAWAETGGMGLAVRQAPLIIPLKATSTPVSIKQYPMSQEARLGIKPHIQRLLDQGILVPCQSPWNTPLLPVKKPGTNDYRPVQDLREVNKRVEDIHPTVPNPYNLLSGLPPSHQWYTVLDLKDAFFCLRLHPTSQPLFAFEWRDPEMGISGQLTWTRLPQGFKNSPTLFNEALHRDLADFRIQHPDLILLQYVDDLLLAATSELDCQQGTRALLQTLGNLGYRASAKKAQICQKQVKYLGYLLKEGQRWLTEARKETVMGQPTPKTPRQLREFLGKAGFCRLFIPGFAEMAAPLYPLTKPGTLFNWGPDQQKAYQEIKQALLTAPALGLPDLTKPFELFVDEKQGYAKGVLTQKLGPWRRPVAYLSKKLDPVAAGWPPCLRMVAAIAVLTKDAGKLTMGQPLVILAPHAVEALVKQPPDRWLSNARMTHYQALLLDTDRVQFGPVVALNPATLLPLPEEGLQHNCLDILAEAHGTRPDLTDQPLPDADHTWYTDGSSLLQEGQRKAGAAVTTETEVIWAKALPAGTSAQRAELIALTQALKMAEGKKLNVYTDSRYAFATAHIHGEIYRRRGWLTSEGKEIKNKDEILALLKALFLPKRLSIIHCPGHQKGHSAEARGNRMADQAARKAAITETPDTSTLLIENSSPSGGSKRTADGSEFEAGKRTADGSEFEKRTADGSEFESPKKKAKVE

SEQ ID NO: 2870 - protein, 2116 aa, synthetic construct; identical to SEQ ID NO: 2677

SEQ ID NO: 2871 - protein, 2111 aa, synthetic construct; identical to SEQ ID NO: 2676

SEQ ID NO: 2872 - protein, 2116 aa, synthetic construct
MPAAKRVKLDGGDKKYSIGLDIGTNSVGWAVITDEYKVPSKKFKVLGNTDRHSIKKNLIGALLFDSGETAEATRLKRTARRRYTRRKNRICYLQEIFSNEMAKVDDSFFHRLEESFLVEEDKKHERHPIFGNIVDEVAYHEKYPTIYHLRKKLVDSTDKADLRLIYLALAHMIKFRGHFLIEGDLNPDNSDVDKLFIQLVQTYNQLFEENPINASGVDAKAILSARLSKSRRLENLIAQLPGEKKNGLFGNLIALSLGLTPNFKSNFDLAEDAKLQLSKDTYDDDLDNLLAQIGDQYADLFLAAKNLSDAILLSDILRVNTEITKAPLSASMIKRYDEHHQDLTLLKALVRQQLPEKYKEIFFDQSKNGYAGYIDGGASQEEFYKFIKPILEKMDGTEELLVKLNREDLLRKQRTFDNGSIPHQIHLGELHAILRRQEDFYPFLKDNREKIEKILTFRIPYYVGPLARGNSRFAWMTRKSEETITPWNFEEVVDKGASAQSFIERMTNFDKNLPNEKVLPKHSLLYEYFTVYNELTKVKYVTEGMRKPAFLSGEQKKAIVDLLFKTNRKVTVKQLKEDYFKKIECFDSVEISGVEDRFNASLGTYHDLLKIIKDKDFLDNEENEDILEDIVLTLTLFEDREMIEERLKTYAHLFDDKVMKQLKRRRYTGWGRLSRKLINGIRDKQSGKTILDFLKSDGFANRNFMQLIHDDSLTFKEDIQKAQVSGQGDSLHEHIANLAGSPAIKKGILQTVKVVDELVKVMGRHKPENIVIEMARENQTTQKGQKNSRERMKRIEEGIKELGSQILKEHPVENTQLQNEKLYLYYLQNGRDMYVDQELDINRLSDYDVDHIVPQSFLKDDSIDNKVLTRSDKARGKSDNVPSEEVVKKMKNYWRQLLNAKLITQRKFDNLTKAERGGLSELDKAGFIKRQLVETRQITKHVAQILDSRMNTKYDENDKLIREVKVITLKSKLVSDFRKDFQFYKVREINNYHHAHDAYLNAVVGTALIKKYPKLESEFVYGDYKVYDVRKMIAKSEQEIGKATAKYFFYSNIMNFFKTEITLANGEIRKRPLIETNGETGEIVWDKGRDFATVRKVLSMPQVNIVKKTEVQTGGFSKESILPKRNSDKLIARKKDWDPKKYGGFDSPTVAYSVLVVAKVEKGKSKKLKSVKELLGITIMERSSFEKNPIDFLEAKGYKEVKKDLIIKLPKYSLFELENGRKRMLASAGELQKGNELALPSKYVNFLYLASHYEKLKGSPEDNEQKQLFVEQHKHYLDEIIEQISEFSKRVILADANLDKVLSAYNKHRDKPIREQAENIIHLFTLTNLGAPAAFKYFDTTIDRKRYTSTKEVLDATLIHQSITGLYETRIDLSQLGGDGGPAPGGGEAAAKGGTLNIEDEYRLHETSKEPDVSLGSTWLSDFPQAWAETGGMGLAVRQAPLIIPLKATSTPVSIKQYPMSQEARLGIKPHIQRLLDQGILVPCQSPWNTPLLPVKKPGTNDYRPVQDLREVNKRVEDIHPTVPNPYNLLSGLPPSHQWYTVLDLKDAFFCLRLHPTSQPLFAFEWRDPEMGISGQLTWTRLPQGFKNSPTLFNEALHRDLADFRIQHPDLILLQYVDDLLLAATSELDCQQGTRALLQTLGNLGYRASAKKAQICQKQVKYLGYLLKEGQRWLTEARKETVMGQPTPKTPRQLREFLGKAGFCRLFIPGFAEMAAPLYPLTKPGTLFNWGPDQQKAYQEIKQALLTAPALGLPDLTKPFELFVDEKQGYAKGVLTQKLGPWRRPVAYLSKKLDPVAAGWPPCLRMVAAIAVLTKDAGKLTMGQPLVILAPHAVEALVKQPPDRWLSNARMTHYQALLLDTDRVQFGPVVALNPATLLPLPEEGLQHNCLDILAEAHGTRPDLTDQPLPDADHTWYTDGSSLLQEGQRKAGAAVTTETEVIWAKALPAGTSAQRAELIALTQALKMAEGKKLNVYTDSRYAFATAHIHGEIYRRRGWLTSEGKEIKNKDEILALLKALFLPKRLSIIHCPGHQKGHSAEARGNRMADQAARKAAITETPDTSTLLIENSSPSGGSKRTADGSEFEAGKRTADGSEFEKRTADGSEFESPKKKAKVE

SEQ ID NO: 2873 - protein, 2116 aa, synthetic construct; identical to SEQ ID NO: 2651

SEQ ID NO: 2874 - protein, 2116 aa, synthetic construct; identical to SEQ ID NO: 2638

SEQ ID NO: 2875-2876 - skipped (2 entries)

SEQ ID NO: 2877 - protein, 2120 aa, synthetic construct; identical to SEQ ID NO: 2627

SEQ ID NO: 2878 - protein, 2114 aa, synthetic construct; identical to SEQ ID NO: 2649

SEQ ID NO: 2879 - protein, 2116 aa, synthetic construct
MPAAKRVKLDGGDKKYSIGLDIGTNSVGWAVITDEYKVPSKKFKVLGNTDRHSIKKNLIGALLFDSGETAEATRLKRTARRRYTRRKNRICYLQEIFSNEMAKVDDSFFHRLEESFLVEEDKKHERHPIFGNIVDEVAYHEKYPTIYHLRKKLVDSTDKADLRLIYLALAHMIKFRGHFLIEGDLNPDNSDVDKLFIQLVQTYNQLFEENPINASGVDAKAILSARLSKSRRLENLIAQLPGEKKNGLFGNLIALSLGLTPNFKSNFDLAEDAKLQLSKDTYDDDLDNLLAQIGDQYADLFLAAKNLSDAILLSDILRVNTEITKAPLSASMIKRYDEHHQDLTLLKALVRQQLPEKYKEIFFDQSKNGYAGYIDGGASQEEFYKFIKPILEKMDGTEELLVKLNREDLLRKQRTFDNGSIPHQIHLGELHAILRRQEDFYPFLKDNREKIEKILTFRIPYYVGPLARGNSRFAWMTRKSEETITPWNFEEVVDKGASAQSFIERMTNFDKNLPNEKVLPKHSLLYEYFTVYNELTKVKYVTEGMRKPAFLSGEQKKAIVDLLFKTNRKVTVKQLKEDYFKKIECFDSVEISGVEDRFNASLGTYHDLLKIIKDKDFLDNEENEDILEDIVLTLTLFEDREMIEERLKTYAHLFDDKVMKQLKRRRYTGWGRLSRKLINGIRDKQSGKTILDFLKSDGFANRNFMQLIHDDSLTFKEDIQKAQVSGQGDSLHEHIANLAGSPAIKKGILQTVKVVDELVKVMGRHKPENIVIEMARENQTTQKGQKNSRERMKRIEEGIKELGSQILKEHPVENTQLQNEKLYLYYLQNGRDMYVDQELDINRLSDYDVDHIVPQSFLKDDSIDNKVLTRSDKARGKSDNVPSEEVVKKMKNYWRQLLNAKLITQRKFDNLTKAERGGLSELDKAGFIKRQLVETRQITKHVAQILDSRMNTKYDENDKLIREVKVITLKSKLVSDFRKDFQFYKVREINNYHHAHDAYLNAVVGTALIKKYPKLESEFVYGDYKVYDVRKMIAKSEQEIGKATAKYFFYSNIMNFFKTEITLANGEIRKRPLIETNGETGEIVWDKGRDFATVRKVLSMPQVNIVKKTEVQTGGFSKESILPKRNSDKLIARKKDWDPKKYGGFDSPTVAYSVLVVAKVEKGKSKKLKSVKELLGITIMERSSFEKNPIDFLEAKGYKEVKKDLIIKLPKYSLFELENGRKRMLASAGELQKGNELALPSKYVNFLYLASHYEKLKGSPEDNEQKQLFVEQHKHYLDEIIEQISEFSKRVILADANLDKVLSAYNKHRDKPIREQAENIIHLFTLTNLGAPAAFKYFDTTIDRKRYTSTKEVLDATLIHQSITGLYETRIDLSQLGGDGGGGGEAAAKPAPGGTLNIEDEYRLHETSKEPDVSLGSTWLSDFPQAWAETGGMGLAVRQAPLIIPLKATSTPVSIKQYPMSQEARLGIKPHIQRLLDQGILVPCQSPWNTPLLPVKKPGTNDYRPVQDLREVNKRVEDIHPTVPNPYNLLSGLPPSHQWYTVLDLKDAFFCLRLHPTSQPLFAFEWRDPEMGISGQLTWTRLPQGFKNSPTLFNEALHRDLADFRIQHPDLILLQYVDDLLLAATSELDCQQGTRALLQTLGNLGYRASAKKAQICQKQVKYLGYLLKEGQRWLTEARKETVMGQPTPKTPRQLREFLGKAGFCRLFIPGFAEMAAPLYPLTKPGTLFNWGPDQQKAYQEIKQALLTAPALGLPDLTKPFELFVDEKQGYAKGVLTQKLGPWRRPVAYLSKKLDPVAAGWPPCLRMVAAIAVLTKDAGKLTMGQPLVILAPHAVEALVKQPPDRWLSNARMTHYQALLLDTDRVQFGPVVALNPATLLPLPEEGLQHNCLDILAEAHGTRPDLTDQPLPDADHTWYTDGSSLLQEGQRKAGAAVTTETEVIWAKALPAGTSAQRAELIALTQALKMAEGKKLNVYTDSRYAFATAHIHGEIYRRRGWLTSEGKEIKNKDEILALLKALFLPKRLSIIHCPGHQKGHSAEARGNRMADQAARKAAITETPDTSTLLIENSSPSGGSKRTADGSEFEAGKRTADGSEFEKRTADGSEFESPKKKAKVE

SEQ ID NO: 2880 - protein, 2130 aa, synthetic construct; identical to SEQ ID NO: 2678

SEQ ID NO: 2881 - protein, 2110 aa, synthetic construct; identical to SEQ ID NO: 2620

SEQ ID NO: 2882 - skipped

SEQ ID NO: 2883 - protein, 2113 aa, synthetic construct
MPAAKRVKLDGGDKKYSIGLDIGTNSVGWAVITDEYKVPSKKFKVLGNTDRHSIKKNLIGALLFDSGETAEATRLKRTARRRYTRRKNRICYLQEIFSNEMAKVDDSFFHRLEESFLVEEDKKHERHPIFGNIVDEVAYHEKYPTIYHLRKKLVDSTDKADLRLIYLALAHMIKFRGHFLIEGDLNPDNSDVDKLFIQLVQTYNQLFEENPINASGVDAKAILSARLSKSRRLENLIAQLPGEKKNGLFGNLIALSLGLTPNFKSNFDLAEDAKLQLSKDTYDDDLDNLLAQIGDQYADLFLAAKNLSDAILLSDILRVNTEITKAPLSASMIKRYDEHHQDLTLLKALVRQQLPEKYKEIFFDQSKNGYAGYIDGGASQEEFYKFIKPILEKMDGTEELLVKLNREDLLRKQRTFDNGSIPHQIHLGELHAILRRQEDFYPFLKDNREKIEKILTFRIPYYVGPLARGNSRFAWMTRKSEETITPWNFEEVVDKGASAQSFIERMTNFDKNLPNEKVLPKHSLLYEYFTVYNELTKVKYVTEGMRKPAFLSGEQKKAIVDLLFKTNRKVTVKQLKEDYFKKIECFDSVEISGVEDRFNASLGTYHDLLKIIKDKDFLDNEENEDILEDIVLTLTLFEDREMIEERLKTYAHLFDDKVMKQLKRRRYTGWGRLSRKLINGIRDKQSGKTILDFLKSDGFANRNFMQLIHDDSLTFKEDIQKAQVSGQGDSLHEHIANLAGSPAIKKGILQTVKVVDELVKVMGRHKPENIVIEMARENQTTQKGQKNSRERMKRIEEGIKELGSQILKEHPVENTQLQNEKLYLYYLQNGRDMYVDQELDINRLSDYDVDHIVPQSFLKDDSIDNKVLTRSDKARGKSDNVPSEEVVKKMKNYWRQLLNAKLITQRKFDNLTKAERGGLSELDKAGFIKRQLVETRQITKHVAQILDSRMNTKYDENDKLIREVKVITLKSKLVSDFRKDFQFYKVREINNYHHAHDAYLNAVVGTALIKKYPKLESEFVYGDYKVYDVRKMIAKSEQEIGKATAKYFFYSNIMNFFKTEITLANGEIRKRPLIETNGETGEIVWDKGRDFATVRKVLSMPQVNIVKKTEVQTGGFSKESILPKRNSDKLIARKKDWDPKKYGGFDSPTVAYSVLVVAKVEKGKSKKLKSVKELLGITIMERSSFEKNPIDFLEAKGYKEVKKDLIIKLPKYSLFELENGRKRMLASAGELQKGNELALPSKYVNFLYLASHYEKLKGSPEDNEQKQLFVEQHKHYLDEIIEQISEFSKRVILADANLDKVLSAYNKHRDKPIREQAENIIHLFTLTNLGAPAAFKYFDTTIDRKRYTSTKEVLDATLIHQSITGLYETRIDLSQLGGDGGPAPEAAAKGGTLNIEDEYRLHETSKEPDVSLGSTWLSDFPQAWAETGGMGLAVRQAPLIIPLKATSTPVSIKQYPMSQEARLGIKPHIQRLLDQGILVPCQSPWNTPLLPVKKPGTNDYRPVQDLREVNKRVEDIHPTVPNPYNLLSGLPPSHQWYTVLDLKDAFFCLRLHPTSQPLFAFEWRDPEMGISGQLTWTRLPQGFKNSPTLFNEALHRDLADFRIQHPDLILLQYVDDLLLAATSELDCQQGTRALLQTLGNLGYRASAKKAQICQKQVKYLGYLLKEGQRWLTEARKETVMGQPTPKTPRQLREFLGKAGFCRLFIPGFAEMAAPLYPLTKPGTLFNWGPDQQKAYQEIKQALLTAPALGLPDLTKPFELFVDEKQGYAKGVLTQKLGPWRRPVAYLSKKLDPVAAGWPPCLRMVAAIAVLTKDAGKLTMGQPLVILAPHAVEALVKQPPDRWLSNARMTHYQALLLDTDRVQFGPVVALNPATLLPLPEEGLQHNCLDILAEAHGTRPDLTDQPLPDADHTWYTDGSSLLQEGQRKAGAAVTTETEVIWAKALPAGTSAQRAELIALTQALKMAEGKKLNVYTDSRYAFATAHIHGEIYRRRGWLTSEGKEIKNKDEILALLKALFLPKRLSIIHCPGHQKGHSAEARGNRMADQAARKAAITETPDTSTLLIENSSPSGGSKRTADGSEFEAGKRTADGSEFEKRTADGSEFESPKKKAKVE

SEQ ID NO: 2884 - skipped

SEQ ID NO: 2885 - protein, 2116 aa, synthetic construct; identical to SEQ ID NO: 2688

SEQ ID NO: 2886 - protein, 2111 aa, synthetic construct; identical to SEQ ID NO: 2653

SEQ ID NO: 2887 - protein, 2115 aa, synthetic construct; identical to SEQ ID NO: 2647

SEQ ID NO: 2888 - protein, 2125 aa, synthetic construct; identical to SEQ ID NO: 2610

SEQ ID NO: 2889 - skipped

SEQ ID NO: 2890 - protein, 2114 aa, synthetic construct; identical to SEQ ID NO: 2633

SEQ ID NO: 2891 - protein, 2116 aa, synthetic construct; identical to SEQ ID NO: 2641

SEQ ID NO: 2892 - skipped

SEQ ID NO: 2893 - protein, 2116 aa, synthetic construct; identical to SEQ ID NO: 2701

SEQ ID NO: 2894 - protein, 2114 aa, synthetic construct; identical to SEQ ID NO: 2684

SEQ ID NO: 2895 - protein, 2114 aa, synthetic construct; identical to SEQ ID NO: 2622

SEQ ID NO: 2896-2900 - skipped (5 entries)

SEQ ID NO: 2901 - protein, 2116 aa, synthetic construct; identical to SEQ ID NO: 2629

SEQ ID NO: 2902 - protein, 2117 aa, synthetic construct; identical to SEQ ID NO: 2696

SEQ ID NO: 2903 - protein, 2114 aa, synthetic construct; identical to SEQ ID NO: 2634

SEQ ID NO: 2904 - protein, 2114 aa, synthetic construct; identical to SEQ ID NO: 2618

SEQ ID NO: 2905 - protein, 2111 aa, synthetic construct
MPAAKRVKLDGGDKKYSIGLDIGTNSVGWAVITDEYKVPSKKFKVLGNTDRHSIKKNLIGALLFDSGETAEATRLKRTARRRYTRRKNRICYLQEIFSNEMAKVDDSFFHRLEESFLVEEDKKHERHPIFGNIVDEVAYHEKYPTIYHLRKKLVDSTDKADLRLIYLALAHMIKFRGHFLIEGDLNPDNSDVDKLFIQLVQTYNQLFEENPINASGVDAKAILSARLSKSRRLENLIAQLPGEKKNGLFGNLIALSLGLTPNFKSNFDLAEDAKLQLSKDTYDDDLDNLLAQIGDQYADLFLAAKNLSDAILLSDILRVNTEITKAPLSASMIKRYDEHHQDLTLLKALVRQQLPEKYKEIFFDQSKNGYAGYIDGGASQEEFYKFIKPILEKMDGTEELLVKLNREDLLRKQRTFDNGSIPHQIHLGELHAILRRQEDFYPFLKDNREKIEKILTFRIPYYVGPLARGNSRFAWMTRKSEETITPWNFEEVVDKGASAQSFIERMTNFDKNLPNEKVLPKHSLLYEYFTVYNELTKVKYVTEGMRKPAFLSGEQKKAIVDLLFKTNRKVTVKQLKEDYFKKIECFDSVEISGVEDRFNASLGTYHDLLKIIKDKDFLDNEENEDILEDIVLTLTLFEDREMIEERLKTYAHLFDDKVMKQLKRRRYTGWGRLSRKLINGIRDKQSGKTILDFLKSDGFANRNFMQLIHDDSLTFKEDIQKAQVSGQGDSLHEHIANLAGSPAIKKGILQTVKVVDELVKVMGRHKPENIVIEMARENQTTQKGQKNSRERMKRIEEGIKELGSQILKEHPVENTQLQNEKLYLYYLQNGRDMYVDQELDINRLSDYDVDHIVPQSFLKDDSIDNKVLTRSDKARGKSDNVPSEEVVKKMKNYWRQLLNAKLITQRKFDNLTKAERGGLSELDKAGFIKRQLVETRQITKHVAQILDSRMNTKYDENDKLIREVKVITLKSKLVSDFRKDFQFYKVREINNYHHAHDAYLNAVVGTALIKKYPKLESEFVYGDYKVYDVRKMIAKSEQEIGKATAKYFFYSNIMNFFKTEITLANGEIRKRPLIETNGETGEIVWDKGRDFATVRKVLSMPQVNIVKKTEVQTGGFSKESILPKRNSDKLIARKKDWDPKKYGGFDSPTVAYSVLVVAKVEKGKSKKLKSVKELLGITIMERSSFEKNPIDFLEAKGYKEVKKDLIIKLPKYSLFELENGRKRMLASAGELQKGNELALPSKYVNFLYLASHYEKLKGSPEDNEQKQLFVEQHKHYLDEIIEQISEFSKRVILADANLDKVLSAYNKHRDKPIREQAENIIHLFTLTNLGAPAAFKYFDTTIDRKRYTSTKEVLDATLIHQSITGLYETRIDLSQLGGDGGGSSGSSGGTLNIEDEYRLHETSKEPDVSLGSTWLSDFPQAWAETGGMGLAVRQAPLIIPLKATSTPVSIKQYPMSQEARLGIKPHIQRLLDQGILVPCQSPWNTPLLPVKKPGTNDYRPVQDLREVNKRVEDIHPTVPNPYNLLSGLPPSHQWYTVLDLKDAFFCLRLHPTSQPLFAFEWRDPEMGISGQLTWTRLPQGFKNSPTLFNEALHRDLADFRIQHPDLILLQYVDDLLLAATSELDCQQGTRALLQTLGNLGYRASAKKAQICQKQVKYLGYLLKEGQRWLTEARKETVMGQPTPKTPRQLREFLGKAGFCRLFIPGFAEMAAPLYPLTKPGTLFNWGPDQQKAYQEIKQALLTAPALGLPDLTKPFELFVDEKQGYAKGVLTQKLGPWRRPVAYLSKKLDPVAAGWPPCLRMVAAIAVLTKDAGKLTMGQPLVILAPHAVEALVKQPPDRWLSNARMTHYQALLLDTDRVQFGPVVALNPATLLPLPEEGLQHNCLDILAEAHGTRPDLTDQPLPDADHTWYTDGSSLLQEGQRKAGAAVTTETEVIWAKALPAGTSAQRAELIALTQALKMAEGKKLNVYTDSRYAFATAHIHGEIYRRRGWLTSEGKEIKNKDEILALLKALFLPKRLSIIHCPGHQKGHSAEARGNRMADQAARKAAITETPDTSTLLIENSSPSGGSKRTADGSEFEAGKRTADGSEFEKRTADGSEFESPKKKAKVE

SEQ ID NO: 2906 - skipped

SEQ ID NO: 2907 - protein, 2121 aa, synthetic construct; identical to SEQ ID NO: 2663

SEQ ID NO: 2908 - skipped

SEQ ID NO: 2909 - protein, 2115 aa, synthetic construct; identical to SEQ ID NO: 2639

SEQ ID NO: 2910-2912 - skipped (3 entries)

SEQ ID NO: 2913 - protein, 2116 aa, synthetic construct; identical to SEQ ID NO: 2660

SEQ ID NO: 2914 - protein, 2111 aa, synthetic construct
MPAAKRVKLDGGDKKYSIGLDIGTNSVGWAVITDEYKVPSKKFKVLGNTDRHSIKKNLIGALLFDSGETAEATRLKRTARRRYTRRKNRICYLQEIFSNEMAKVDDSFFHRLEESFLVEEDKKHERHPIFGNIVDEVAYHEKYPTIYHLRKKLVDSTDKADLRLIYLALAHMIKFRGHFLIEGDLNPDNSDVDKLFIQLVQTYNQLFEENPINASGVDAKAILSARLSKSRRLENLIAQLPGEKKNGLFGNLIALSLGLTPNFKSNFDLAEDAKLQLSKDTYDDDLDNLLAQIGDQYADLFLAAKNLSDAILLSDILRVNTEITKAPLSASMIKRYDEHHQDLTLLKALVRQQLPEKYKEIFFDQSKNGYAGYIDGGASQEEFYKFIKPILEKMDGTEELLVKLNREDLLRKQRTFDNGSIPHQIHLGELHAILRRQEDFYPFLKDNREKIEKILTFRIPYYVGPLARGNSRFAWMTRKSEETITPWNFEEVVDKGASAQSFIERMTNFDKNLPNEKVLPKHSLLYEYFTVYNELTKVKYVTEGMRKPAFLSGEQKKAIVDLLFKTNRKVTVKQLKEDYFKKIECFDSVEISGVEDRFNASLGTYHDLLKIIKDKDFLDNEENEDILEDIVLTLTLFEDREMIEERLKTYAHLFDDKVMKQLKRRRYTGWGRLSRKLINGIRDKQSGKTILDFLKSDGFANRNFMQLIHDDSLTFKEDIQKAQVSGQGDSLHEHIANLAGSPAIKKGILQTVKVVDELVKVMGRHKPENIVIEMARENQTTQKGQKNSRERMKRIEEGIKELGSQILKEHPVENTQLQNEKLYLYYLQNGRDMYVDQELDINRLSDYDVDHIVPQSFLKDDSIDNKVLTRSDKARGKSDNVPSEEVVKKMKNYWRQLLNAKLITQRKFDNLTKAERGGLSELDKAGFIKRQLVETRQITKHVAQILDSRMNTKYDENDKLIREVKVITLKSKLVSDFRKDFQFYKVREINNYHHAHDAYLNAVVGTALIKKYPKLESEFVYGDYKVYDVRKMIAKSEQEIGKATAKYFFYSNIMNFFKTEITLANGEIRKRPLIETNGETGEIVWDKGRDFATVRKVLSMPQVNIVKKTEVQTGGFSKESILPKRNSDKLIARKKDWDPKKYGGFDSPTVAYSVLVVAKVEKGKSKKLKSVKELLGITIMERSSFEKNPIDFLEAKGYKEVKKDLIIKLPKYSLFELENGRKRMLASAGELQKGNELALPSKYVNFLYLASHYEKLKGSPEDNEQKQLFVEQHKHYLDEIIEQISEFSKRVILADANLDKVLSAYNKHRDKPIREQAENIIHLFTLTNLGAPAAFKYFDTTIDRKRYTSTKEVLDATLIHQSITGLYETRIDLSQLGGDGGGGSGSSGGTLNIEDEYRLHETSKEPDVSLGSTWLSDFPQAWAETGGMGLAVRQAPLIIPLKATSTPVSIKQYPMSQEARLGIKPHIQRLLDQGILVPCQSPWNTPLLPVKKPGTNDYRPVQDLREVNKRVEDIHPTVPNPYNLLSGLPPSHQWYTVLDLKDAFFCLRLHPTSQPLFAFEWRDPEMGISGQLTWTRLPQGFKNSPTLFNEALHRDLADFRIQHPDLILLQYVDDLLLAATSELDCQQGTRALLQTLGNLGYRASAKKAQICQKQVKYLGYLLKEGQRWLTEARKETVMGQPTPKTPRQLREFLGKAGFCRLFIPGFAEMAAPLYPLTKPGTLFNWGPDQQKAYQEIKQALLTAPALGLPDLTKPFELFVDEKQGYAKGVLTQKLGPWRRPVAYLSKKLDPVAAGWPPCLRMVAAIAVLTKDAGKLTMGQPLVILAPHAVEALVKQPPDRWLSNARMTHYQALLLDTDRVQFGPVVALNPATLLPLPEEGLQHNCLDILAEAHGTRPDLTDQPLPDADHTWYTDGSSLLQEGQRKAGAAVTTETEVIWAKALPAGTSAQRAELIALTQALKMAEGKKLNVYTDSRYAFATAHIHGEIYRRRGWLTSEGKEIKNKDEILALLKALFLPKRLSIIHCPGHQKGHSAEARGNRMADQAARKAAITETPDTSTLLIENSSPSGGSKRTADGSEFEAGKRTADGSEFEKRTADGSEFESPKKKAKVE

SEQ ID NO: 2915 - skipped

SEQ ID NO: 2916 - protein, 2113 aa, synthetic construct
MPAAKRVKLDGGDKKYSIGLDIGTNSVGWAVITDEYKVPSKKFKVLGNTDRHSIKKNLIGALLFDSGETAEATRLKRTARRRYTRRKNRICYLQEIFSNEMAKVDDSFFHRLEESFLVEEDKKHERHPIFGNIVDEVAYHEKYPTIYHLRKKLVDSTDKADLRLIYLALAHMIKFRGHFLIEGDLNPDNSDVDKLFIQLVQTYNQLFEENPINASGVDAKAILSARLSKSRRLENLIAQLPGEKKNGLFGNLIALSLGLTPNFKSNFDLAEDAKLQLSKDTYDDDLDNLLAQIGDQYADLFLAAKNLSDAILLSDILRVNTEITKAPLSASMIKRYDEHHQDLTLLKALVRQQLPEKYKEIFFDQSKNGYAGYIDGGASQEEFYKFIKPILEKMDGTEELLVKLNREDLLRKQRTFDNGSIPHQIHLGELHAILRRQEDFYPFLKDNREKIEKILTFRIPYYVGPLARGNSRFAWMTRKSEETITPWNFEEVVDKGASAQSFIERMTNFDKNLPNEKVLPKHSLLYEYFTVYNELTKVKYVTEGMRKPAFLSGEQKKAIVDLLFKTNRKVTVKQLKEDYFKKIECFDSVEISGVEDRFNASLGTYHDLLKIIKDKDFLDNEENEDILEDIVLTLTLFEDREMIEERLKTYAHLFDDKVMKQLKRRRYTGWGRLSRKLINGIRDKQSGKTILDFLKSDGFANRNFMQLIHDDSLTFKEDIQKAQVSGQGDSLHEHIANLAGSPAIKKGILQTVKVVDELVKVMGRHKPENIVIEMARENQTTQKGQKNSRERMKRIEEGIKELGSQILKEHPVENTQLQNEKLYLYYLQNGRDMYVDQELDINRLSDYDVDHIVPQSFLKDDSIDNKVLTRSDKARGKSDNVPSEEVVKKMKNYWRQLLNAKLITQRKFDNLTKAERGGLSELDKAGFIKRQLVETRQITKHVAQILDSRMNTKYDENDKLIREVKVITLKSKLVSDFRKDFQFYKVREINNYHHAHDAYLNAVVGTALIKKYPKLESEFVYGDYKVYDVRKMIAKSEQEIGKATAKYFFYSNIMNFFKTEITLANGEIRKRPLIETNGETGEIVWDKGRDFATVRKVLSMPQVNIVKKTEVQTGGFSKESILPKRNSDKLIARKKDWDPKKYGGFDSPTVAYSVLVVAKVEKGKSKKLKSVKELLGITIMERSSFEKNPIDFLEAKGYKEVKKDLIIKLPKYSLFELENGRKRMLASAGELQKGNELALPSKYVNFLYLASHYEKLKGSPEDNEQKQLFVEQHKHYLDEIIEQISEFSKRVILADANLDKVLSAYNKHRDKPIREQAENIIHLFTLTNLGAPAAFKYFDTTIDRKRYTSTKEVLDATLIHQSITGLYETRIDLSQLGGDGGGSSEAAAKGGTLNIEDEYRLHETSKEPDVSLGSTWLSDFPQAWAETGGMGLAVRQAPLIIPLKATSTPVSIKQYPMSQEARLGIKPHIQRLLDQGILVPCQSPWNTPLLPVKKPGTNDYRPVQDLREVNKRVEDIHPTVPNPYNLLSGLPPSHQWYTVLDLKDAFFCLRLHPTSQPLFAFEWRDPEMGISGQLTWTRLPQGFKNSPTLFNEALHRDLADFRIQHPDLILLQYVDDLLLAATSELDCQQGTRALLQTLGNLGYRASAKKAQICQKQVKYLGYLLKEGQRWLTEARKETVMGQPTPKTPRQLREFLGKAGFCRLFIPGFAEMAAPLYPLTKPGTLFNWGPDQQKAYQEIKQALLTAPALGLPDLTKPFELFVDEKQGYAKGVLTQKLGPWRRPVAYLSKKLDPVAAGWPPCLRMVAAIAVLTKDAGKLTMGQPLVILAPHAVEALVKQPPDRWLSNARMTHYQALLLDTDRVQFGPVVALNPATLLPLPEEGLQHNCLDILAEAHGTRPDLTDQPLPDADHTWYTDGSSLLQEGQRKAGAAVTTETEVIWAKALPAGTSAQRAELIALTQALKMAEGKKLNVYTDSRYAFATAHIHGEIYRRRGWLTSEGKEIKNKDEILALLKALFLPKRLSIIHCPGHQKGHSAEARGNRMADQAARKAAITETPDTSTLLIENSSPSGGSKRTADGSEFEAGKRTADGSEFEKRTADGSEFESPKKKAKVE

SEQ ID NO: 2917-2919 - skipped (3 entries)

SEQ ID NO: 2920 - protein, 2116 aa, synthetic construct; identical to SEQ ID NO: 2648

SEQ ID NO: 2921 - skipped

SEQ ID NO: 2922 - protein, 2116 aa, synthetic construct; identical to SEQ ID NO: 2666

SEQ ID NO: 2923 - skipped

SEQ ID NO: 2924 - protein, 2116 aa, synthetic construct
MPAAKRVKLDGGDKKYSIGLDIGTNSVGWAVITDEYKVPSKKFKVLGNTDRHSIKKNLIGALLFDSGETAEATRLKRTARRRYTRRKNRICYLQEIFSNEMAKVDDSFFHRLEESFLVEEDKKHERHPIFGNIVDEVAYHEKYPTIYHLRKKLVDSTDKADLRLIYLALAHMIKFRGHFLIEGDLNPDNSDVDKLFIQLVQTYNQLFEENPINASGVDAKAILSARLSKSRRLENLIAQLPGEKKNGLFGNLIALSLGLTPNFKSNFDLAEDAKLQLSKDTYDDDLDNLLAQIGDQYADLFLAAKNLSDAILLSDILRVNTEITKAPLSASMIKRYDEHHQDLTLLKALVRQQLPEKYKEIFFDQSKNGYAGYIDGGASQEEFYKFIKPILEKMDGTEELLVKLNREDLLRKQRTFDNGSIPHQIHLGELHAILRRQEDFYPFLKDNREKIEKILTFRIPYYVGPLARGNSRFAWMTRKSEETITPWNFEEVVDKGASAQSFIERMTNFDKNLPNEKVLPKHSLLYEYFTVYNELTKVKYVTEGMRKPAFLSGEQKKAIVDLLFKTNRKVTVKQLKEDYFKKIECFDSVEISGVEDRFNASLGTYHDLLKIIKDKDFLDNEENEDILEDIVLTLTLFEDREMIEERLKTYAHLFDDKVMKQLKRRRYTGWGRLSRKLINGIRDKQSGKTILDFLKSDGFANRNFMQLIHDDSLTFKEDIQKAQVSGQGDSLHEHIANLAGSPAIKKGILQTVKVVDELVKVMGRHKPENIVIEMARENQTTQKGQKNSRERMKRIEEGIKELGSQILKEHPVENTQLQNEKLYLYYLQNGRDMYVDQELDINRLSDYDVDHIVPQSFLKDDSIDNKVLTRSDKARGKSDNVPSEEVVKKMKNYWRQLLNAKLITQRKFDNLTKAERGGLSELDKAGFIKRQLVETRQITKHVAQILDSRMNTKYDENDKLIREVKVITLKSKLVSDFRKDFQFYKVREINNYHHAHDAYLNAVVGTALIKKYPKLESEFVYGDYKVYDVRKMIAKSEQEIGKATAKYFFYSNIMNFFKTEITLANGEIRKRPLIETNGETGEIVWDKGRDFATVRKVLSMPQVNIVKKTEVQTGGFSKESILPKRNSDKLIARKKDWDPKKYGGFDSPTVAYSVLVVAKVEKGKSKKLKSVKELLGITIMERSSFEKNPIDFLEAKGYKEVKKDLIIKLPKYSLFELENGRKRMLASAGELQKGNELALPSKYVNFLYLASHYEKLKGSPEDNEQKQLFVEQHKHYLDEIIEQISEFSKRVILADANLDKVLSAYNKHRDKPIREQAENIIHLFTLTNLGAPAAFKYFDTTIDRKRYTSTKEVLDATLIHQSITGLYETRIDLSQLGGDGGPAPEAAAKGGSGGTLNIEDEYRLHETSKEPDVSLGSTWLSDFPQAWAETGGMGLAVRQAPLIIPLKATSTPVSIKQYPMSQEARLGIKPHIQRLLDQGILVPCQSPWNTPLLPVKKPGTNDYRPVQDLREVNKRVEDIHPTVPNPYNLLSGLPPSHQWYTVLDLKDAFFCLRLHPTSQPLFAFEWRDPEMGISGQLTWTRLPQGFKNSPTLFNEALHRDLADFRIQHPDLILLQYVDDLLLAATSELDCQQGTRALLQTLGNLGYRASAKKAQICQKQVKYLGYLLKEGQRWLTEARKETVMGQPTPKTPRQLREFLGKAGFCRLFIPGFAEMAAPLYPLTKPGTLFNWGPDQQKAYQEIKQALLTAPALGLPDLTKPFELFVDEKQGYAKGVLTQKLGPWRRPVAYLSKKLDPVAAGWPPCLRMVAAIAVLTKDAGKLTMGQPLVILAPHAVEALVKQPPDRWLSNARMTHYQALLLDTDRVQFGPVVALNPATLLPLPEEGLQHNCLDILAEAHGTRPDLTDQPLPDADHTWYTDGSSLLQEGQRKAGAAVTTETEVIWAKALPAGTSAQRAELIALTQALKMAEGKKLNVYTDSRYAFATAHIHGEIYRRRGWLTSEGKEIKNKDEILALLKALFLPKRLSIIHCPGHQKGHSAEARGNRMADQAARKAAITETPDTSTLLIENSSPSGGSKRTADGSEFEAGKRTADGSEFEKRTADGSEFESPKKKAKVE

SEQ ID NO: 2925-2926 - skipped (2 entries)

SEQ ID NO: 2927 - protein, 2109 aa, synthetic construct
MPAAKRVKLDGGDKKYSIGLDIGTNSVGWAVITDEYKVPSKKFKVLGNTDRHSIKKNLIGALLFDSGETAEATRLKRTARRRYTRRKNRICYLQEIFSNEMAKVDDSFFHRLEESFLVEEDKKHERHPIFGNIVDEVAYHEKYPTIYHLRKKLVDSTDKADLRLIYLALAHMIKFRGHFLIEGDLNPDNSDVDKLFIQLVQTYNQLFEENPINASGVDAKAILSARLSKSRRLENLIAQLPGEKKNGLFGNLIALSLGLTPNFKSNFDLAEDAKLQLSKDTYDDDLDNLLAQIGDQYADLFLAAKNLSDAILLSDILRVNTEITKAPLSASMIKRYDEHHQDLTLLKALVRQQLPEKYKEIFFDQSKNGYAGYIDGGASQEEFYKFIKPILEKMDGTEELLVKLNREDLLRKQRTFDNGSIPHQIHLGELHAILRRQEDFYPFLKDNREKIEKILTFRIPYYVGPLARGNSRFAWMTRKSEETITPWNFEEVVDKGASAQSFIERMTNFDKNLPNEKVLPKHSLLYEYFTVYNELTKVKYVTEGMRKPAFLSGEQKKAIVDLLFKTNRKVTVKQLKEDYFKKIECFDSVEISGVEDRFNASLGTYHDLLKIIKDKDFLDNEENEDILEDIVLTLTLFEDREMIEERLKTYAHLFDDKVMKQLKRRRYTGWGRLSRKLINGIRDKQSGKTILDFLKSDGFANRNFMQLIHDDSLTFKEDIQKAQVSGQGDSLHEHIANLAGSPAIKKGILQTVKVVDELVKVMGRHKPENIVIEMARENQTTQKGQKNSRERMKRIEEGIKELGSQILKEHPVENTQLQNEKLYLYYLQNGRDMYVDQELDINRLSDYDVDHIVPQSFLKDDSIDNKVLTRSDKARGKSDNVPSEEVVKKMKNYWRQLLNAKLITQRKFDNLTKAERGGLSELDKAGFIKRQLVETRQITKHVAQILDSRMNTKYDENDKLIREVKVITLKSKLVSDFRKDFQFYKVREINNYHHAHDAYLNAVVGTALIKKYPKLESEFVYGDYKVYDVRKMIAKSEQEIGKATAKYFFYSNIMNFFKTEITLANGEIRKRPLIETNGETGEIVWDKGRDFATVRKVLSMPQVNIVKKTEVQTGGFSKESILPKRNSDKLIARKKDWDPKKYGGFDSPTVAYSVLVVAKVEKGKSKKLKSVKELLGITIMERSSFEKNPIDFLEAKGYKEVKKDLIIKLPKYSLFELENGRKRMLASAGELQKGNELALPSKYVNFLYLASHYEKLKGSPEDNEQKQLFVEQHKHYLDEIIEQISEFSKRVILADANLDKVLSAYNKHRDKPIREQAENIIHLFTLTNLGAPAAFKYFDTTIDRKRYTSTKEVLDATLIHQSITGLYETRIDLSQLGGDGGGGGGGGTLNIEDEYRLHETSKEPDVSLGSTWLSDFPQAWAETGGMGLAVRQAPLIIPLKATSTPVSIKQYPMSQEARLGIKPHIQRLLDQGILVPCQSPWNTPLLPVKKPGTNDYRPVQDLREVNKRVEDIHPTVPNPYNLLSGLPPSHQWYTVLDLKDAFFCLRLHPTSQPLFAFEWRDPEMGISGQLTWTRLPQGFKNSPTLFNEALHRDLADFRIQHPDLILLQYVDDLLLAATSELDCQQGTRALLQTLGNLGYRASAKKAQICQKQVKYLGYLLKEGQRWLTEARKETVMGQPTPKTPRQLREFLGKAGFCRLFIPGFAEMAAPLYPLTKPGTLFNWGPDQQKAYQEIKQALLTAPALGLPDLTKPFELFVDEKQGYAKGVLTQKLGPWRRPVAYLSKKLDPVAAGWPPCLRMVAAIAVLTKDAGKLTMGQPLVILAPHAVEALVKQPPDRWLSNARMTHYQALLLDTDRVQFGPVVALNPATLLPLPEEGLQHNCLDILAEAHGTRPDLTDQPLPDADHTWYTDGSSLLQEGQRKAGAAVTTETEVIWAKALPAGTSAQRAELIALTQALKMAEGKKLNVYTDSRYAFATAHIHGEIYRRRGWLTSEGKEIKNKDEILALLKALFLPKRLSIIHCPGHQKGHSAEARGNRMADQAARKAAITETPDTSTLLIENSSPSGGSKRTADGSEFEAGKRTADGSEFEKRTADGSEFESPKKKAKVE

SEQ ID NO: 2928 - protein, 2116 aa, synthetic construct
MPAAKRVKLDGGDKKYSIGLDIGTNSVGWAVITDEYKVPSKKFKVLGNTDRHSIKKNLIGALLFDSGETAEATRLKRTARRRYTRRKNRICYLQEIFSNEMAKVDDSFFHRLEESFLVEEDKKHERHPIFGNIVDEVAYHEKYPTIYHLRKKLVDSTDKADLRLIYLALAHMIKFRGHFLIEGDLNPDNSDVDKLFIQLVQTYNQLFEENPINASGVDAKAILSARLSKSRRLENLIAQLPGEKKNGLFGNLIALSLGLTPNFKSNFDLAEDAKLQLSKDTYDDDLDNLLAQIGDQYADLFLAAKNLSDAILLSDILRVNTEITKAPLSASMIKRYDEHHQDLTLLKALVRQQLPEKYKEIFFDQSKNGYAGYIDGGASQEEFYKFIKPILEKMDGTEELLVKLNREDLLRKQRTFDNGSIPHQIHLGELHAILRRQEDFYPFLKDNREKIEKILTFRIPYYVGPLARGNSRFAWMTRKSEETITPWNFEEVVDKGASAQSFIERMTNFDKNLPNEKVLPKHSLLYEYFTVYNELTKVKYVTEGMRKPAFLSGEQKKAIVDLLFKTNRKVTVKQLKEDYFKKIECFDSVEISGVEDRFNASLGTYHDLLKIIKDKDFLDNEENEDILEDIVLTLTLFEDREMIEERLKTYAHLFDDKVMKQLKRRRYTGWGRLSRKLINGIRDKQSGKTILDFLKSDGFANRNFMQLIHDDSLTFKEDIQKAQVSGQGDSLHEHIANLAGSPAIKKGILQTVKVVDELVKVMGRHKPENIVIEMARENQTTQKGQKNSRERMKRIEEGIKELGSQILKEHPVENTQLQNEKLYLYYLQNGRDMYVDQELDINRLSDYDVDHIVPQSFLKDDSIDNKVLTRSDKARGKSDNVPSEEVVKKMKNYWRQLLNAKLITQRKFDNLTKAERGGLSELDKAGFIKRQLVETRQITKHVAQILDSRMNTKYDENDKLIREVKVITLKSKLVSDFRKDFQFYKVREINNYHHAHDAYLNAVVGTALIKKYPKLESEFVYGDYKVYDVRKMIAKSEQEIGKATAKYFFYSNIMNFFKTEITLANGEIRKRPLIETNGETGEIVWDKGRDFATVRKVLSMPQVNIVKKTEVQTGGFSKESILPKRNSDKLIARKKDWDPKKYGGFDSPTVAYSVLVVAKVEKGKSKKLKSVKELLGITIMERSSFEKNPIDFLEAKGYKEVKKDLIIKLPKYSLFELENGRKRMLASAGELQKGNELALPSKYVNFLYLASHYEKLKGSPEDNEQKQLFVEQHKHYLDEIIEQISEFSKRVILADANLDKVLSAYNKHRDKPIREQAENIIHLFTLTNLGAPAAFKYFDTTIDRKRYTSTKEVLDATLIHQSITGLYETRIDLSQLGGDGGGGGGGSEAAAKGGTLNIEDEYRLHETSKEPDVSLGSTWLSDFPQAWAETGGMGLAVRQAPLIIPLKATSTPVSIKQYPMSQEARLGIKPHIQRLLDQGILVPCQSPWNTPLLPVKKPGTNDYRPVQDLREVNKRVEDIHPTVPNPYNLLSGLPPSHQWYTVLDLKDAFFCLRLHPTSQPLFAFEWRDPEMGISGQLTWTRLPQGFKNSPTLFNEALHRDLADFRIQHPDLILLQYVDDLLLAATSELDCQQGTRALLQTLGNLGYRASAKKAQICQKQVKYLGYLLKEGQRWLTEARKETVMGQPTPKTPRQLREFLGKAGFCRLFIPGFAEMAAPLYPLTKPGTLFNWGPDQQKAYQEIKQALLTAPALGLPDLTKPFELFVDEKQGYAKGVLTQKLGPWRRPVAYLSKKLDPVAAGWPPCLRMVAAIAVLTKDAGKLTMGQPLVILAPHAVEALVKQPPDRWLSNARMTHYQALLLDTDRVQFGPVVALNPATLLPLPEEGLQHNCLDILAEAHGTRPDLTDQPLPDADHTWYTDGSSLLQEGQRKAGAAVTTETEVIWAKALPAGTSAQRAELIALTQALKMAEGKKLNVYTDSRYAFATAHIHGEIYRRRGWLTSEGKEIKNKDEILALLKALFLPKRLSIIHCPGHQKGHSAEARGNRMADQAARKAAITETPDTSTLLIENSSPSGGSKRTADGSEFEAGKRTADGSEFEKRTADGSEFESPKKKAKVE

SEQ ID NO: 2929 - protein, 2113 aa, synthetic construct; identical to SEQ ID NO: 2700

SEQ ID NO: 2930 - protein, 2114 aa, synthetic construct; identical to SEQ ID NO: 2656

SEQ ID NO: 2931 - skipped

SEQ ID NO: 2932 - protein, 2120 aa, synthetic construct; identical to SEQ ID NO: 2623

SEQ ID NO: 2933 - protein, 2113 aa, synthetic construct; identical to SEQ ID NO: 2657

SEQ ID NO: 2934-2936 - skipped (3 entries)

SEQ ID NO: 2937 - protein, 2120 aa, synthetic construct; identical to SEQ ID NO: 2636

SEQ ID NO: 2938-2940 - skipped (3 entries)

SEQ ID NO: 2941 - protein, 2120 aa, synthetic construct; identical to SEQ ID NO: 2669

SEQ ID NO: 2942 - skipped

SEQ ID NO: 2943 - protein, 2123 aa, synthetic construct; identical to SEQ ID NO: 2612

SEQ ID NO: 2944-2947 - skipped (4 entries)

SEQ ID NO: 2948 - protein, 2114 aa, synthetic construct; identical to SEQ ID NO: 2675

SEQ ID NO: 2949 - skipped

SEQ ID NO: 2950 - protein, 2114 aa, synthetic construct; identical to SEQ ID NO: 2632

SEQ ID NO: 2951-2952 - skipped (2 entries)

SEQ ID NO: 2953 - protein, 2113 aa, synthetic construct
MPAAKRVKLDGGDKKYSIGLDIGTNSVGWAVITDEYKVPSKKFKVLGNTDRHSIKKNLIGALLFDSGETAEATRLKRTARRRYTRRKNRICYLQEIFSNEMAKVDDSFFHRLEESFLVEEDKKHERHPIFGNIVDEVAYHEKYPTIYHLRKKLVDSTDKADLRLIYLALAHMIKFRGHFLIEGDLNPDNSDVDKLFIQLVQTYNQLFEENPINASGVDAKAILSARLSKSRRLENLIAQLPGEKKNGLFGNLIALSLGLTPNFKSNFDLAEDAKLQLSKDTYDDDLDNLLAQIGDQYADLFLAAKNLSDAILLSDILRVNTEITKAPLSASMIKRYDEHHQDLTLLKALVRQQLPEKYKEIFFDQSKNGYAGYIDGGASQEEFYKFIKPILEKMDGTEELLVKLNREDLLRKQRTFDNGSIPHQIHLGELHAILRRQEDFYPFLKDNREKIEKILTFRIPYYVGPLARGNSRFAWMTRKSEETITPWNFEEVVDKGASAQSFIERMTNFDKNLPNEKVLPKHSLLYEYFTVYNELTKVKYVTEGMRKPAFLSGEQKKAIVDLLFKTNRKVTVKQLKEDYFKKIECFDSVEISGVEDRFNASLGTYHDLLKIIKDKDFLDNEENEDILEDIVLTLTLFEDREMIEERLKTYAHLFDDKVMKQLKRRRYTGWGRLSRKLINGIRDKQSGKTILDFLKSDGFANRNFMQLIHDDSLTFKEDIQKAQVSGQGDSLHEHIANLAGSPAIKKGILQTVKVVDELVKVMGRHKPENIVIEMARENQTTQKGQKNSRERMKRIEEGIKELGSQILKEHPVENTQLQNEKLYLYYLQNGRDMYVDQELDINRLSDYDVDHIVPQSFLKDDSIDNKVLTRSDKARGKSDNVPSEEVVKKMKNYWRQLLNAKLITQRKFDNLTKAERGGLSELDKAGFIKRQLVETRQITKHVAQILDSRMNTKYDENDKLIREVKVITLKSKLVSDFRKDFQFYKVREINNYHHAHDAYLNAVVGTALIKKYPKLESEFVYGDYKVYDVRKMIAKSEQEIGKATAKYFFYSNIMNFFKTEITLANGEIRKRPLIETNGETGEIVWDKGRDFATVRKVLSMPQVNIVKKTEVQTGGFSKESILPKRNSDKLIARKKDWDPKKYGGFDSPTVAYSVLVVAKVEKGKSKKLKSVKELLGITIMERSSFEKNPIDFLEAKGYKEVKKDLIIKLPKYSLFELENGRKRMLASAGELQKGNELALPSKYVNFLYLASHYEKLKGSPEDNEQKQLFVEQHKHYLDEIIEQISEFSKRVILADANLDKVLSAYNKHRDKPIREQAENIIHLFTLTNLGAPAAFKYFDTTIDRKRYTSTKEVLDATLIHQSITGLYETRIDLSQLGGDGGGGGEAAAKGGTLNIEDEYRLHETSKEPDVSLGSTWLSDFPQAWAETGGMGLAVRQAPLIIPLKATSTPVSIKQYPMSQEARLGIKPHIQRLLDQGILVPCQSPWNTPLLPVKKPGTNDYRPVQDLREVNKRVEDIHPTVPNPYNLLSGLPPSHQWYTVLDLKDAFFCLRLHPTSQPLFAFEWRDPEMGISGQLTWTRLPQGFKNSPTLFNEALHRDLADFRIQHPDLILLQYVDDLLLAATSELDCQQGTRALLQTLGNLGYRASAKKAQICQKQVKYLGYLLKEGQRWLTEARKETVMGQPTPKTPRQLREFLGKAGFCRLFIPGFAEMAAPLYPLTKPGTLFNWGPDQQKAYQEIKQALLTAPALGLPDLTKPFELFVDEKQGYAKGVLTQKLGPWRRPVAYLSKKLDPVAAGWPPCLRMVAAIAVLTKDAGKLTMGQPLVILAPHAVEALVKQPPDRWLSNARMTHYQALLLDTDRVQFGPVVALNPATLLPLPEEGLQHNCLDILAEAHGTRPDLTDQPLPDADHTWYTDGSSLLQEGQRKAGAAVTTETEVIWAKALPAGTSAQRAELIALTQALKMAEGKKLNVYTDSRYAFATAHIHGEIYRRRGWLTSEGKEIKNKDEILALLKALFLPKRLSIIHCPGHQKGHSAEARGNRMADQAARKAAITETPDTSTLLIENSSPSGGSKRTADGSEFEAGKRTADGSEFEKRTADGSEFESPKKKAKVE

SEQ ID NO: 2954-2956 - skipped (3 entries)

SEQ ID NO: 2957 - protein, 2131 aa, synthetic construct
MPAAKRVKLDGGDKKYSIGLDIGTNSVGWAVITDEYKVPSKKFKVLGNTDRHSIKKNLIGALLFDSGETAEATRLKRTARRRYTRRKNRICYLQEIFSNEMAKVDDSFFHRLEESFLVEEDKKHERHPIFGNIVDEVAYHEKYPTIYHLRKKLVDSTDKADLRLIYLALAHMIKFRGHFLIEGDLNPDNSDVDKLFIQLVQTYNQLFEENPINASGVDAKAILSARLSKSRRLENLIAQLPGEKKNGLFGNLIALSLGLTPNFKSNFDLAEDAKLQLSKDTYDDDLDNLLAQIGDQYADLFLAAKNLSDAILLSDILRVNTEITKAPLSASMIKRYDEHHQDLTLLKALVRQQLPEKYKEIFFDQSKNGYAGYIDGGASQEEFYKFIKPILEKMDGTEELLVKLNREDLLRKQRTFDNGSIPHQIHLGELHAILRRQEDFYPFLKDNREKIEKILTFRIPYYVGPLARGNSRFAWMTRKSEETITPWNFEEVVDKGASAQSFIERMTNFDKNLPNEKVLPKHSLLYEYFTVYNELTKVKYVTEGMRKPAFLSGEQKKAIVDLLFKTNRKVTVKQLKEDYFKKIECFDSVEISGVEDRFNASLGTYHDLLKIIKDKDFLDNEENEDILEDIVLTLTLFEDREMIEERLKTYAHLFDDKVMKQLKRRRYTGWGRLSRKLINGIRDKQSGKTILDFLKSDGFANRNFMQLIHDDSLTFKEDIQKAQVSGQGDSLHEHIANLAGSPAIKKGILQTVKVVDELVKVMGRHKPENIVIEMARENQTTQKGQKNSRERMKRIEEGIKELGSQILKEHPVENTQLQNEKLYLYYLQNGRDMYVDQELDINRLSDYDVDHIVPQSFLKDDSIDNKVLTRSDKARGKSDNVPSEEVVKKMKNYWRQLLNAKLITQRKFDNLTKAERGGLSELDKAGFIKRQLVETRQITKHVAQILDSRMNTKYDENDKLIREVKVITLKSKLVSDFRKDFQFYKVREINNYHHAHDAYLNAVVGTALIKKYPKLESEFVYGDYKVYDVRKMIAKSEQEIGKATAKYFFYSNIMNFFKTEITLANGEIRKRPLIETNGETGEIVWDKGRDFATVRKVLSMPQVNIVKKTEVQTGGFSKESILPKRNSDKLIARKKDWDPKKYGGFDSPTVAYSVLVVAKVEKGKSKKLKSVKELLGITIMERSSFEKNPIDFLEAKGYKEVKKDLIIKLPKYSLFELENGRKRMLASAGELQKGNELALPSKYVNFLYLASHYEKLKGSPEDNEQKQLFVEQHKHYLDEIIEQISEFSKRVILADANLDKVLSAYNKHRDKPIREQAENIIHLFTLTNLGAPAAFKYFDTTIDRKRYTSTKEVLDATLIHQSITGLYETRIDLSQLGGDGGAEAAAKEAAAKEAAAKEAAAKALEAEAAAKEAAAKEAAAKEAAAKAGGTLNIEDEHRLHETSKEPDVSLGSTWLSDFPQAWAETGGMGLAVRQAPLIIPLKATSTPVSIKQYPMSQEARLGIKPHIQRLLDQGILVPCQSPWNTPLLPVKKPGTNDYRPVQDLREVNKRVEDIHPTVPNPYNLLSGLPPSHQWYTVLDLKDAFFCLRLHPTSQPLFAFEWRDPEMGISGQLTWTRLPQGFKNSPTLFDEALHRDLADFRIQHPDLILLQYVDDLLLAATSELDCQQGTRALLQTLGNLGYRASAKKAQICQKQVKYLGYLLKEGQRWLTEARKETVMGQPTPKTPRQLREFLGTAGFCRLWIPGFAEMAAPLYPLTKTGTLFNWGPDQQKAYQEIKQALLTAPALGLPDLTKPFELFVDEKQGYAKGVLTQKLGPWRRPVAYLSKKLDPVAAGWPPCLRMVAAIAVLTKDAGKLTMGQPLVILAPHAVEALVKQPPDRWLSNARMTHYQALLLDTDRVQFGPVVALNPATLLPLPEEGLQHNCLDILAEAHGTRPDLTDQPLPDADHTWYTDGSSLLQEGQRKAGAAVTTETEVIWAKALPAGTSAQRAELIALTQALKMAEGKKLNVYTDSRYAFATAHIHGEIYRRRGLLTSEGKEIKNKDEILALLKALFLPKRLSIIHCPGHQKGHSAEARGNRMADQAARKAAITETPDTSTLLAGKRTADGSEFEKRTADGSEFESPKKKAKVE

SEQ ID NO: 2958-2964 - skipped (7 entries)

SEQ ID NO: 2965 - protein, 2103 aa, synthetic construct
MPAAKRVKLDGGDKKYSIGLDIGTNSVGWAVITDEYKVPSKKFKVLGNTDRHSIKKNLIGALLFDSGETAEATRLKRTARRRYTRRKNRICYLQEIFSNEMAKVDDSFFHRLEESFLVEEDKKHERHPIFGNIVDEVAYHEKYPTIYHLRKKLVDSTDKADLRLIYLALAHMIKFRGHFLIEGDLNPDNSDVDKLFIQLVQTYNQLFEENPINASGVDAKAILSARLSKSRRLENLIAQLPGEKKNGLFGNLIALSLGLTPNFKSNFDLAEDAKLQLSKDTYDDDLDNLLAQIGDQYADLFLAAKNLSDAILLSDILRVNTEITKAPLSASMIKRYDEHHQDLTLLKALVRQQLPEKYKEIFFDQSKNGYAGYIDGGASQEEFYKFIKPILEKMDGTEELLVKLNREDLLRKQRTFDNGSIPHQIHLGELHAILRRQEDFYPFLKDNREKIEKILTFRIPYYVGPLARGNSRFAWMTRKSEETITPWNFEEVVDKGASAQSFIERMTNFDKNLPNEKVLPKHSLLYEYFTVYNELTKVKYVTEGMRKPAFLSGEQKKAIVDLLFKTNRKVTVKQLKEDYFKKIECFDSVEISGVEDRFNASLGTYHDLLKIIKDKDFLDNEENEDILEDIVLTLTLFEDREMIEERLKTYAHLFDDKVMKQLKRRRYTGWGRLSRKLINGIRDKQSGKTILDFLKSDGFANRNFMQLIHDDSLTFKEDIQKAQVSGQGDSLHEHIANLAGSPAIKKGILQTVKVVDELVKVMGRHKPENIVIEMARENQTTQKGQKNSRERMKRIEEGIKELGSQILKEHPVENTQLQNEKLYLYYLQNGRDMYVDQELDINRLSDYDVDHIVPQSFLKDDSIDNKVLTRSDKARGKSDNVPSEEVVKKMKNYWRQLLNAKLITQRKFDNLTKAERGGLSELDKAGFIKRQLVETRQITKHVAQILDSRMNTKYDENDKLIREVKVITLKSKLVSDFRKDFQFYKVREINNYHHAHDAYLNAVVGTALIKKYPKLESEFVYGDYKVYDVRKMIAKSEQEIGKATAKYFFYSNIMNFFKTEITLANGEIRKRPLIETNGETGEIVWDKGRDFATVRKVLSMPQVNIVKKTEVQTGGFSKESILPKRNSDKLIARKKDWDPKKYGGFDSPTVAYSVLVVAKVEKGKSKKLKSVKELLGITIMERSSFEKNPIDFLEAKGYKEVKKDLIIKLPKYSLFELENGRKRMLASAGELQKGNELALPSKYVNFLYLASHYEKLKGSPEDNEQKQLFVEQHKHYLDEIIEQISEFSKRVILADANLDKVLSAYNKHRDKPIREQAENIIHLFTLTNLGAPAAFKYFDTTIDRKRYTSTKEVLDATLIHQSITGLYETRIDLSQLGGDGGGSSGSSGSSGSSGSSGSSGGTLNIEDEHRLHETSKEPDVSLGSTWLSDFPQAWAETGGMGLAVRQAPLIIPLKATSTPVSIKQYPMSQEARLGIKPHIQRLLDQGILVPCQSPWNTPLLPVKKPGTNDYRPVQDLREVNKRVEDIHPTVPNPYNLLSGLPPSHQWYTVLDLKDAFFCLRLHPTSQPLFAFEWRDPEMGISGQLTWTRLPQGFKNSPTLFNEALHRDLADFRIQHPDLILLQYVDDLLLAATSELDCQQGTRALLQTLGNLGYRASAKKAQICQKQVKYLGYLLKEGQRWLTEARKETVMGQPTPKTPRQLREFLGTAGFCRLWIPGFAEMAAPLYPLTKPGTLFNWGPDQQKAYQEIKQALLTAPALGLPDLTKPFELFVDEKQGYAKGVLTQKLGPWRRPVAYLSKKLDPVAAGWPPCLRMVAAIAVLTKDAGKLTMGQPLVILAPHAVEALVKQPPDRWLSNARMTHYQALLLDTDRVQFGPVVALNPATLLPLPEEGLQHNCLDILAEAHGTRPDLTDQPLPDADHTWYTDGSSLLQEGQRKAGAAVTTETEVIWAKALPAGTSAQRAELIALTQALKMAEGKKLNVYTDSRYAFATAHIHGEIYRRRGWLTSEGKEIKNKDEILALLKALFLPKRLSIIHCPGHQKGHSAEARGNRMADQAARKAAITETPDTSTLLAGKRTADGSEFEKRTADGSEFESPKKKAKVE

SEQ ID NO: 2966 - protein, 2096 aa, synthetic construct; identical to SEQ ID NO: 2713

SEQ ID NO: 2967 - protein, 2091 aa, synthetic construct
MPAAKRVKLDGGDKKYSIGLDIGTNSVGWAVITDEYKVPSKKFKVLGNTDRHSIKKNLIGALLFDSGETAEATRLKRTARRRYTRRKNRICYLQEIFSNEMAKVDDSFFHRLEESFLVEEDKKHERHPIFGNIVDEVAYHEKYPTIYHLRKKLVDSTDKADLRLIYLALAHMIKFRGHFLIEGDLNPDNSDVDKLFIQLVQTYNQLFEENPINASGVDAKAILSARLSKSRRLENLIAQLPGEKKNGLFGNLIALSLGLTPNFKSNFDLAEDAKLQLSKDTYDDDLDNLLAQIGDQYADLFLAAKNLSDAILLSDILRVNTEITKAPLSASMIKRYDEHHQDLTLLKALVRQQLPEKYKEIFFDQSKNGYAGYIDGGASQEEFYKFIKPILEKMDGTEELLVKLNREDLLRKQRTFDNGSIPHQIHLGELHAILRRQEDFYPFLKDNREKIEKILTFRIPYYVGPLARGNSRFAWMTRKSEETITPWNFEEVVDKGASAQSFIERMTNFDKNLPNEKVLPKHSLLYEYFTVYNELTKVKYVTEGMRKPAFLSGEQKKAIVDLLFKTNRKVTVKQLKEDYFKKIECFDSVEISGVEDRFNASLGTYHDLLKIIKDKDFLDNEENEDILEDIVLTLTLFEDREMIEERLKTYAHLFDDKVMKQLKRRRYTGWGRLSRKLINGIRDKQSGKTILDFLKSDGFANRNFMQLIHDDSLTFKEDIQKAQVSGQGDSLHEHIANLAGSPAIKKGILQTVKVVDELVKVMGRHKPENIVIEMARENQTTQKGQKNSRERMKRIEEGIKELGSQILKEHPVENTQLQNEKLYLYYLQNGRDMYVDQELDINRLSDYDVDHIVPQSFLKDDSIDNKVLTRSDKARGKSDNVPSEEVVKKMKNYWRQLLNAKLITQRKFDNLTKAERGGLSELDKAGFIKRQLVETRQITKHVAQILDSRMNTKYDENDKLIREVKVITLKSKLVSDFRKDFQFYKVREINNYHHAHDAYLNAVVGTALIKKYPKLESEFVYGDYKVYDVRKMIAKSEQEIGKATAKYFFYSNIMNFFKTEITLANGEIRKRPLIETNGETGEIVWDKGRDFATVRKVLSMPQVNIVKKTEVQTGGFSKESILPKRNSDKLIARKKDWDPKKYGGFDSPTVAYSVLVVAKVEKGKSKKLKSVKELLGITIMERSSFEKNPIDFLEAKGYKEVKKDLIIKLPKYSLFELENGRKRMLASAGELQKGNELALPSKYVNFLYLASHYEKLKGSPEDNEQKQLFVEQHKHYLDEIIEQISEFSKRVILADANLDKVLSAYNKHRDKPIREQAENIIHLFTLTNLGAPAAFKYFDTTIDRKRYTSTKEVLDATLIHQSITGLYETRIDLSQLGGDGGGSSGGGGGTLNIEDEHRLHETSKEPDVSLGSTWLSDFPQAWAETGGMGLAVRQAPLIIPLKATSTPVSIKQYPMSQEARLGIKPHIQRLLDQGILVPCQSPWNTPLLPVKKPGTNDYRPVQDLREVNKRVEDIHPTVPNPYNLLSGLPPSHQWYTVLDLKDAFFCLRLHPTSQPLFAFEWRDPEMGISGQLTWTRLPQGFKNSPTLFNEALHRDLADFRIQHPDLILLQYVDDLLLAATSELDCQQGTRALLQTLGNLGYRASAKKAQICQKQVKYLGYLLKEGQRWLTEARKETVMGQPTPKTPRQLREFLGTAGFCRLWIPGFAEMAAPLYPLTKPGTLFNWGPDQQKAYQEIKQALLTAPALGLPDLTKPFELFVDEKQGYAKGVLTQKLGPWRRPVAYLSKKLDPVAAGWPPCLRMVAAIAVLTKDAGKLTMGQPLVILAPHAVEALVKQPPDRWLSNARMTHYQALLLDTDRVQFGPVVALNPATLLPLPEEGLQHNCLDILAEAHGTRPDLTDQPLPDADHTWYTDGSSLLQEGQRKAGAAVTTETEVIWAKALPAGTSAQRAELIALTQALKMAEGKKLNVYTDSRYAFATAHIHGEIYRRRGWLTSEGKEIKNKDEILALLKALFLPKRLSIIHCPGHQKGHSAEARGNRMADQAARKAAITETPDTSTLLAGKRTADGSEFEKRTADGSEFESPKKKAKVE

SEQ ID NO: 2968 - protein, 2105 aa, synthetic construct; identical to SEQ ID NO: 2771

SEQ ID NO: 2969 - protein, 2096 aa, synthetic construct; identical to SEQ ID NO: 2753

SEQ ID NO: 2970 - skipped

SEQ ID NO: 2971 - protein, 2093 aa, synthetic construct; identical to SEQ ID NO: 2724

SEQ ID NO: 2972 - protein, 2131 aa, synthetic construct; identical to SEQ ID NO: 2711

SEQ ID NO: 2973-2975 - skipped (3 entries)

SEQ ID NO: 2976 - protein, 2096 aa, synthetic construct; identical to SEQ ID NO: 2723

SEQ ID NO: 2977-2978 - skipped (2 entries)

SEQ ID NO: 2979 - protein, 2094 aa, synthetic construct
MPAAKRVKLDGGDKKYSIGLDIGTNSVGWAVITDEYKVPSKKFKVLGNTDRHSIKKNLIGALLFDSGETAEATRLKRTARRRYTRRKNRICYLQEIFSNEMAKVDDSFFHRLEESFLVEEDKKHERHPIFGNIVDEVAYHEKYPTIYHLRKKLVDSTDKADLRLIYLALAHMIKFRGHFLIEGDLNPDNSDVDKLFIQLVQTYNQLFEENPINASGVDAKAILSARLSKSRRLENLIAQLPGEKKNGLFGNLIALSLGLTPNFKSNFDLAEDAKLQLSKDTYDDDLDNLLAQIGDQYADLFLAAKNLSDAILLSDILRVNTEITKAPLSASMIKRYDEHHQDLTLLKALVRQQLPEKYKEIFFDQSKNGYAGYIDGGASQEEFYKFIKPILEKMDGTEELLVKLNREDLLRKQRTFDNGSIPHQIHLGELHAILRRQEDFYPFLKDNREKIEKILTFRIPYYVGPLARGNSRFAWMTRKSEETITPWNFEEVVDKGASAQSFIERMTNFDKNLPNEKVLPKHSLLYEYFTVYNELTKVKYVTEGMRKPAFLSGEQKKAIVDLLFKTNRKVTVKQLKEDYFKKIECFDSVEISGVEDRFNASLGTYHDLLKIIKDKDFLDNEENEDILEDIVLTLTLFEDREMIEERLKTYAHLFDDKVMKQLKRRRYTGWGRLSRKLINGIRDKQSGKTILDFLKSDGFANRNFMQLIHDDSLTFKEDIQKAQVSGQGDSLHEHIANLAGSPAIKKGILQTVKVVDELVKVMGRHKPENIVIEMARENQTTQKGQKNSRERMKRIEEGIKELGSQILKEHPVENTQLQNEKLYLYYLQNGRDMYVDQELDINRLSDYDVDHIVPQSFLKDDSIDNKVLTRSDKARGKSDNVPSEEVVKKMKNYWRQLLNAKLITQRKFDNLTKAERGGLSELDKAGFIKRQLVETRQITKHVAQILDSRMNTKYDENDKLIREVKVITLKSKLVSDFRKDFQFYKVREINNYHHAHDAYLNAVVGTALIKKYPKLESEFVYGDYKVYDVRKMIAKSEQEIGKATAKYFFYSNIMNFFKTEITLANGEIRKRPLIETNGETGEIVWDKGRDFATVRKVLSMPQVNIVKKTEVQTGGFSKESILPKRNSDKLIARKKDWDPKKYGGFDSPTVAYSVLVVAKVEKGKSKKLKSVKELLGITIMERSSFEKNPIDFLEAKGYKEVKKDLIIKLPKYSLFELENGRKRMLASAGELQKGNELALPSKYVNFLYLASHYEKLKGSPEDNEQKQLFVEQHKHYLDEIIEQISEFSKRVILADANLDKVLSAYNKHRDKPIREQAENIIHLFTLTNLGAPAAFKYFDTTIDRKRYTSTKEVLDATLIHQSITGLYETRIDLSQLGGDGGGGSGSSGGGGGTLNIEDEHRLHETSKEPDVSLGSTWLSDFPQAWAETGGMGLAVRQAPLIIPLKATSTPVSIKQYPMSQEARLGIKPHIQRLLDQGILVPCQSPWNTPLLPVKKPGTNDYRPVQDLREVNKRVEDIHPTVPNPYNLLSGLPPSHQWYTVLDLKDAFFCLRLHPTSQPLFAFEWRDPEMGISGQLTWTRLPQGFKNSPTLFNEALHRDLADFRIQHPDLILLQYVDDLLLAATSELDCQQGTRALLQTLGNLGYRASAKKAQICQKQVKYLGYLLKEGQRWLTEARKETVMGQPTPKTPRQLREFLGTAGFCRLWIPGFAEMAAPLYPLTKPGTLFNWGPDQQKAYQEIKQALLTAPALGLPDLTKPFELFVDEKQGYAKGVLTQKLGPWRRPVAYLSKKLDPVAAGWPPCLRMVAAIAVLTKDAGKLTMGQPLVILAPHAVEALVKQPPDRWLSNARMTHYQALLLDTDRVQFGPVVALNPATLLPLPEEGLQHNCLDILAEAHGTRPDLTDQPLPDADHTWYTDGSSLLQEGQRKAGAAVTTETEVIWAKALPAGTSAQRAELIALTQALKMAEGKKLNVYTDSRYAFATAHIHGEIYRRRGWLTSEGKEIKNKDEILALLKALFLPKRLSIIHCPGHQKGHSAEARGNRMADQAARKAAITETPDTSTLLAGKRTADGSEFEKRTADGSEFESPKKKAKVE

SEQ ID NO: 2980-2981 - skipped (2 entries)

SEQ ID NO: 2982 - protein, 2093 aa, synthetic construct; identical to SEQ ID NO: 2726

SEQ ID NO: 2983 - protein, 2115 aa, synthetic construct; identical to SEQ ID NO: 2741

SEQ ID NO: 2984-2986 - skipped (3 entries)

SEQ ID NO: 2987 - protein, 2096 aa, synthetic construct; identical to SEQ ID NO: 2776

SEQ ID NO: 2988-2989 - skipped (2 entries)

SEQ ID NO: 2990 - protein, 2096 aa, synthetic construct; identical to SEQ ID NO: 2764

SEQ ID NO: 2991 - protein, 2110 aa, synthetic construct; identical to SEQ ID NO: 2716

SEQ ID NO: 2992-2994 - skipped (3 entries)

SEQ ID NO: 2995 - protein, 2097 aa, synthetic construct
MPAAKRVKLDGGDKKYSIGLDIGTNSVGWAVITDEYKVPSKKFKVLGNTDRHSIKKNLIGALLFDSGETAEATRLKRTARRRYTRRKNRICYLQEIFSNEMAKVDDSFFHRLEESFLVEEDKKHERHPIFGNIVDEVAYHEKYPTIYHLRKKLVDSTDKADLRLIYLALAHMIKFRGHFLIEGDLNPDNSDVDKLFIQLVQTYNQLFEENPINASGVDAKAILSARLSKSRRLENLIAQLPGEKKNGLFGNLIALSLGLTPNFKSNFDLAEDAKLQLSKDTYDDDLDNLLAQIGDQYADLFLAAKNLSDAILLSDILRVNTEITKAPLSASMIKRYDEHHQDLTLLKALVRQQLPEKYKEIFFDQSKNGYAGYIDGGASQEEFYKFIKPILEKMDGTEELLVKLNREDLLRKQRTFDNGSIPHQIHLGELHAILRRQEDFYPFLKDNREKIEKILTFRIPYYVGPLARGNSRFAWMTRKSEETITPWNFEEVVDKGASAQSFIERMTNFDKNLPNEKVLPKHSLLYEYFTVYNELTKVKYVTEGMRKPAFLSGEQKKAIVDLLFKTNRKVTVKQLKEDYFKKIECFDSVEISGVEDRFNASLGTYHDLLKIIKDKDFLDNEENEDILEDIVLTLTLFEDREMIEERLKTYAHLFDDKVMKQLKRRRYTGWGRLSRKLINGIRDKQSGKTILDFLKSDGFANRNFMQLIHDDSLTFKEDIQKAQVSGQGDSLHEHIANLAGSPAIKKGILQTVKVVDELVKVMGRHKPENIVIEMARENQTTQKGQKNSRERMKRIEEGIKELGSQILKEHPVENTQLQNEKLYLYYLQNGRDMYVDQELDINRLSDYDVDHIVPQSFLKDDSIDNKVLTRSDKARGKSDNVPSEEVVKKMKNYWRQLLNAKLITQRKFDNLTKAERGGLSELDKAGFIKRQLVETRQITKHVAQILDSRMNTKYDENDKLIREVKVITLKSKLVSDFRKDFQFYKVREINNYHHAHDAYLNAVVGTALIKKYPKLESEFVYGDYKVYDVRKMIAKSEQEIGKATAKYFFYSNIMNFFKTEITLANGEIRKRPLIETNGETGEIVWDKGRDFATVRKVLSMPQVNIVKKTEVQTGGFSKESILPKRNSDKLIARKKDWDPKKYGGFDSPTVAYSVLVVAKVEKGKSKKLKSVKELLGITIMERSSFEKNPIDFLEAKGYKEVKKDLIIKLPKYSLFELENGRKRMLASAGELQKGNELALPSKYVNFLYLASHYEKLKGSPEDNEQKQLFVEQHKHYLDEIIEQISEFSKRVILADANLDKVLSAYNKHRDKPIREQAENIIHLFTLTNLGAPAAFKYFDTTIDRKRYTSTKEVLDATLIHQSITGLYETRIDLSQLGGDGGGSAGSAAGSGEFGGTLNIEDEHRLHETSKEPDVSLGSTWLSDFPQAWAETGGMGLAVRQAPLIIPLKATSTPVSIKQYPMSQEARLGIKPHIQRLLDQGILVPCQSPWNTPLLPVKKPGTNDYRPVQDLREVNKRVEDIHPTVPNPYNLLSGLPPSHQWYTVLDLKDAFFCLRLHPTSQPLFAFEWRDPEMGISGQLTWTRLPQGFKNSPTLFNEALHRDLADFRIQHPDLILLQYVDDLLLAATSELDCQQGTRALLQTLGNLGYRASAKKAQICQKQVKYLGYLLKEGQRWLTEARKETVMGQPTPKTPRQLREFLGTAGFCRLWIPGFAEMAAPLYPLTKPGTLFNWGPDQQKAYQEIKQALLTAPALGLPDLTKPFELFVDEKQGYAKGVLTQKLGPWRRPVAYLSKKLDPVAAGWPPCLRMVAAIAVLTKDAGKLTMGQPLVILAPHAVEALVKQPPDRWLSNARMTHYQALLLDTDRVQFGPVVALNPATLLPLPEEGLQHNCLDILAEAHGTRPDLTDQPLPDADHTWYTDGSSLLQEGQRKAGAAVTTETEVIWAKALPAGTSAQRAELIALTQALKMAEGKKLNVYTDSRYAFATAHIHGEIYRRRGWLTSEGKEIKNKDEILALLKALFLPKRLSIIHCPGHQKGHSAEARGNRMADQAARKAAITETPDTSTLLAGKRTADGSEFEKRTADGSEFESPKKKAKVE

SEQ ID NO: 2996-2998 - skipped (3 entries)

SEQ ID NO: 2999 - protein, 2096 aa, synthetic construct; identical to SEQ ID NO: 2719

SEQ ID NO: 3000-3006 - skipped (7 entries)

SEQ ID NO: 3007 - protein, 2096 aa, synthetic construct; identical to SEQ ID NO: 2748

SEQ ID NO: 3008-3013 - skipped (6 entries)

SEQ ID NO: 3014 - protein, 2096 aa, synthetic construct; identical to SEQ ID NO: 2714

SEQ ID NO: 3015 - protein, 2093 aa, synthetic construct; identical to SEQ ID NO: 2718

SEQ ID NO: 3016-3017 - skipped (2 entries)

SEQ ID NO: 3018 - protein, 2096 aa, synthetic construct; identical to SEQ ID NO: 2721

SEQ ID NO: 3019-3025 - skipped (7 entries)

SEQ ID NO: 3026 - protein, 2094 aa, synthetic construct; identical to SEQ ID NO: 2715

SEQ ID NO: 3027-3034 - skipped (8 entries)

SEQ ID NO: 3035 - protein, 2103 aa, synthetic construct
MPAAKRVKLDGGDKKYSIGLDIGTNSVGWAVITDEYKVPSKKFKVLGNTDRHSIKKNLIGALLFDSGETAEATRLKRTARRRYTRRKNRICYLQEIFSNEMAKVDDSFFHRLEESFLVEEDKKHERHPIFGNIVDEVAYHEKYPTIYHLRKKLVDSTDKADLRLIYLALAHMIKFRGHFLIEGDLNPDNSDVDKLFIQLVQTYNQLFEENPINASGVDAKAILSARLSKSRRLENLIAQLPGEKKNGLFGNLIALSLGLTPNFKSNFDLAEDAKLQLSKDTYDDDLDNLLAQIGDQYADLFLAAKNLSDAILLSDILRVNTEITKAPLSASMIKRYDEHHQDLTLLKALVRQQLPEKYKEIFFDQSKNGYAGYIDGGASQEEFYKFIKPILEKMDGTEELLVKLNREDLLRKQRTFDNGSIPHQIHLGELHAILRRQEDFYPFLKDNREKIEKILTFRIPYYVGPLARGNSRFAWMTRKSEETITPWNFEEVVDKGASAQSFIERMTNFDKNLPNEKVLPKHSLLYEYFTVYNELTKVKYVTEGMRKPAFLSGEQKKAIVDLLFKTNRKVTVKQLKEDYFKKIECFDSVEISGVEDRFNASLGTYHDLLKIIKDKDFLDNEENEDILEDIVLTLTLFEDREMIEERLKTYAHLFDDKVMKQLKRRRYTGWGRLSRKLINGIRDKQSGKTILDFLKSDGFANRNFMQLIHDDSLTFKEDIQKAQVSGQGDSLHEHIANLAGSPAIKKGILQTVKVVDELVKVMGRHKPENIVIEMARENQTTQKGQKNSRERMKRIEEGIKELGSQILKEHPVENTQLQNEKLYLYYLQNGRDMYVDQELDINRLSDYDVDHIVPQSFLKDDSIDNKVLTRSDKARGKSDNVPSEEVVKKMKNYWRQLLNAKLITQRKFDNLTKAERGGLSELDKAGFIKRQLVETRQITKHVAQILDSRMNTKYDENDKLIREVKVITLKSKLVSDFRKDFQFYKVREINNYHHAHDAYLNAVVGTALIKKYPKLESEFVYGDYKVYDVRKMIAKSEQEIGKATAKYFFYSNIMNFFKTEITLANGEIRKRPLIETNGETGEIVWDKGRDFATVRKVLSMPQVNIVKKTEVQTGGFSKESILPKRNSDKLIARKKDWDPKKYGGFDSPTVAYSVLVVAKVEKGKSKKLKSVKELLGITIMERSSFEKNPIDFLEAKGYKEVKKDLIIKLPKYSLFELENGRKRMLASAGELQKGNELALPSKYVNFLYLASHYEKLKGSPEDNEQKQLFVEQHKHYLDEIIEQISEFSKRVILADANLDKVLSAYNKHRDKPIREQAENIIHLFTLTNLGAPAAFKYFDTTIDRKRYTSTKEVLDATLIHQSITGLYETRIDLSQLGGDGGGGSGGSGGSGGSGGSGGSGGTLNIEDEHRLHETSKEPDVSLGSTWLSDFPQAWAETGGMGLAVRQAPLIIPLKATSTPVSIKQYPMSQEARLGIKPHIQRLLDQGILVPCQSPWNTPLLPVKKPGTNDYRPVQDLREVNKRVEDIHPTVPNPYNLLSGLPPSHQWYTVLDLKDAFFCLRLHPTSQPLFAFEWRDPEMGISGQLTWTRLPQGFKNSPTLFNEALHRDLADFRIQHPDLILLQYVDDLLLAATSELDCQQGTRALLQTLGNLGYRASAKKAQICQKQVKYLGYLLKEGQRWLTEARKETVMGQPTPKTPRQLREFLGKAGFCRLFIPGFAEMAAPLYPLTKPGTLFNWGPDQQKAYQEIKQALLTAPALGLPDLTKPFELFVDEKQGYAKGVLTQKLGPWRRPVAYLSKKLDPVAAGWPPCLRMVAAIAVLTKDAGKLTMGQPLVILAPHAVEALVKQPPDRWLSNARMTHYQALLLDTDRVQFGPVVALNPATLLPLPEEGLQHNCLDILAEAHGTRPDLTDQPLPDADHTWYTDGSSLLQEGQRKAGAAVTTETEVIWAKALPAGTSAQRAELIALTQALKMAEGKKLNVYTDSRYAFATAHIHGEIYRRRGWLTSEGKEIKNKDEILALLKALFLPKRLSIIHCPGHQKGHSAEARGNRMADQAARKAAITETPDTSTLLAGKRTADGSEFEKRTADGSEFESPKKKAKVE

SEQ ID NO: 3036 - protein, 2105 aa, synthetic construct; identical to SEQ ID NO: 2844

SEQ ID NO: 3037 - protein, 2088 aa, synthetic construct; identical to SEQ ID NO: 2812

SEQ ID NO: 3038 - skipped

SEQ ID NO: 3039 - protein, 2097 aa, synthetic construct; identical to SEQ ID NO: 2795

SEQ ID NO: 3040 - protein, 2096 aa, synthetic construct; identical to SEQ ID NO: 2831

SEQ ID NO: 3041 - protein, 2095 aa, synthetic construct; identical to SEQ ID NO: 2845

SEQ ID NO: 3042 - protein, 2094 aa, synthetic construct; identical to SEQ ID NO: 2818

SEQ ID NO: 3043 - protein, 2110 aa, synthetic construct; identical to SEQ ID NO: 2803

SEQ ID NO: 3044 - protein, 2091 aa, synthetic construct
MPAAKRVKLDGGDKKYSIGLDIGTNSVGWAVITDEYKVPSKKFKVLGNTDRHSIKKNLIGALLFDSGETAEATRLKRTARRRYTRRKNRICYLQEIFSNEMAKVDDSFFHRLEESFLVEEDKKHERHPIFGNIVDEVAYHEKYPTIYHLRKKLVDSTDKADLRLIYLALAHMIKFRGHFLIEGDLNPDNSDVDKLFIQLVQTYNQLFEENPINASGVDAKAILSARLSKSRRLENLIAQLPGEKKNGLFGNLIALSLGLTPNFKSNFDLAEDAKLQLSKDTYDDDLDNLLAQIGDQYADLFLAAKNLSDAILLSDILRVNTEITKAPLSASMIKRYDEHHQDLTLLKALVRQQLPEKYKEIFFDQSKNGYAGYIDGGASQEEFYKFIKPILEKMDGTEELLVKLNREDLLRKQRTFDNGSIPHQIHLGELHAILRRQEDFYPFLKDNREKIEKILTFRIPYYVGPLARGNSRFAWMTRKSEETITPWNFEEVVDKGASAQSFIERMTNFDKNLPNEKVLPKHSLLYEYFTVYNELTKVKYVTEGMRKPAFLSGEQKKAIVDLLFKTNRKVTVKQLKEDYFKKIECFDSVEISGVEDRFNASLGTYHDLLKIIKDKDFLDNEENEDILEDIVLTLTLFEDREMIEERLKTYAHLFDDKVMKQLKRRRYTGWGRLSRKLINGIRDKQSGKTILDFLKSDGFANRNFMQLIHDDSLTFKEDIQKAQVSGQGDSLHEHIANLAGSPAIKKGILQTVKVVDELVKVMGRHKPENIVIEMARENQTTQKGQKNSRERMKRIEEGIKELGSQILKEHPVENTQLQNEKLYLYYLQNGRDMYVDQELDINRLSDYDVDHIVPQSFLKDDSIDNKVLTRSDKARGKSDNVPSEEVVKKMKNYWRQLLNAKLITQRKFDNLTKAERGGLSELDKAGFIKRQLVETRQITKHVAQILDSRMNTKYDENDKLIREVKVITLKSKLVSDFRKDFQFYKVREINNYHHAHDAYLNAVVGTALIKKYPKLESEFVYGDYKVYDVRKMIAKSEQEIGKATAKYFFYSNIMNFFKTEITLANGEIRKRPLIETNGETGEIVWDKGRDFATVRKVLSMPQVNIVKKTEVQTGGFSKESILPKRNSDKLIARKKDWDPKKYGGFDSPTVAYSVLVVAKVEKGKSKKLKSVKELLGITIMERSSFEKNPIDFLEAKGYKEVKKDLIIKLPKYSLFELENGRKRMLASAGELQKGNELALPSKYVNFLYLASHYEKLKGSPEDNEQKQLFVEQHKHYLDEIIEQISEFSKRVILADANLDKVLSAYNKHRDKPIREQAENIIHLFTLTNLGAPAAFKYFDTTIDRKRYTSTKEVLDATLIHQSITGLYETRIDLSQLGGDGGGGGGGGGGTLNIEDEHRLHETSKEPDVSLGSTWLSDFPQAWAETGGMGLAVRQAPLIIPLKATSTPVSIKQYPMSQEARLGIKPHIQRLLDQGILVPCQSPWNTPLLPVKKPGTNDYRPVQDLREVNKRVEDIHPTVPNPYNLLSGLPPSHQWYTVLDLKDAFFCLRLHPTSQPLFAFEWRDPEMGISGQLTWTRLPQGFKNSPTLFNEALHRDLADFRIQHPDLILLQYVDDLLLAATSELDCQQGTRALLQTLGNLGYRASAKKAQICQKQVKYLGYLLKEGQRWLTEARKETVMGQPTPKTPRQLREFLGKAGFCRLFIPGFAEMAAPLYPLTKPGTLFNWGPDQQKAYQEIKQALLTAPALGLPDLTKPFELFVDEKQGYAKGVLTQKLGPWRRPVAYLSKKLDPVAAGWPPCLRMVAAIAVLTKDAGKLTMGQPLVILAPHAVEALVKQPPDRWLSNARMTHYQALLLDTDRVQFGPVVALNPATLLPLPEEGLQHNCLDILAEAHGTRPDLTDQPLPDADHTWYTDGSSLLQEGQRKAGAAVTTETEVIWAKALPAGTSAQRAELIALTQALKMAEGKKLNVYTDSRYAFATAHIHGEIYRRRGWLTSEGKEIKNKDEILALLKALFLPKRLSIIHCPGHQKGHSAEARGNRMADQAARKAAITETPDTSTLLAGKRTADGSEFEKRTADGSEFESPKKKAKVE

SEQ ID NO: 3045 - protein, 2096 aa, synthetic construct
MPAAKRVKLDGGDKKYSIGLDIGTNSVGWAVITDEYKVPSKKFKVLGNTDRHSIKKNLIGALLFDSGETAEATRLKRTARRRYTRRKNRICYLQEIFSNEMAKVDDSFFHRLEESFLVEEDKKHERHPIFGNIVDEVAYHEKYPTIYHLRKKLVDSTDKADLRLIYLALAHMIKFRGHFLIEGDLNPDNSDVDKLFIQLVQTYNQLFEENPINASGVDAKAILSARLSKSRRLENLIAQLPGEKKNGLFGNLIALSLGLTPNFKSNFDLAEDAKLQLSKDTYDDDLDNLLAQIGDQYADLFLAAKNLSDAILLSDILRVNTEITKAPLSASMIKRYDEHHQDLTLLKALVRQQLPEKYKEIFFDQSKNGYAGYIDGGASQEEFYKFIKPILEKMDGTEELLVKLNREDLLRKQRTFDNGSIPHQIHLGELHAILRRQEDFYPFLKDNREKIEKILTFRIPYYVGPLARGNSRFAWMTRKSEETITPWNFEEVVDKGASAQSFIERMTNFDKNLPNEKVLPKHSLLYEYFTVYNELTKVKYVTEGMRKPAFLSGEQKKAIVDLLFKTNRKVTVKQLKEDYFKKIECFDSVEISGVEDRFNASLGTYHDLLKIIKDKDFLDNEENEDILEDIVLTLTLFEDREMIEERLKTYAHLFDDKVMKQLKRRRYTGWGRLSRKLINGIRDKQSGKTILDFLKSDGFANRNFMQLIHDDSLTFKEDIQKAQVSGQGDSLHEHIANLAGSPAIKKGILQTVKVVDELVKVMGRHKPENIVIEMARENQTTQKGQKNSRERMKRIEEGIKELGSQILKEHPVENTQLQNEKLYLYYLQNGRDMYVDQELDINRLSDYDVDHIVPQSFLKDDSIDNKVLTRSDKARGKSDNVPSEEVVKKMKNYWRQLLNAKLITQRKFDNLTKAERGGLSELDKAGFIKRQLVETRQITKHVAQILDSRMNTKYDENDKLIREVKVITLKSKLVSDFRKDFQFYKVREINNYHHAHDAYLNAVVGTALIKKYPKLESEFVYGDYKVYDVRKMIAKSEQEIGKATAKYFFYSNIMNFFKTEITLANGEIRKRPLIETNGETGEIVWDKGRDFATVRKVLSMPQVNIVKKTEVQTGGFSKESILPKRNSDKLIARKKDWDPKKYGGFDSPTVAYSVLVVAKVEKGKSKKLKSVKELLGITIMERSSFEKNPIDFLEAKGYKEVKKDLIIKLPKYSLFELENGRKRMLASAGELQKGNELALPSKYVNFLYLASHYEKLKGSPEDNEQKQLFVEQHKHYLDEIIEQISEFSKRVILADANLDKVLSAYNKHRDKPIREQAENIIHLFTLTNLGAPAAFKYFDTTIDRKRYTSTKEVLDATLIHQSITGLYETRIDLSQLGGDGGGGGEAAAKGGSGGTLNIEDEHRLHETSKEPDVSLGSTWLSDFPQAWAETGGMGLAVRQAPLIIPLKATSTPVSIKQYPMSQEARLGIKPHIQRLLDQGILVPCQSPWNTPLLPVKKPGTNDYRPVQDLREVNKRVEDIHPTVPNPYNLLSGLPPSHQWYTVLDLKDAFFCLRLHPTSQPLFAFEWRDPEMGISGQLTWTRLPQGFKNSPTLFNEALHRDLADFRIQHPDLILLQYVDDLLLAATSELDCQQGTRALLQTLGNLGYRASAKKAQICQKQVKYLGYLLKEGQRWLTEARKETVMGQPTPKTPRQLREFLGKAGFCRLFIPGFAEMAAPLYPLTKPGTLFNWGPDQQKAYQEIKQALLTAPALGLPDLTKPFELFVDEKQGYAKGVLTQKLGPWRRPVAYLSKKLDPVAAGWPPCLRMVAAIAVLTKDAGKLTMGQPLVILAPHAVEALVKQPPDRWLSNARMTHYQALLLDTDRVQFGPVVALNPATLLPLPEEGLQHNCLDILAEAHGTRPDLTDQPLPDADHTWYTDGSSLLQEGQRKAGAAVTTETEVIWAKALPAGTSAQRAELIALTQALKMAEGKKLNVYTDSRYAFATAHIHGEIYRRRGWLTSEGKEIKNKDEILALLKALFLPKRLSIIHCPGHQKGHSAEARGNRMADQAARKAAITETPDTSTLLAGKRTADGSEFEKRTADGSEFESPKKKAKVE

SEQ ID NO: 3046 - protein, 2096 aa, synthetic construct; identical to SEQ ID NO: 2829

SEQ ID NO: 3047 - protein, 2094 aa, synthetic construct
MPAAKRVKLDGGDKKYSIGLDIGTNSVGWAVITDEYKVPSKKFKVLGNTDRHSIKKNLIGALLFDSGETAEATRLKRTARRRYTRRKNRICYLQEIFSNEMAKVDDSFFHRLEESFLVEEDKKHERHPIFGNIVDEVAYHEKYPTIYHLRKKLVDSTDKADLRLIYLALAHMIKFRGHFLIEGDLNPDNSDVDKLFIQLVQTYNQLFEENPINASGVDAKAILSARLSKSRRLENLIAQLPGEKKNGLFGNLIALSLGLTPNFKSNFDLAEDAKLQLSKDTYDDDLDNLLAQIGDQYADLFLAAKNLSDAILLSDILRVNTEITKAPLSASMIKRYDEHHQDLTLLKALVRQQLPEKYKEIFFDQSKNGYAGYIDGGASQEEFYKFIKPILEKMDGTEELLVKLNREDLLRKQRTFDNGSIPHQIHLGELHAILRRQEDFYPFLKDNREKIEKILTFRIPYYVGPLARGNSRFAWMTRKSEETITPWNFEEVVDKGASAQSFIERMTNFDKNLPNEKVLPKHSLLYEYFTVYNELTKVKYVTEGMRKPAFLSGEQKKAIVDLLFKTNRKVTVKQLKEDYFKKIECFDSVEISGVEDRFNASLGTYHDLLKIIKDKDFLDNEENEDILEDIVLTLTLFEDREMIEERLKTYAHLFDDKVMKQLKRRRYTGWGRLSRKLINGIRDKQSGKTILDFLKSDGFANRNFMQLIHDDSLTFKEDIQKAQVSGQGDSLHEHIANLAGSPAIKKGILQTVKVVDELVKVMGRHKPENIVIEMARENQTTQKGQKNSRERMKRIEEGIKELGSQILKEHPVENTQLQNEKLYLYYLQNGRDMYVDQELDINRLSDYDVDHIVPQSFLKDDSIDNKVLTRSDKARGKSDNVPSEEVVKKMKNYWRQLLNAKLITQRKFDNLTKAERGGLSELDKAGFIKRQLVETRQITKHVAQILDSRMNTKYDENDKLIREVKVITLKSKLVSDFRKDFQFYKVREINNYHHAHDAYLNAVVGTALIKKYPKLESEFVYGDYKVYDVRKMIAKSEQEIGKATAKYFFYSNIMNFFKTEITLANGEIRKRPLIETNGETGEIVWDKGRDFATVRKVLSMPQVNIVKKTEVQTGGFSKESILPKRNSDKLIARKKDWDPKKYGGFDSPTVAYSVLVVAKVEKGKSKKLKSVKELLGITIMERSSFEKNPIDFLEAKGYKEVKKDLIIKLPKYSLFELENGRKRMLASAGELQKGNELALPSKYVNFLYLASHYEKLKGSPEDNEQKQLFVEQHKHYLDEIIEQISEFSKRVILADANLDKVLSAYNKHRDKPIREQAENIIHLFTLTNLGAPAAFKYFDTTIDRKRYTSTKEVLDATLIHQSITGLYETRIDLSQLGGDGGGSSGGGGGSGGTLNIEDEHRLHETSKEPDVSLGSTWLSDFPQAWAETGGMGLAVRQAPLIIPLKATSTPVSIKQYPMSQEARLGIKPHIQRLLDQGILVPCQSPWNTPLLPVKKPGTNDYRPVQDLREVNKRVEDIHPTVPNPYNLLSGLPPSHQWYTVLDLKDAFFCLRLHPTSQPLFAFEWRDPEMGISGQLTWTRLPQGFKNSPTLFNEALHRDLADFRIQHPDLILLQYVDDLLLAATSELDCQQGTRALLQTLGNLGYRASAKKAQICQKQVKYLGYLLKEGQRWLTEARKETVMGQPTPKTPRQLREFLGKAGFCRLFIPGFAEMAAPLYPLTKPGTLFNWGPDQQKAYQEIKQALLTAPALGLPDLTKPFELFVDEKQGYAKGVLTQKLGPWRRPVAYLSKKLDPVAAGWPPCLRMVAAIAVLTKDAGKLTMGQPLVILAPHAVEALVKQPPDRWLSNARMTHYQALLLDTDRVQFGPVVALNPATLLPLPEEGLQHNCLDILAEAHGTRPDLTDQPLPDADHTWYTDGSSLLQEGQRKAGAAVTTETEVIWAKALPAGTSAQRAELIALTQALKMAEGKKLNVYTDSRYAFATAHIHGEIYRRRGWLTSEGKEIKNKDEILALLKALFLPKRLSIIHCPGHQKGHSAEARGNRMADQAARKAAITETPDTSTLLAGKRTADGSEFEKRTADGSEFESPKKKAKVE

SEQ ID NO: 3048 - protein, 2094 aa, synthetic construct; identical to SEQ ID NO: 2852

SEQ ID NO: 3049-3051 - skipped (3 entries)

SEQ ID NO: 3052 - protein, 2096 aa, synthetic construct; identical to SEQ ID NO: 2822

SEQ ID NO: 3053 - protein, 2096 aa, synthetic construct; identical to SEQ ID NO: 2817

SEQ ID NO: 3054 - protein, 2096 aa, synthetic construct; identical to SEQ ID NO: 2851

SEQ ID NO: 3055 - protein, 2091 aa, synthetic construct
MPAAKRVKLDGGDKKYSIGLDIGTNSVGWAVITDEYKVPSKKFKVLGNTDRHSIKKNLIGALLFDSGETAEATRLKRTARRRYTRRKNRICYLQEIFSNEMAKVDDSFFHRLEESFLVEEDKKHERHPIFGNIVDEVAYHEKYPTIYHLRKKLVDSTDKADLRLIYLALAHMIKFRGHFLIEGDLNPDNSDVDKLFIQLVQTYNQLFEENPINASGVDAKAILSARLSKSRRLENLIAQLPGEKKNGLFGNLIALSLGLTPNFKSNFDLAEDAKLQLSKDTYDDDLDNLLAQIGDQYADLFLAAKNLSDAILLSDILRVNTEITKAPLSASMIKRYDEHHQDLTLLKALVRQQLPEKYKEIFFDQSKNGYAGYIDGGASQEEFYKFIKPILEKMDGTEELLVKLNREDLLRKQRTFDNGSIPHQIHLGELHAILRRQEDFYPFLKDNREKIEKILTFRIPYYVGPLARGNSRFAWMTRKSEETITPWNFEEVVDKGASAQSFIERMTNFDKNLPNEKVLPKHSLLYEYFTVYNELTKVKYVTEGMRKPAFLSGEQKKAIVDLLFKTNRKVTVKQLKEDYFKKIECFDSVEISGVEDRFNASLGTYHDLLKIIKDKDFLDNEENEDILEDIVLTLTLFEDREMIEERLKTYAHLFDDKVMKQLKRRRYTGWGRLSRKLINGIRDKQSGKTILDFLKSDGFANRNFMQLIHDDSLTFKEDIQKAQVSGQGDSLHEHIANLAGSPAIKKGILQTVKVVDELVKVMGRHKPENIVIEMARENQTTQKGQKNSRERMKRIEEGIKELGSQILKEHPVENTQLQNEKLYLYYLQNGRDMYVDQELDINRLSDYDVDHIVPQSFLKDDSIDNKVLTRSDKARGKSDNVPSEEVVKKMKNYWRQLLNAKLITQRKFDNLTKAERGGLSELDKAGFIKRQLVETRQITKHVAQILDSRMNTKYDENDKLIREVKVITLKSKLVSDFRKDFQFYKVREINNYHHAHDAYLNAVVGTALIKKYPKLESEFVYGDYKVYDVRKMIAKSEQEIGKATAKYFFYSNIMNFFKTEITLANGEIRKRPLIETNGETGEIVWDKGRDFATVRKVLSMPQVNIVKKTEVQTGGFSKESILPKRNSDKLIARKKDWDPKKYGGFDSPTVAYSVLVVAKVEKGKSKKLKSVKELLGITIMERSSFEKNPIDFLEAKGYKEVKKDLIIKLPKYSLFELENGRKRMLASAGELQKGNELALPSKYVNFLYLASHYEKLKGSPEDNEQKQLFVEQHKHYLDEIIEQISEFSKRVILADANLDKVLSAYNKHRDKPIREQAENIIHLFTLTNLGAPAAFKYFDTTIDRKRYTSTKEVLDATLIHQSITGLYETRIDLSQLGGDGGGSSPAPGGTLNIEDEHRLHETSKEPDVSLGSTWLSDFPQAWAETGGMGLAVRQAPLIIPLKATSTPVSIKQYPMSQEARLGIKPHIQRLLDQGILVPCQSPWNTPLLPVKKPGTNDYRPVQDLREVNKRVEDIHPTVPNPYNLLSGLPPSHQWYTVLDLKDAFFCLRLHPTSQPLFAFEWRDPEMGISGQLTWTRLPQGFKNSPTLFNEALHRDLADFRIQHPDLILLQYVDDLLLAATSELDCQQGTRALLQTLGNLGYRASAKKAQICQKQVKYLGYLLKEGQRWLTEARKETVMGQPTPKTPRQLREFLGKAGFCRLFIPGFAEMAAPLYPLTKPGTLFNWGPDQQKAYQEIKQALLTAPALGLPDLTKPFELFVDEKQGYAKGVLTQKLGPWRRPVAYLSKKLDPVAAGWPPCLRMVAAIAVLTKDAGKLTMGQPLVILAPHAVEALVKQPPDRWLSNARMTHYQALLLDTDRVQFGPVVALNPATLLPLPEEGLQHNCLDILAEAHGTRPDLTDQPLPDADHTWYTDGSSLLQEGQRKAGAAVTTETEVIWAKALPAGTSAQRAELIALTQALKMAEGKKLNVYTDSRYAFATAHIHGEIYRRRGWLTSEGKEIKNKDEILALLKALFLPKRLSIIHCPGHQKGHSAEARGNRMADQAARKAAITETPDTSTLLAGKRTADGSEFEKRTADGSEFESPKKKAKVE

SEQ ID NO: 3056 - protein, 2094 aa, synthetic construct
MPAAKRVKLDGGDKKYSIGLDIGTNSVGWAVITDEYKVPSKKFKVLGNTDRHSIKKNLIGALLFDSGETAEATRLKRTARRRYTRRKNRICYLQEIFSNEMAKVDDSFFHRLEESFLVEEDKKHERHPIFGNIVDEVAYHEKYPTIYHLRKKLVDSTDKADLRLIYLALAHMIKFRGHFLIEGDLNPDNSDVDKLFIQLVQTYNQLFEENPINASGVDAKAILSARLSKSRRLENLIAQLPGEKKNGLFGNLIALSLGLTPNFKSNFDLAEDAKLQLSKDTYDDDLDNLLAQIGDQYADLFLAAKNLSDAILLSDILRVNTEITKAPLSASMIKRYDEHHQDLTLLKALVRQQLPEKYKEIFFDQSKNGYAGYIDGGASQEEFYKFIKPILEKMDGTEELLVKLNREDLLRKQRTFDNGSIPHQIHLGELHAILRRQEDFYPFLKDNREKIEKILTFRIPYYVGPLARGNSRFAWMTRKSEETITPWNFEEVVDKGASAQSFIERMTNFDKNLPNEKVLPKHSLLYEYFTVYNELTKVKYVTEGMRKPAFLSGEQKKAIVDLLFKTNRKVTVKQLKEDYFKKIECFDSVEISGVEDRFNASLGTYHDLLKIIKDKDFLDNEENEDILEDIVLTLTLFEDREMIEERLKTYAHLFDDKVMKQLKRRRYTGWGRLSRKLINGIRDKQSGKTILDFLKSDGFANRNFMQLIHDDSLTFKEDIQKAQVSGQGDSLHEHIANLAGSPAIKKGILQTVKVVDELVKVMGRHKPENIVIEMARENQTTQKGQKNSRERMKRIEEGIKELGSQILKEHPVENTQLQNEKLYLYYLQNGRDMYVDQELDINRLSDYDVDHIVPQSFLKDDSIDNKVLTRSDKARGKSDNVPSEEVVKKMKNYWRQLLNAKLITQRKFDNLTKAERGGLSELDKAGFIKRQLVETRQITKHVAQILDSRMNTKYDENDKLIREVKVITLKSKLVSDFRKDFQFYKVREINNYHHAHDAYLNAVVGTALIKKYPKLESEFVYGDYKVYDVRKMIAKSEQEIGKATAKYFFYSNIMNFFKTEITLANGEIRKRPLIETNGETGEIVWDKGRDFATVRKVLSMPQVNIVKKTEVQTGGFSKESILPKRNSDKLIARKKDWDPKKYGGFDSPTVAYSVLVVAKVEKGKSKKLKSVKELLGITIMERSSFEKNPIDFLEAKGYKEVKKDLIIKLPKYSLFELENGRKRMLASAGELQKGNELALPSKYVNFLYLASHYEKLKGSPEDNEQKQLFVEQHKHYLDEIIEQISEFSKRVILADANLDKVLSAYNKHRDKPIREQAENIIHLFTLTNLGAPAAFKYFDTTIDRKRYTSTKEVLDATLIHQSITGLYETRIDLSQLGGDGGGSSGGGPAPGGTLNIEDEHRLHETSKEPDVSLGSTWLSDFPQAWAETGGMGLAVRQAPLIIPLKATSTPVSIKQYPMSQEARLGIKPHIQRLLDQGILVPCQSPWNTPLLPVKKPGTNDYRPVQDLREVNKRVEDIHPTVPNPYNLLSGLPPSHQWYTVLDLKDAFFCLRLHPTSQPLFAFEWRDPEMGISGQLTWTRLPQGFKNSPTLFNEALHRDLADFRIQHPDLILLQYVDDLLLAATSELDCQQGTRALLQTLGNLGYRASAKKAQICQKQVKYLGYLLKEGQRWLTEARKETVMGQPTPKTPRQLREFLGKAGFCRLFIPGFAEMAAPLYPLTKPGTLFNWGPDQQKAYQEIKQALLTAPALGLPDLTKPFELFVDEKQGYAKGVLTQKLGPWRRPVAYLSKKLDPVAAGWPPCLRMVAAIAVLTKDAGKLTMGQPLVILAPHAVEALVKQPPDRWLSNARMTHYQALLLDTDRVQFGPVVALNPATLLPLPEEGLQHNCLDILAEAHGTRPDLTDQPLPDADHTWYTDGSSLLQEGQRKAGAAVTTETEVIWAKALPAGTSAQRAELIALTQALKMAEGKKLNVYTDSRYAFATAHIHGEIYRRRGWLTSEGKEIKNKDEILALLKALFLPKRLSIIHCPGHQKGHSAEARGNRMADQAARKAAITETPDTSTLLAGKRTADGSEFEKRTADGSEFESPKKKAKVE

SEQ ID NO: 3057 - protein, 2096 aa, synthetic construct; identical to SEQ ID NO: 2810

SEQ ID NO: 3058 - skipped

SEQ ID NO: 3059 - protein, 2094 aa, synthetic construct; identical to SEQ ID NO: 2804

SEQ ID NO: 3060 - protein, 2091 aa, synthetic construct
MPAAKRVKLDGGDKKYSIGLDIGTNSVGWAVITDEYKVPSKKFKVLGNTDRHSIKKNLIGALLFDSGETAEATRLKRTARRRYTRRKNRICYLQEIFSNEMAKVDDSFFHRLEESFLVEEDKKHERHPIFGNIVDEVAYHEKYPTIYHLRKKLVDSTDKADLRLIYLALAHMIKFRGHFLIEGDLNPDNSDVDKLFIQLVQTYNQLFEENPINASGVDAKAILSARLSKSRRLENLIAQLPGEKKNGLFGNLIALSLGLTPNFKSNFDLAEDAKLQLSKDTYDDDLDNLLAQIGDQYADLFLAAKNLSDAILLSDILRVNTEITKAPLSASMIKRYDEHHQDLTLLKALVRQQLPEKYKEIFFDQSKNGYAGYIDGGASQEEFYKFIKPILEKMDGTEELLVKLNREDLLRKQRTFDNGSIPHQIHLGELHAILRRQEDFYPFLKDNREKIEKILTFRIPYYVGPLARGNSRFAWMTRKSEETITPWNFEEVVDKGASAQSFIERMTNFDKNLPNEKVLPKHSLLYEYFTVYNELTKVKYVTEGMRKPAFLSGEQKKAIVDLLFKTNRKVTVKQLKEDYFKKIECFDSVEISGVEDRFNASLGTYHDLLKIIKDKDFLDNEENEDILEDIVLTLTLFEDREMIEERLKTYAHLFDDKVMKQLKRRRYTGWGRLSRKLINGIRDKQSGKTILDFLKSDGFANRNFMQLIHDDSLTFKEDIQKAQVSGQGDSLHEHIANLAGSPAIKKGILQTVKVVDELVKVMGRHKPENIVIEMARENQTTQKGQKNSRERMKRIEEGIKELGSQILKEHPVENTQLQNEKLYLYYLQNGRDMYVDQELDINRLSDYDVDHIVPQSFLKDDSIDNKVLTRSDKARGKSDNVPSEEVVKKMKNYWRQLLNAKLITQRKFDNLTKAERGGLSELDKAGFIKRQLVETRQITKHVAQILDSRMNTKYDENDKLIREVKVITLKSKLVSDFRKDFQFYKVREINNYHHAHDAYLNAVVGTALIKKYPKLESEFVYGDYKVYDVRKMIAKSEQEIGKATAKYFFYSNIMNFFKTEITLANGEIRKRPLIETNGETGEIVWDKGRDFATVRKVLSMPQVNIVKKTEVQTGGFSKESILPKRNSDKLIARKKDWDPKKYGGFDSPTVAYSVLVVAKVEKGKSKKLKSVKELLGITIMERSSFEKNPIDFLEAKGYKEVKKDLIIKLPKYSLFELENGRKRMLASAGELQKGNELALPSKYVNFLYLASHYEKLKGSPEDNEQKQLFVEQHKHYLDEIIEQISEFSKRVILADANLDKVLSAYNKHRDKPIREQAENIIHLFTLTNLGAPAAFKYFDTTIDRKRYTSTKEVLDATLIHQSITGLYETRIDLSQLGGDGGPAPGGSGGTLNIEDEHRLHETSKEPDVSLGSTWLSDFPQAWAETGGMGLAVRQAPLIIPLKATSTPVSIKQYPMSQEARLGIKPHIQRLLDQGILVPCQSPWNTPLLPVKKPGTNDYRPVQDLREVNKRVEDIHPTVPNPYNLLSGLPPSHQWYTVLDLKDAFFCLRLHPTSQPLFAFEWRDPEMGISGQLTWTRLPQGFKNSPTLFNEALHRDLADFRIQHPDLILLQYVDDLLLAATSELDCQQGTRALLQTLGNLGYRASAKKAQICQKQVKYLGYLLKEGQRWLTEARKETVMGQPTPKTPRQLREFLGKAGFCRLFIPGFAEMAAPLYPLTKPGTLFNWGPDQQKAYQEIKQALLTAPALGLPDLTKPFELFVDEKQGYAKGVLTQKLGPWRRPVAYLSKKLDPVAAGWPPCLRMVAAIAVLTKDAGKLTMGQPLVILAPHAVEALVKQPPDRWLSNARMTHYQALLLDTDRVQFGPVVALNPATLLPLPEEGLQHNCLDILAEAHGTRPDLTDQPLPDADHTWYTDGSSLLQEGQRKAGAAVTTETEVIWAKALPAGTSAQRAELIALTQALKMAEGKKLNVYTDSRYAFATAHIHGEIYRRRGWLTSEGKEIKNKDEILALLKALFLPKRLSIIHCPGHQKGHSAEARGNRMADQAARKAAITETPDTSTLLAGKRTADGSEFEKRTADGSEFESPKKKAKVE

SEQ ID NO: 3061 - protein, 2093 aa, synthetic construct
MPAAKRVKLDGGDKKYSIGLDIGTNSVGWAVITDEYKVPSKKFKVLGNTDRHSIKKNLIGALLFDSGETAEATRLKRTARRRYTRRKNRICYLQEIFSNEMAKVDDSFFHRLEESFLVEEDKKHERHPIFGNIVDEVAYHEKYPTIYHLRKKLVDSTDKADLRLIYLALAHMIKFRGHFLIEGDLNPDNSDVDKLFIQLVQTYNQLFEENPINASGVDAKAILSARLSKSRRLENLIAQLPGEKKNGLFGNLIALSLGLTPNFKSNFDLAEDAKLQLSKDTYDDDLDNLLAQIGDQYADLFLAAKNLSDAILLSDILRVNTEITKAPLSASMIKRYDEHHQDLTLLKALVRQQLPEKYKEIFFDQSKNGYAGYIDGGASQEEFYKFIKPILEKMDGTEELLVKLNREDLLRKQRTFDNGSIPHQIHLGELHAILRRQEDFYPFLKDNREKIEKILTFRIPYYVGPLARGNSRFAWMTRKSEETITPWNFEEVVDKGASAQSFIERMTNFDKNLPNEKVLPKHSLLYEYFTVYNELTKVKYVTEGMRKPAFLSGEQKKAIVDLLFKTNRKVTVKQLKEDYFKKIECFDSVEISGVEDRFNASLGTYHDLLKIIKDKDFLDNEENEDILEDIVLTLTLFEDREMIEERLKTYAHLFDDKVMKQLKRRRYTGWGRLSRKLINGIRDKQSGKTILDFLKSDGFANRNFMQLIHDDSLTFKEDIQKAQVSGQGDSLHEHIANLAGSPAIKKGILQTVKVVDELVKVMGRHKPENIVIEMARENQTTQKGQKNSRERMKRIEEGIKELGSQILKEHPVENTQLQNEKLYLYYLQNGRDMYVDQELDINRLSDYDVDHIVPQSFLKDDSIDNKVLTRSDKARGKSDNVPSEEVVKKMKNYWRQLLNAKLITQRKFDNLTKAERGGLSELDKAGFIKRQLVETRQITKHVAQILDSRMNTKYDENDKLIREVKVITLKSKLVSDFRKDFQFYKVREINNYHHAHDAYLNAVVGTALIKKYPKLESEFVYGDYKVYDVRKMIAKSEQEIGKATAKYFFYSNIMNFFKTEITLANGEIRKRPLIETNGETGEIVWDKGRDFATVRKVLSMPQVNIVKKTEVQTGGFSKESILPKRNSDKLIARKKDWDPKKYGGFDSPTVAYSVLVVAKVEKGKSKKLKSVKELLGITIMERSSFEKNPIDFLEAKGYKEVKKDLIIKLPKYSLFELENGRKRMLASAGELQKGNELALPSKYVNFLYLASHYEKLKGSPEDNEQKQLFVEQHKHYLDEIIEQISEFSKRVILADANLDKVLSAYNKHRDKPIREQAENIIHLFTLTNLGAPAAFKYFDTTIDRKRYTSTKEVLDATLIHQSITGLYETRIDLSQLGGDGGPAPEAAAKGGTLNIEDEHRLHETSKEPDVSLGSTWLSDFPQAWAETGGMGLAVRQAPLIIPLKATSTPVSIKQYPMSQEARLGIKPHIQRLLDQGILVPCQSPWNTPLLPVKKPGTNDYRPVQDLREVNKRVEDIHPTVPNPYNLLSGLPPSHQWYTVLDLKDAFFCLRLHPTSQPLFAFEWRDPEMGISGQLTWTRLPQGFKNSPTLFNEALHRDLADFRIQHPDLILLQYVDDLLLAATSELDCQQGTRALLQTLGNLGYRASAKKAQICQKQVKYLGYLLKEGQRWLTEARKETVMGQPTPKTPRQLREFLGKAGFCRLFIPGFAEMAAPLYPLTKPGTLFNWGPDQQKAYQEIKQALLTAPALGLPDLTKPFELFVDEKQGYAKGVLTQKLGPWRRPVAYLSKKLDPVAAGWPPCLRMVAAIAVLTKDAGKLTMGQPLVILAPHAVEALVKQPPDRWLSNARMTHYQALLLDTDRVQFGPVVALNPATLLPLPEEGLQHNCLDILAEAHGTRPDLTDQPLPDADHTWYTDGSSLLQEGQRKAGAAVTTETEVIWAKALPAGTSAQRAELIALTQALKMAEGKKLNVYTDSRYAFATAHIHGEIYRRRGWLTSEGKEIKNKDEILALLKALFLPKRLSIIHCPGHQKGHSAEARGNRMADQAARKAAITETPDTSTLLAGKRTADGSEFEKRTADGSEFESPKKKAKVE

SEQ ID NO: 3062 - protein, 2093 aa, synthetic construct; identical to SEQ ID NO: 2828

SEQ ID NO: 3063 - protein, 2105 aa, synthetic construct
MPAAKRVKLDGGDKKYSIGLDIGTNSVGWAVITDEYKVPSKKFKVLGNTDRHSIKKNLIGALLFDSGETAEATRLKRTARRRYTRRKNRICYLQEIFSNEMAKVDDSFFHRLEESFLVEEDKKHERHPIFGNIVDEVAYHEKYPTIYHLRKKLVDSTDKADLRLIYLALAHMIKFRGHFLIEGDLNPDNSDVDKLFIQLVQTYNQLFEENPINASGVDAKAILSARLSKSRRLENLIAQLPGEKKNGLFGNLIALSLGLTPNFKSNFDLAEDAKLQLSKDTYDDDLDNLLAQIGDQYADLFLAAKNLSDAILLSDILRVNTEITKAPLSASMIKRYDEHHQDLTLLKALVRQQLPEKYKEIFFDQSKNGYAGYIDGGASQEEFYKFIKPILEKMDGTEELLVKLNREDLLRKQRTFDNGSIPHQIHLGELHAILRRQEDFYPFLKDNREKIEKILTFRIPYYVGPLARGNSRFAWMTRKSEETITPWNFEEVVDKGASAQSFIERMTNFDKNLPNEKVLPKHSLLYEYFTVYNELTKVKYVTEGMRKPAFLSGEQKKAIVDLLFKTNRKVTVKQLKEDYFKKIECFDSVEISGVEDRFNASLGTYHDLLKIIKDKDFLDNEENEDILEDIVLTLTLFEDREMIEERLKTYAHLFDDKVMKQLKRRRYTGWGRLSRKLINGIRDKQSGKTILDFLKSDGFANRNFMQLIHDDSLTFKEDIQKAQVSGQGDSLHEHIANLAGSPAIKKGILQTVKVVDELVKVMGRHKPENIVIEMARENQTTQKGQKNSRERMKRIEEGIKELGSQILKEHPVENTQLQNEKLYLYYLQNGRDMYVDQELDINRLSDYDVDHIVPQSFLKDDSIDNKVLTRSDKARGKSDNVPSEEVVKKMKNYWRQLLNAKLITQRKFDNLTKAERGGLSELDKAGFIKRQLVETRQITKHVAQILDSRMNTKYDENDKLIREVKVITLKSKLVSDFRKDFQFYKVREINNYHHAHDAYLNAVVGTALIKKYPKLESEFVYGDYKVYDVRKMIAKSEQEIGKATAKYFFYSNIMNFFKTEITLANGEIRKRPLIETNGETGEIVWDKGRDFATVRKVLSMPQVNIVKKTEVQTGGFSKESILPKRNSDKLIARKKDWDPKKYGGFDSPTVAYSVLVVAKVEKGKSKKLKSVKELLGITIMERSSFEKNPIDFLEAKGYKEVKKDLIIKLPKYSLFELENGRKRMLASAGELQKGNELALPSKYVNFLYLASHYEKLKGSPEDNEQKQLFVEQHKHYLDEIIEQISEFSKRVILADANLDKVLSAYNKHRDKPIREQAENIIHLFTLTNLGAPAAFKYFDTTIDRKRYTSTKEVLDATLIHQSITGLYETRIDLSQLGGDGGGGGGSGGGGSGGGGSGGGGSGGTLNIEDEHRLHETSKEPDVSLGSTWLSDFPQAWAETGGMGLAVRQAPLIIPLKATSTPVSIKQYPMSQEARLGIKPHIQRLLDQGILVPCQSPWNTPLLPVKKPGTNDYRPVQDLREVNKRVEDIHPTVPNPYNLLSGLPPSHQWYTVLDLKDAFFCLRLHPTSQPLFAFEWRDPEMGISGQLTWTRLPQGFKNSPTLFNEALHRDLADFRIQHPDLILLQYVDDLLLAATSELDCQQGTRALLQTLGNLGYRASAKKAQICQKQVKYLGYLLKEGQRWLTEARKETVMGQPTPKTPRQLREFLGKAGFCRLFIPGFAEMAAPLYPLTKPGTLFNWGPDQQKAYQEIKQALLTAPALGLPDLTKPFELFVDEKQGYAKGVLTQKLGPWRRPVAYLSKKLDPVAAGWPPCLRMVAAIAVLTKDAGKLTMGQPLVILAPHAVEALVKQPPDRWLSNARMTHYQALLLDTDRVQFGPVVALNPATLLPLPEEGLQHNCLDILAEAHGTRPDLTDQPLPDADHTWYTDGSSLLQEGQRKAGAAVTTETEVIWAKALPAGTSAQRAELIALTQALKMAEGKKLNVYTDSRYAFATAHIHGEIYRRRGWLTSEGKEIKNKDEILALLKALFLPKRLSIIHCPGHQKGHSAEARGNRMADQAARKAAITETPDTSTLLAGKRTADGSEFEKRTADGSEFESPKKKAKVE

SEQ ID NO: 3064 - protein, 2094 aa, synthetic construct
MPAAKRVKLDGGDKKYSIGLDIGTNSVGWAVITDEYKVPSKKFKVLGNTDRHSIKKNLIGALLFDSGETAEATRLKRTARRRYTRRKNRICYLQEIFSNEMAKVDDSFFHRLEESFLVEEDKKHERHPIFGNIVDEVAYHEKYPTIYHLRKKLVDSTDKADLRLIYLALAHMIKFRGHFLIEGDLNPDNSDVDKLFIQLVQTYNQLFEENPINASGVDAKAILSARLSKSRRLENLIAQLPGEKKNGLFGNLIALSLGLTPNFKSNFDLAEDAKLQLSKDTYDDDLDNLLAQIGDQYADLFLAAKNLSDAILLSDILRVNTEITKAPLSASMIKRYDEHHQDLTLLKALVRQQLPEKYKEIFFDQSKNGYAGYIDGGASQEEFYKFIKPILEKMDGTEELLVKLNREDLLRKQRTFDNGSIPHQIHLGELHAILRRQEDFYPFLKDNREKIEKILTFRIPYYVGPLARGNSRFAWMTRKSEETITPWNFEEVVDKGASAQSFIERMTNFDKNLPNEKVLPKHSLLYEYFTVYNELTKVKYVTEGMRKPAFLSGEQKKAIVDLLFKTNRKVTVKQLKEDYFKKIECFDSVEISGVEDRFNASLGTYHDLLKIIKDKDFLDNEENEDILEDIVLTLTLFEDREMIEERLKTYAHLFDDKVMKQLKRRRYTGWGRLSRKLINGIRDKQSGKTILDFLKSDGFANRNFMQLIHDDSLTFKEDIQKAQVSGQGDSLHEHIANLAGSPAIKKGILQTVKVVDELVKVMGRHKPENIVIEMARENQTTQKGQKNSRERMKRIEEGIKELGSQILKEHPVENTQLQNEKLYLYYLQNGRDMYVDQELDINRLSDYDVDHIVPQSFLKDDSIDNKVLTRSDKARGKSDNVPSEEVVKKMKNYWRQLLNAKLITQRKFDNLTKAERGGLSELDKAGFIKRQLVETRQITKHVAQILDSRMNTKYDENDKLIREVKVITLKSKLVSDFRKDFQFYKVREINNYHHAHDAYLNAVVGTALIKKYPKLESEFVYGDYKVYDVRKMIAKSEQEIGKATAKYFFYSNIMNFFKTEITLANGEIRKRPLIETNGETGEIVWDKGRDFATVRKVLSMPQVNIVKKTEVQTGGFSKESILPKRNSDKLIARKKDWDPKKYGGFDSPTVAYSVLVVAKVEKGKSKKLKSVKELLGITIMERSSFEKNPIDFLEAKGYKEVKKDLIIKLPKYSLFELENGRKRMLASAGELQKGNELALPSKYVNFLYLASHYEKLKGSPEDNEQKQLFVEQHKHYLDEIIEQISEFSKRVILADANLDKVLSAYNKHRDKPIREQAENIIHLFTLTNLGAPAAFKYFDTTIDRKRYTSTKEVLDATLIHQSITGLYETRIDLSQLGGDGGPAPGGSGSSGGTLNIEDEHRLHETSKEPDVSLGSTWLSDFPQAWAETGGMGLAVRQAPLIIPLKATSTPVSIKQYPMSQEARLGIKPHIQRLLDQGILVPCQSPWNTPLLPVKKPGTNDYRPVQDLREVNKRVEDIHPTVPNPYNLLSGLPPSHQWYTVLDLKDAFFCLRLHPTSQPLFAFEWRDPEMGISGQLTWTRLPQGFKNSPTLFNEALHRDLADFRIQHPDLILLQYVDDLLLAATSELDCQQGTRALLQTLGNLGYRASAKKAQICQKQVKYLGYLLKEGQRWLTEARKETVMGQPTPKTPRQLREFLGKAGFCRLFIPGFAEMAAPLYPLTKPGTLFNWGPDQQKAYQEIKQALLTAPALGLPDLTKPFELFVDEKQGYAKGVLTQKLGPWRRPVAYLSKKLDPVAAGWPPCLRMVAAIAVLTKDAGKLTMGQPLVILAPHAVEALVKQPPDRWLSNARMTHYQALLLDTDRVQFGPVVALNPATLLPLPEEGLQHNCLDILAEAHGTRPDLTDQPLPDADHTWYTDGSSLLQEGQRKAGAAVTTETEVIWAKALPAGTSAQRAELIALTQALKMAEGKKLNVYTDSRYAFATAHIHGEIYRRRGWLTSEGKEIKNKDEILALLKALFLPKRLSIIHCPGHQKGHSAEARGNRMADQAARKAAITETPDTSTLLAGKRTADGSEFEKRTADGSEFESPKKKAKVE

SEQ ID NO: 3065 - protein, 2090 aa, synthetic construct; identical to SEQ ID NO: 2825

SEQ ID NO: 3066 - skipped

SEQ ID NO: 3067 - protein, 2096 aa, synthetic construct; identical to SEQ ID NO: 2787

SEQ ID NO: 3068 - protein, 2096 aa, synthetic construct
MPAAKRVKLDGGDKKYSIGLDIGTNSVGWAVITDEYKVPSKKFKVLGNTDRHSIKKNLIGALLFDSGETAEATRLKRTARRRYTRRKNRICYLQEIFSNEMAKVDDSFFHRLEESFLVEEDKKHERHPIFGNIVDEVAYHEKYPTIYHLRKKLVDSTDKADLRLIYLALAHMIKFRGHFLIEGDLNPDNSDVDKLFIQLVQTYNQLFEENPINASGVDAKAILSARLSKSRRLENLIAQLPGEKKNGLFGNLIALSLGLTPNFKSNFDLAEDAKLQLSKDTYDDDLDNLLAQIGDQYADLFLAAKNLSDAILLSDILRVNTEITKAPLSASMIKRYDEHHQDLTLLKALVRQQLPEKYKEIFFDQSKNGYAGYIDGGASQEEFYKFIKPILEKMDGTEELLVKLNREDLLRKQRTFDNGSIPHQIHLGELHAILRRQEDFYPFLKDNREKIEKILTFRIPYYVGPLARGNSRFAWMTRKSEETITPWNFEEVVDKGASAQSFIERMTNFDKNLPNEKVLPKHSLLYEYFTVYNELTKVKYVTEGMRKPAFLSGEQKKAIVDLLFKTNRKVTVKQLKEDYFKKIECFDSVEISGVEDRFNASLGTYHDLLKIIKDKDFLDNEENEDILEDIVLTLTLFEDREMIEERLKTYAHLFDDKVMKQLKRRRYTGWGRLSRKLINGIRDKQSGKTILDFLKSDGFANRNFMQLIHDDSLTFKEDIQKAQVSGQGDSLHEHIANLAGSPAIKKGILQTVKVVDELVKVMGRHKPENIVIEMARENQTTQKGQKNSRERMKRIEEGIKELGSQILKEHPVENTQLQNEKLYLYYLQNGRDMYVDQELDINRLSDYDVDHIVPQSFLKDDSIDNKVLTRSDKARGKSDNVPSEEVVKKMKNYWRQLLNAKLITQRKFDNLTKAERGGLSELDKAGFIKRQLVETRQITKHVAQILDSRMNTKYDENDKLIREVKVITLKSKLVSDFRKDFQFYKVREINNYHHAHDAYLNAVVGTALIKKYPKLESEFVYGDYKVYDVRKMIAKSEQEIGKATAKYFFYSNIMNFFKTEITLANGEIRKRPLIETNGETGEIVWDKGRDFATVRKVLSMPQVNIVKKTEVQTGGFSKESILPKRNSDKLIARKKDWDPKKYGGFDSPTVAYSVLVVAKVEKGKSKKLKSVKELLGITIMERSSFEKNPIDFLEAKGYKEVKKDLIIKLPKYSLFELENGRKRMLASAGELQKGNELALPSKYVNFLYLASHYEKLKGSPEDNEQKQLFVEQHKHYLDEIIEQISEFSKRVILADANLDKVLSAYNKHRDKPIREQAENIIHLFTLTNLGAPAAFKYFDTTIDRKRYTSTKEVLDATLIHQSITGLYETRIDLSQLGGDGGPAPEAAAKGGGGGTLNIEDEHRLHETSKEPDVSLGSTWLSDFPQAWAETGGMGLAVRQAPLIIPLKATSTPVSIKQYPMSQEARLGIKPHIQRLLDQGILVPCQSPWNTPLLPVKKPGTNDYRPVQDLREVNKRVEDIHPTVPNPYNLLSGLPPSHQWYTVLDLKDAFFCLRLHPTSQPLFAFEWRDPEMGISGQLTWTRLPQGFKNSPTLFNEALHRDLADFRIQHPDLILLQYVDDLLLAATSELDCQQGTRALLQTLGNLGYRASAKKAQICQKQVKYLGYLLKEGQRWLTEARKETVMGQPTPKTPRQLREFLGKAGFCRLFIPGFAEMAAPLYPLTKPGTLFNWGPDQQKAYQEIKQALLTAPALGLPDLTKPFELFVDEKQGYAKGVLTQKLGPWRRPVAYLSKKLDPVAAGWPPCLRMVAAIAVLTKDAGKLTMGQPLVILAPHAVEALVKQPPDRWLSNARMTHYQALLLDTDRVQFGPVVALNPATLLPLPEEGLQHNCLDILAEAHGTRPDLTDQPLPDADHTWYTDGSSLLQEGQRKAGAAVTTETEVIWAKALPAGTSAQRAELIALTQALKMAEGKKLNVYTDSRYAFATAHIHGEIYRRRGWLTSEGKEIKNKDEILALLKALFLPKRLSIIHCPGHQKGHSAEARGNRMADQAARKAAITETPDTSTLLAGKRTADGSEFEKRTADGSEFESPKKKAKVE

SEQ ID NO: 3069 - skipped

SEQ ID NO: 3070 - protein, 2094 aa, synthetic construct; identical to SEQ ID NO: 2809

SEQ ID NO: 3071-3074 - skipped (4 entries)

SEQ ID NO: 3075 - protein, 2094 aa, synthetic construct
MPAAKRVKLDGGDKKYSIGLDIGTNSVGWAVITDEYKVPSKKFKVLGNTDRHSIKKNLIGALLFDSGETAEATRLKRTARRRYTRRKNRICYLQEIFSNEMAKVDDSFFHRLEESFLVEEDKKHERHPIFGNIVDEVAYHEKYPTIYHLRKKLVDSTDKADLRLIYLALAHMIKFRGHFLIEGDLNPDNSDVDKLFIQLVQTYNQLFEENPINASGVDAKAILSARLSKSRRLENLIAQLPGEKKNGLFGNLIALSLGLTPNFKSNFDLAEDAKLQLSKDTYDDDLDNLLAQIGDQYADLFLAAKNLSDAILLSDILRVNTEITKAPLSASMIKRYDEHHQDLTLLKALVRQQLPEKYKEIFFDQSKNGYAGYIDGGASQEEFYKFIKPILEKMDGTEELLVKLNREDLLRKQRTFDNGSIPHQIHLGELHAILRRQEDFYPFLKDNREKIEKILTFRIPYYVGPLARGNSRFAWMTRKSEETITPWNFEEVVDKGASAQSFIERMTNFDKNLPNEKVLPKHSLLYEYFTVYNELTKVKYVTEGMRKPAFLSGEQKKAIVDLLFKTNRKVTVKQLKEDYFKKIECFDSVEISGVEDRFNASLGTYHDLLKIIKDKDFLDNEENEDILEDIVLTLTLFEDREMIEERLKTYAHLFDDKVMKQLKRRRYTGWGRLSRKLINGIRDKQSGKTILDFLKSDGFANRNFMQLIHDDSLTFKEDIQKAQVSGQGDSLHEHIANLAGSPAIKKGILQTVKVVDELVKVMGRHKPENIVIEMARENQTTQKGQKNSRERMKRIEEGIKELGSQILKEHPVENTQLQNEKLYLYYLQNGRDMYVDQELDINRLSDYDVDHIVPQSFLKDDSIDNKVLTRSDKARGKSDNVPSEEVVKKMKNYWRQLLNAKLITQRKFDNLTKAERGGLSELDKAGFIKRQLVETRQITKHVAQILDSRMNTKYDENDKLIREVKVITLKSKLVSDFRKDFQFYKVREINNYHHAHDAYLNAVVGTALIKKYPKLESEFVYGDYKVYDVRKMIAKSEQEIGKATAKYFFYSNIMNFFKTEITLANGEIRKRPLIETNGETGEIVWDKGRDFATVRKVLSMPQVNIVKKTEVQTGGFSKESILPKRNSDKLIARKKDWDPKKYGGFDSPTVAYSVLVVAKVEKGKSKKLKSVKELLGITIMERSSFEKNPIDFLEAKGYKEVKKDLIIKLPKYSLFELENGRKRMLASAGELQKGNELALPSKYVNFLYLASHYEKLKGSPEDNEQKQLFVEQHKHYLDEIIEQISEFSKRVILADANLDKVLSAYNKHRDKPIREQAENIIHLFTLTNLGAPAAFKYFDTTIDRKRYTSTKEVLDATLIHQSITGLYETRIDLSQLGGDGGGSSGGSPAPGGTLNIEDEHRLHETSKEPDVSLGSTWLSDFPQAWAETGGMGLAVRQAPLIIPLKATSTPVSIKQYPMSQEARLGIKPHIQRLLDQGILVPCQSPWNTPLLPVKKPGTNDYRPVQDLREVNKRVEDIHPTVPNPYNLLSGLPPSHQWYTVLDLKDAFFCLRLHPTSQPLFAFEWRDPEMGISGQLTWTRLPQGFKNSPTLFNEALHRDLADFRIQHPDLILLQYVDDLLLAATSELDCQQGTRALLQTLGNLGYRASAKKAQICQKQVKYLGYLLKEGQRWLTEARKETVMGQPTPKTPRQLREFLGKAGFCRLFIPGFAEMAAPLYPLTKPGTLFNWGPDQQKAYQEIKQALLTAPALGLPDLTKPFELFVDEKQGYAKGVLTQKLGPWRRPVAYLSKKLDPVAAGWPPCLRMVAAIAVLTKDAGKLTMGQPLVILAPHAVEALVKQPPDRWLSNARMTHYQALLLDTDRVQFGPVVALNPATLLPLPEEGLQHNCLDILAEAHGTRPDLTDQPLPDADHTWYTDGSSLLQEGQRKAGAAVTTETEVIWAKALPAGTSAQRAELIALTQALKMAEGKKLNVYTDSRYAFATAHIHGEIYRRRGWLTSEGKEIKNKDEILALLKALFLPKRLSIIHCPGHQKGHSAEARGNRMADQAARKAAITETPDTSTLLAGKRTADGSEFEKRTADGSEFESPKKKAKVE

SEQ ID NO: 3076 - protein, 2091 aa, synthetic construct; identical to SEQ ID NO: 2780

SEQ ID NO: 3077-3078 - skipped (2 entries)

SEQ ID NO: 3079 - protein, 2100 aa, synthetic construct; identical to SEQ ID NO: 2788

SEQ ID NO: 3080 - protein, 2096 aa, synthetic construct
MPAAKRVKLDGGDKKYSIGLDIGTNSVGWAVITDEYKVPSKKFKVLGNTDRHSIKKNLIGALLFDSGETAEATRLKRTARRRYTRRKNRICYLQEIFSNEMAKVDDSFFHRLEESFLVEEDKKHERHPIFGNIVDEVAYHEKYPTIYHLRKKLVDSTDKADLRLIYLALAHMIKFRGHFLIEGDLNPDNSDVDKLFIQLVQTYNQLFEENPINASGVDAKAILSARLSKSRRLENLIAQLPGEKKNGLFGNLIALSLGLTPNFKSNFDLAEDAKLQLSKDTYDDDLDNLLAQIGDQYADLFLAAKNLSDAILLSDILRVNTEITKAPLSASMIKRYDEHHQDLTLLKALVRQQLPEKYKEIFFDQSKNGYAGYIDGGASQEEFYKFIKPILEKMDGTEELLVKLNREDLLRKQRTFDNGSIPHQIHLGELHAILRRQEDFYPFLKDNREKIEKILTFRIPYYVGPLARGNSRFAWMTRKSEETITPWNFEEVVDKGASAQSFIERMTNFDKNLPNEKVLPKHSLLYEYFTVYNELTKVKYVTEGMRKPAFLSGEQKKAIVDLLFKTNRKVTVKQLKEDYFKKIECFDSVEISGVEDRFNASLGTYHDLLKIIKDKDFLDNEENEDILEDIVLTLTLFEDREMIEERLKTYAHLFDDKVMKQLKRRRYTGWGRLSRKLINGIRDKQSGKTILDFLKSDGFANRNFMQLIHDDSLTFKEDIQKAQVSGQGDSLHEHIANLAGSPAIKKGILQTVKVVDELVKVMGRHKPENIVIEMARENQTTQKGQKNSRERMKRIEEGIKELGSQILKEHPVENTQLQNEKLYLYYLQNGRDMYVDQELDINRLSDYDVDHIVPQSFLKDDSIDNKVLTRSDKARGKSDNVPSEEVVKKMKNYWRQLLNAKLITQRKFDNLTKAERGGLSELDKAGFIKRQLVETRQITKHVAQILDSRMNTKYDENDKLIREVKVITLKSKLVSDFRKDFQFYKVREINNYHHAHDAYLNAVVGTALIKKYPKLESEFVYGDYKVYDVRKMIAKSEQEIGKATAKYFFYSNIMNFFKTEITLANGEIRKRPLIETNGETGEIVWDKGRDFATVRKVLSMPQVNIVKKTEVQTGGFSKESILPKRNSDKLIARKKDWDPKKYGGFDSPTVAYSVLVVAKVEKGKSKKLKSVKELLGITIMERSSFEKNPIDFLEAKGYKEVKKDLIIKLPKYSLFELENGRKRMLASAGELQKGNELALPSKYVNFLYLASHYEKLKGSPEDNEQKQLFVEQHKHYLDEIIEQISEFSKRVILADANLDKVLSAYNKHRDKPIREQAENIIHLFTLTNLGAPAAFKYFDTTIDRKRYTSTKEVLDATLIHQSITGLYETRIDLSQLGGDGGEAAAKPAPGGSGGTLNIEDEHRLHETSKEPDVSLGSTWLSDFPQAWAETGGMGLAVRQAPLIIPLKATSTPVSIKQYPMSQEARLGIKPHIQRLLDQGILVPCQSPWNTPLLPVKKPGTNDYRPVQDLREVNKRVEDIHPTVPNPYNLLSGLPPSHQWYTVLDLKDAFFCLRLHPTSQPLFAFEWRDPEMGISGQLTWTRLPQGFKNSPTLFNEALHRDLADFRIQHPDLILLQYVDDLLLAATSELDCQQGTRALLQTLGNLGYRASAKKAQICQKQVKYLGYLLKEGQRWLTEARKETVMGQPTPKTPRQLREFLGKAGFCRLFIPGFAEMAAPLYPLTKPGTLFNWGPDQQKAYQEIKQALLTAPALGLPDLTKPFELFVDEKQGYAKGVLTQKLGPWRRPVAYLSKKLDPVAAGWPPCLRMVAAIAVLTKDAGKLTMGQPLVILAPHAVEALVKQPPDRWLSNARMTHYQALLLDTDRVQFGPVVALNPATLLPLPEEGLQHNCLDILAEAHGTRPDLTDQPLPDADHTWYTDGSSLLQEGQRKAGAAVTTETEVIWAKALPAGTSAQRAELIALTQALKMAEGKKLNVYTDSRYAFATAHIHGEIYRRRGWLTSEGKEIKNKDEILALLKALFLPKRLSIIHCPGHQKGHSAEARGNRMADQAARKAAITETPDTSTLLAGKRTADGSEFEKRTADGSEFESPKKKAKVE

SEQ ID NO: 3081 - protein, 2115 aa, synthetic construct; identical to SEQ ID NO: 2827

SEQ ID NO: 3082 - skipped

SEQ ID NO: 3083 - protein, 2096 aa, synthetic construct; identical to SEQ ID NO: 2786

SEQ ID NO: 3084 - protein, 2098 aa, synthetic construct; identical to SEQ ID NO: 2797

SEQ ID NO: 3085 - protein, 2096 aa, synthetic construct; identical to SEQ ID NO: 2830

SEQ ID NO: 3086 - protein, 2094 aa, synthetic construct
MPAAKRVKLDGGDKKYSIGLDIGTNSVGWAVITDEYKVPSKKFKVLGNTDRHSIKKNLIGALLFDSGETAEATRLKRTARRRYTRRKNRICYLQEIFSNEMAKVDDSFFHRLEESFLVEEDKKHERHPIFGNIVDEVAYHEKYPTIYHLRKKLVDSTDKADLRLIYLALAHMIKFRGHFLIEGDLNPDNSDVDKLFIQLVQTYNQLFEENPINASGVDAKAILSARLSKSRRLENLIAQLPGEKKNGLFGNLIALSLGLTPNFKSNFDLAEDAKLQLSKDTYDDDLDNLLAQIGDQYADLFLAAKNLSDAILLSDILRVNTEITKAPLSASMIKRYDEHHQDLTLLKALVRQQLPEKYKEIFFDQSKNGYAGYIDGGASQEEFYKFIKPILEKMDGTEELLVKLNREDLLRKQRTFDNGSIPHQIHLGELHAILRRQEDFYPFLKDNREKIEKILTFRIPYYVGPLARGNSRFAWMTRKSEETITPWNFEEVVDKGASAQSFIERMTNFDKNLPNEKVLPKHSLLYEYFTVYNELTKVKYVTEGMRKPAFLSGEQKKAIVDLLFKTNRKVTVKQLKEDYFKKIECFDSVEISGVEDRFNASLGTYHDLLKIIKDKDFLDNEENEDILEDIVLTLTLFEDREMIEERLKTYAHLFDDKVMKQLKRRRYTGWGRLSRKLINGIRDKQSGKTILDFLKSDGFANRNFMQLIHDDSLTFKEDIQKAQVSGQGDSLHEHIANLAGSPAIKKGILQTVKVVDELVKVMGRHKPENIVIEMARENQTTQKGQKNSRERMKRIEEGIKELGSQILKEHPVENTQLQNEKLYLYYLQNGRDMYVDQELDINRLSDYDVDHIVPQSFLKDDSIDNKVLTRSDKARGKSDNVPSEEVVKKMKNYWRQLLNAKLITQRKFDNLTKAERGGLSELDKAGFIKRQLVETRQITKHVAQILDSRMNTKYDENDKLIREVKVITLKSKLVSDFRKDFQFYKVREINNYHHAHDAYLNAVVGTALIKKYPKLESEFVYGDYKVYDVRKMIAKSEQEIGKATAKYFFYSNIMNFFKTEITLANGEIRKRPLIETNGETGEIVWDKGRDFATVRKVLSMPQVNIVKKTEVQTGGFSKESILPKRNSDKLIARKKDWDPKKYGGFDSPTVAYSVLVVAKVEKGKSKKLKSVKELLGITIMERSSFEKNPIDFLEAKGYKEVKKDLIIKLPKYSLFELENGRKRMLASAGELQKGNELALPSKYVNFLYLASHYEKLKGSPEDNEQKQLFVEQHKHYLDEIIEQISEFSKRVILADANLDKVLSAYNKHRDKPIREQAENIIHLFTLTNLGAPAAFKYFDTTIDRKRYTSTKEVLDATLIHQSITGLYETRIDLSQLGGDGGPAPAPAPAPGGTLNIEDEHRLHETSKEPDVSLGSTWLSDFPQAWAETGGMGLAVRQAPLIIPLKATSTPVSIKQYPMSQEARLGIKPHIQRLLDQGILVPCQSPWNTPLLPVKKPGTNDYRPVQDLREVNKRVEDIHPTVPNPYNLLSGLPPSHQWYTVLDLKDAFFCLRLHPTSQPLFAFEWRDPEMGISGQLTWTRLPQGFKNSPTLFNEALHRDLADFRIQHPDLILLQYVDDLLLAATSELDCQQGTRALLQTLGNLGYRASAKKAQICQKQVKYLGYLLKEGQRWLTEARKETVMGQPTPKTPRQLREFLGKAGFCRLFIPGFAEMAAPLYPLTKPGTLFNWGPDQQKAYQEIKQALLTAPALGLPDLTKPFELFVDEKQGYAKGVLTQKLGPWRRPVAYLSKKLDPVAAGWPPCLRMVAAIAVLTKDAGKLTMGQPLVILAPHAVEALVKQPPDRWLSNARMTHYQALLLDTDRVQFGPVVALNPATLLPLPEEGLQHNCLDILAEAHGTRPDLTDQPLPDADHTWYTDGSSLLQEGQRKAGAAVTTETEVIWAKALPAGTSAQRAELIALTQALKMAEGKKLNVYTDSRYAFATAHIHGEIYRRRGWLTSEGKEIKNKDEILALLKALFLPKRLSIIHCPGHQKGHSAEARGNRMADQAARKAAITETPDTSTLLAGKRTADGSEFEKRTADGSEFESPKKKAKVE

SEQ ID NO: 3087 - protein, 2091 aa, synthetic construct; identical to SEQ ID NO: 2808

SEQ ID NO: 3088 - protein, 2096 aa, synthetic construct; identical to SEQ ID NO: 2857

SEQ ID NO: 3089 - protein, 2091 aa, synthetic construct; identical to SEQ ID NO: 2855

SEQ ID NO: 3090 - skipped

SEQ ID NO: 3091 - protein, 2096 aa, synthetic construct; identical to SEQ ID NO: 2798

SEQ ID NO: 3092 - protein, 2100 aa, synthetic construct; identical to SEQ ID NO: 2819

SEQ ID NO: 3093 - protein, 2094 aa, synthetic construct; identical to SEQ ID NO: 2835

SEQ ID NO: 3094 - protein, 2089 aa, synthetic construct
MPAAKRVKLDGGDKKYSIGLDIGTNSVGWAVITDEYKVPSKKFKVLGNTDRHSIKKNLIGALLFDSGETAEATRLKRTARRRYTRRKNRICYLQEIFSNEMAKVDDSFFHRLEESFLVEEDKKHERHPIFGNIVDEVAYHEKYPTIYHLRKKLVDSTDKADLRLIYLALAHMIKFRGHFLIEGDLNPDNSDVDKLFIQLVQTYNQLFEENPINASGVDAKAILSARLSKSRRLENLIAQLPGEKKNGLFGNLIALSLGLTPNFKSNFDLAEDAKLQLSKDTYDDDLDNLLAQIGDQYADLFLAAKNLSDAILLSDILRVNTEITKAPLSASMIKRYDEHHQDLTLLKALVRQQLPEKYKEIFFDQSKNGYAGYIDGGASQEEFYKFIKPILEKMDGTEELLVKLNREDLLRKQRTFDNGSIPHQIHLGELHAILRRQEDFYPFLKDNREKIEKILTFRIPYYVGPLARGNSRFAWMTRKSEETITPWNFEEVVDKGASAQSFIERMTNFDKNLPNEKVLPKHSLLYEYFTVYNELTKVKYVTEGMRKPAFLSGEQKKAIVDLLFKTNRKVTVKQLKEDYFKKIECFDSVEISGVEDRFNASLGTYHDLLKIIKDKDFLDNEENEDILEDIVLTLTLFEDREMIEERLKTYAHLFDDKVMKQLKRRRYTGWGRLSRKLINGIRDKQSGKTILDFLKSDGFANRNFMQLIHDDSLTFKEDIQKAQVSGQGDSLHEHIANLAGSPAIKKGILQTVKVVDELVKVMGRHKPENIVIEMARENQTTQKGQKNSRERMKRIEEGIKELGSQILKEHPVENTQLQNEKLYLYYLQNGRDMYVDQELDINRLSDYDVDHIVPQSFLKDDSIDNKVLTRSDKARGKSDNVPSEEVVKKMKNYWRQLLNAKLITQRKFDNLTKAERGGLSELDKAGFIKRQLVETRQITKHVAQILDSRMNTKYDENDKLIREVKVITLKSKLVSDFRKDFQFYKVREINNYHHAHDAYLNAVVGTALIKKYPKLESEFVYGDYKVYDVRKMIAKSEQEIGKATAKYFFYSNIMNFFKTEITLANGEIRKRPLIETNGETGEIVWDKGRDFATVRKVLSMPQVNIVKKTEVQTGGFSKESILPKRNSDKLIARKKDWDPKKYGGFDSPTVAYSVLVVAKVEKGKSKKLKSVKELLGITIMERSSFEKNPIDFLEAKGYKEVKKDLIIKLPKYSLFELENGRKRMLASAGELQKGNELALPSKYVNFLYLASHYEKLKGSPEDNEQKQLFVEQHKHYLDEIIEQISEFSKRVILADANLDKVLSAYNKHRDKPIREQAENIIHLFTLTNLGAPAAFKYFDTTIDRKRYTSTKEVLDATLIHQSITGLYETRIDLSQLGGDGGGGGGGGTLNIEDEHRLHETSKEPDVSLGSTWLSDFPQAWAETGGMGLAVRQAPLIIPLKATSTPVSIKQYPMSQEARLGIKPHIQRLLDQGILVPCQSPWNTPLLPVKKPGTNDYRPVQDLREVNKRVEDIHPTVPNPYNLLSGLPPSHQWYTVLDLKDAFFCLRLHPTSQPLFAFEWRDPEMGISGQLTWTRLPQGFKNSPTLFNEALHRDLADFRIQHPDLILLQYVDDLLLAATSELDCQQGTRALLQTLGNLGYRASAKKAQICQKQVKYLGYLLKEGQRWLTEARKETVMGQPTPKTPRQLREFLGKAGFCRLFIPGFAEMAAPLYPLTKPGTLFNWGPDQQKAYQEIKQALLTAPALGLPDLTKPFELFVDEKQGYAKGVLTQKLGPWRRPVAYLSKKLDPVAAGWPPCLRMVAAIAVLTKDAGKLTMGQPLVILAPHAVEALVKQPPDRWLSNARMTHYQALLLDTDRVQFGPVVALNPATLLPLPEEGLQHNCLDILAEAHGTRPDLTDQPLPDADHTWYTDGSSLLQEGQRKAGAAVTTETEVIWAKALPAGTSAQRAELIALTQALKMAEGKKLNVYTDSRYAFATAHIHGEIYRRRGWLTSEGKEIKNKDEILALLKALFLPKRLSIIHCPGHQKGHSAEARGNRMADQAARKAAITETPDTSTLLAGKRTADGSEFEKRTADGSEFESPKKKAKVE

SEQ ID NO: 3095 - skipped

SEQ ID NO: 3096 - protein, 2092 aa, synthetic construct; identical to SEQ ID NO: 2790

SEQ ID NO: 3097 - protein, 2093 aa, synthetic construct; identical to SEQ ID NO: 2849

SEQ ID NO: 3098 - protein, 2094 aa, synthetic construct; identical to SEQ ID NO: 2793

SEQ ID NO: 3099 - protein, 2100 aa, synthetic construct; identical to SEQ ID NO: 2836

SEQ ID NO: 3100 - skipped

SEQ ID NO: 3101 - protein, 2094 aa, synthetic construct; identical to SEQ ID NO: 2846

SEQ ID NO: 3102 - skipped

SEQ ID NO: 3103 - protein, 2096 aa, synthetic construct; identical to SEQ ID NO: 2815

SEQ ID NO: 3104-3106 - skipped (3 entries)

SEQ ID NO: 3107 - protein, 2091 aa, synthetic construct; identical to SEQ ID NO: 2820

SEQ ID NO: 3108 - protein, 2096 aa, synthetic construct; identical to SEQ ID NO: 2782

SEQ ID NO: 3109 - protein, 2096 aa, synthetic construct; identical to SEQ ID NO: 2860

SEQ ID NO: 3110 - protein, 2095 aa, synthetic construct
MPAAKRVKLDGGDKKYSIGLDIGTNSVGWAVITDEYKVPSKKFKVLGNTDRHSIKKNLIGALLFDSGETAEATRLKRTARRRYTRRKNRICYLQEIFSNEMAKVDDSFFHRLEESFLVEEDKKHERHPIFGNIVDEVAYHEKYPTIYHLRKKLVDSTDKADLRLIYLALAHMIKFRGHFLIEGDLNPDNSDVDKLFIQLVQTYNQLFEENPINASGVDAKAILSARLSKSRRLENLIAQLPGEKKNGLFGNLIALSLGLTPNFKSNFDLAEDAKLQLSKDTYDDDLDNLLAQIGDQYADLFLAAKNLSDAILLSDILRVNTEITKAPLSASMIKRYDEHHQDLTLLKALVRQQLPEKYKEIFFDQSKNGYAGYIDGGASQEEFYKFIKPILEKMDGTEELLVKLNREDLLRKQRTFDNGSIPHQIHLGELHAILRRQEDFYPFLKDNREKIEKILTFRIPYYVGPLARGNSRFAWMTRKSEETITPWNFEEVVDKGASAQSFIERMTNFDKNLPNEKVLPKHSLLYEYFTVYNELTKVKYVTEGMRKPAFLSGEQKKAIVDLLFKTNRKVTVKQLKEDYFKKIECFDSVEISGVEDRFNASLGTYHDLLKIIKDKDFLDNEENEDILEDIVLTLTLFEDREMIEERLKTYAHLFDDKVMKQLKRRRYTGWGRLSRKLINGIRDKQSGKTILDFLKSDGFANRNFMQLIHDDSLTFKEDIQKAQVSGQGDSLHEHIANLAGSPAIKKGILQTVKVVDELVKVMGRHKPENIVIEMARENQTTQKGQKNSRERMKRIEEGIKELGSQILKEHPVENTQLQNEKLYLYYLQNGRDMYVDQELDINRLSDYDVDHIVPQSFLKDDSIDNKVLTRSDKARGKSDNVPSEEVVKKMKNYWRQLLNAKLITQRKFDNLTKAERGGLSELDKAGFIKRQLVETRQITKHVAQILDSRMNTKYDENDKLIREVKVITLKSKLVSDFRKDFQFYKVREINNYHHAHDAYLNAVVGTALIKKYPKLESEFVYGDYKVYDVRKMIAKSEQEIGKATAKYFFYSNIMNFFKTEITLANGEIRKRPLIETNGETGEIVWDKGRDFATVRKVLSMPQVNIVKKTEVQTGGFSKESILPKRNSDKLIARKKDWDPKKYGGFDSPTVAYSVLVVAKVEKGKSKKLKSVKELLGITIMERSSFEKNPIDFLEAKGYKEVKKDLIIKLPKYSLFELENGRKRMLASAGELQKGNELALPSKYVNFLYLASHYEKLKGSPEDNEQKQLFVEQHKHYLDEIIEQISEFSKRVILADANLDKVLSAYNKHRDKPIREQAENIIHLFTLTNLGAPAAFKYFDTTIDRKRYTSTKEVLDATLIHQSITGLYETRIDLSQLGGDGGGGGGSGGGGSGGTLNIEDEHRLHETSKEPDVSLGSTWLSDFPQAWAETGGMGLAVRQAPLIIPLKATSTPVSIKQYPMSQEARLGIKPHIQRLLDQGILVPCQSPWNTPLLPVKKPGTNDYRPVQDLREVNKRVEDIHPTVPNPYNLLSGLPPSHQWYTVLDLKDAFFCLRLHPTSQPLFAFEWRDPEMGISGQLTWTRLPQGFKNSPTLFNEALHRDLADFRIQHPDLILLQYVDDLLLAATSELDCQQGTRALLQTLGNLGYRASAKKAQICQKQVKYLGYLLKEGQRWLTEARKETVMGQPTPKTPRQLREFLGKAGFCRLFIPGFAEMAAPLYPLTKPGTLFNWGPDQQKAYQEIKQALLTAPALGLPDLTKPFELFVDEKQGYAKGVLTQKLGPWRRPVAYLSKKLDPVAAGWPPCLRMVAAIAVLTKDAGKLTMGQPLVILAPHAVEALVKQPPDRWLSNARMTHYQALLLDTDRVQFGPVVALNPATLLPLPEEGLQHNCLDILAEAHGTRPDLTDQPLPDADHTWYTDGSSLLQEGQRKAGAAVTTETEVIWAKALPAGTSAQRAELIALTQALKMAEGKKLNVYTDSRYAFATAHIHGEIYRRRGWLTSEGKEIKNKDEILALLKALFLPKRLSIIHCPGHQKGHSAEARGNRMADQAARKAAITETPDTSTLLAGKRTADGSEFEKRTADGSEFESPKKKAKVE

SEQ ID NO: 3111 - protein, 2094 aa, synthetic construct; identical to SEQ ID NO: 2800

SEQ ID NO: 3112 - protein, 2096 aa, synthetic construct; identical to SEQ ID NO: 2792

SEQ ID NO: 3113 - protein, 2091 aa, synthetic construct
MPAAKRVKLDGGDKKYSIGLDIGTNSVGWAVITDEYKVPSKKFKVLGNTDRHSIKKNLIGALLFDSGETAEATRLKRTARRRYTRRKNRICYLQEIFSNEMAKVDDSFFHRLEESFLVEEDKKHERHPIFGNIVDEVAYHEKYPTIYHLRKKLVDSTDKADLRLIYLALAHMIKFRGHFLIEGDLNPDNSDVDKLFIQLVQTYNQLFEENPINASGVDAKAILSARLSKSRRLENLIAQLPGEKKNGLFGNLIALSLGLTPNFKSNFDLAEDAKLQLSKDTYDDDLDNLLAQIGDQYADLFLAAKNLSDAILLSDILRVNTEITKAPLSASMIKRYDEHHQDLTLLKALVRQQLPEKYKEIFFDQSKNGYAGYIDGGASQEEFYKFIKPILEKMDGTEELLVKLNREDLLRKQRTFDNGSIPHQIHLGELHAILRRQEDFYPFLKDNREKIEKILTFRIPYYVGPLARGNSRFAWMTRKSEETITPWNFEEVVDKGASAQSFIERMTNFDKNLPNEKVLPKHSLLYEYFTVYNELTKVKYVTEGMRKPAFLSGEQKKAIVDLLFKTNRKVTVKQLKEDYFKKIECFDSVEISGVEDRFNASLGTYHDLLKIIKDKDFLDNEENEDILEDIVLTLTLFEDREMIEERLKTYAHLFDDKVMKQLKRRRYTGWGRLSRKLINGIRDKQSGKTILDFLKSDGFANRNFMQLIHDDSLTFKEDIQKAQVSGQGDSLHEHIANLAGSPAIKKGILQTVKVVDELVKVMGRHKPENIVIEMARENQTTQKGQKNSRERMKRIEEGIKELGSQILKEHPVENTQLQNEKLYLYYLQNGRDMYVDQELDINRLSDYDVDHIVPQSFLKDDSIDNKVLTRSDKARGKSDNVPSEEVVKKMKNYWRQLLNAKLITQRKFDNLTKAERGGLSELDKAGFIKRQLVETRQITKHVAQILDSRMNTKYDENDKLIREVKVITLKSKLVSDFRKDFQFYKVREINNYHHAHDAYLNAVVGTALIKKYPKLESEFVYGDYKVYDVRKMIAKSEQEIGKATAKYFFYSNIMNFFKTEITLANGEIRKRPLIETNGETGEIVWDKGRDFATVRKVLSMPQVNIVKKTEVQTGGFSKESILPKRNSDKLIARKKDWDPKKYGGFDSPTVAYSVLVVAKVEKGKSKKLKSVKELLGITIMERSSFEKNPIDFLEAKGYKEVKKDLIIKLPKYSLFELENGRKRMLASAGELQKGNELALPSKYVNFLYLASHYEKLKGSPEDNEQKQLFVEQHKHYLDEIIEQISEFSKRVILADANLDKVLSAYNKHRDKPIREQAENIIHLFTLTNLGAPAAFKYFDTTIDRKRYTSTKEVLDATLIHQSITGLYETRIDLSQLGGDGGGGSGSSGGTLNIEDEHRLHETSKEPDVSLGSTWLSDFPQAWAETGGMGLAVRQAPLIIPLKATSTPVSIKQYPMSQEARLGIKPHIQRLLDQGILVPCQSPWNTPLLPVKKPGTNDYRPVQDLREVNKRVEDIHPTVPNPYNLLSGLPPSHQWYTVLDLKDAFFCLRLHPTSQPLFAFEWRDPEMGISGQLTWTRLPQGFKNSPTLFNEALHRDLADFRIQHPDLILLQYVDDLLLAATSELDCQQGTRALLQTLGNLGYRASAKKAQICQKQVKYLGYLLKEGQRWLTEARKETVMGQPTPKTPRQLREFLGKAGFCRLFIPGFAEMAAPLYPLTKPGTLFNWGPDQQKAYQEIKQALLTAPALGLPDLTKPFELFVDEKQGYAKGVLTQKLGPWRRPVAYLSKKLDPVAAGWPPCLRMVAAIAVLTKDAGKLTMGQPLVILAPHAVEALVKQPPDRWLSNARMTHYQALLLDTDRVQFGPVVALNPATLLPLPEEGLQHNCLDILAEAHGTRPDLTDQPLPDADHTWYTDGSSLLQEGQRKAGAAVTTETEVIWAKALPAGTSAQRAELIALTQALKMAEGKKLNVYTDSRYAFATAHIHGEIYRRRGWLTSEGKEIKNKDEILALLKALFLPKRLSIIHCPGHQKGHSAEARGNRMADQAARKAAITETPDTSTLLAGKRTADGSEFEKRTADGSEFESPKKKAKVE

SEQ ID NO: 3114 - protein, 2090 aa, synthetic construct; identical to SEQ ID NO: 2834

SEQ ID NO: 3115 - skipped

SEQ ID NO: 3116 - protein, 2096 aa, synthetic construct; identical to SEQ ID NO: 2789

SEQ ID NO: 3117 - protein, 2094 aa, synthetic construct; identical to SEQ ID NO: 2848

SEQ ID NO: 3118 - protein, 2096 aa, synthetic construct; identical to SEQ ID NO: 2805

SEQ ID NO: 3119 - skipped

SEQ ID NO: 3120 - protein, 2115 aa, synthetic construct; identical to SEQ ID NO: 2813

SEQ ID NO: 3121 - protein, 2094 aa, synthetic construct
MPAAKRVKLDGGDKKYSIGLDIGTNSVGWAVITDEYKVPSKKFKVLGNTDRHSIKKNLIGALLFDSGETAEATRLKRTARRRYTRRKNRICYLQEIFSNEMAKVDDSFFHRLEESFLVEEDKKHERHPIFGNIVDEVAYHEKYPTIYHLRKKLVDSTDKADLRLIYLALAHMIKFRGHFLIEGDLNPDNSDVDKLFIQLVQTYNQLFEENPINASGVDAKAILSARLSKSRRLENLIAQLPGEKKNGLFGNLIALSLGLTPNFKSNFDLAEDAKLQLSKDTYDDDLDNLLAQIGDQYADLFLAAKNLSDAILLSDILRVNTEITKAPLSASMIKRYDEHHQDLTLLKALVRQQLPEKYKEIFFDQSKNGYAGYIDGGASQEEFYKFIKPILEKMDGTEELLVKLNREDLLRKQRTFDNGSIPHQIHLGELHAILRRQEDFYPFLKDNREKIEKILTFRIPYYVGPLARGNSRFAWMTRKSEETITPWNFEEVVDKGASAQSFIERMTNFDKNLPNEKVLPKHSLLYEYFTVYNELTKVKYVTEGMRKPAFLSGEQKKAIVDLLFKTNRKVTVKQLKEDYFKKIECFDSVEISGVEDRFNASLGTYHDLLKIIKDKDFLDNEENEDILEDIVLTLTLFEDREMIEERLKTYAHLFDDKVMKQLKRRRYTGWGRLSRKLINGIRDKQSGKTILDFLKSDGFANRNFMQLIHDDSLTFKEDIQKAQVSGQGDSLHEHIANLAGSPAIKKGILQTVKVVDELVKVMGRHKPENIVIEMARENQTTQKGQKNSRERMKRIEEGIKELGSQILKEHPVENTQLQNEKLYLYYLQNGRDMYVDQELDINRLSDYDVDHIVPQSFLKDDSIDNKVLTRSDKARGKSDNVPSEEVVKKMKNYWRQLLNAKLITQRKFDNLTKAERGGLSELDKAGFIKRQLVETRQITKHVAQILDSRMNTKYDENDKLIREVKVITLKSKLVSDFRKDFQFYKVREINNYHHAHDAYLNAVVGTALIKKYPKLESEFVYGDYKVYDVRKMIAKSEQEIGKATAKYFFYSNIMNFFKTEITLANGEIRKRPLIETNGETGEIVWDKGRDFATVRKVLSMPQVNIVKKTEVQTGGFSKESILPKRNSDKLIARKKDWDPKKYGGFDSPTVAYSVLVVAKVEKGKSKKLKSVKELLGITIMERSSFEKNPIDFLEAKGYKEVKKDLIIKLPKYSLFELENGRKRMLASAGELQKGNELALPSKYVNFLYLASHYEKLKGSPEDNEQKQLFVEQHKHYLDEIIEQISEFSKRVILADANLDKVLSAYNKHRDKPIREQAENIIHLFTLTNLGAPAAFKYFDTTIDRKRYTSTKEVLDATLIHQSITGLYETRIDLSQLGGDGGGGSGGGGSSGGTLNIEDEHRLHETSKEPDVSLGSTWLSDFPQAWAETGGMGLAVRQAPLIIPLKATSTPVSIKQYPMSQEARLGIKPHIQRLLDQGILVPCQSPWNTPLLPVKKPGTNDYRPVQDLREVNKRVEDIHPTVPNPYNLLSGLPPSHQWYTVLDLKDAFFCLRLHPTSQPLFAFEWRDPEMGISGQLTWTRLPQGFKNSPTLFNEALHRDLADFRIQHPDLILLQYVDDLLLAATSELDCQQGTRALLQTLGNLGYRASAKKAQICQKQVKYLGYLLKEGQRWLTEARKETVMGQPTPKTPRQLREFLGKAGFCRLFIPGFAEMAAPLYPLTKPGTLFNWGPDQQKAYQEIKQALLTAPALGLPDLTKPFELFVDEKQGYAKGVLTQKLGPWRRPVAYLSKKLDPVAAGWPPCLRMVAAIAVLTKDAGKLTMGQPLVILAPHAVEALVKQPPDRWLSNARMTHYQALLLDTDRVQFGPVVALNPATLLPLPEEGLQHNCLDILAEAHGTRPDLTDQPLPDADHTWYTDGSSLLQEGQRKAGAAVTTETEVIWAKALPAGTSAQRAELIALTQALKMAEGKKLNVYTDSRYAFATAHIHGEIYRRRGWLTSEGKEIKNKDEILALLKALFLPKRLSIIHCPGHQKGHSAEARGNRMADQAARKAAITETPDTSTLLAGKRTADGSEFEKRTADGSEFESPKKKAKVE

SEQ ID NO: 3122 - skipped

SEQ ID NO: 3123 - protein, 2090 aa, synthetic construct; identical to SEQ ID NO: 2823

SEQ ID NO: 3124 - protein, 2094 aa, synthetic construct; identical to SEQ ID NO: 2833

SEQ ID NO: 3125 - protein, 2096 aa, synthetic construct; identical to SEQ ID NO: 2794

SEQ ID NO: 3126 - protein, 2100 aa, synthetic construct; identical to SEQ ID NO: 2802

SEQ ID NO: 3127 - protein, 2096 aa, synthetic construct; identical to SEQ ID NO: 2839

SEQ ID NO: 3128-3129 - skipped (2 entries)

SEQ ID NO: 3130 - protein, 2094 aa, synthetic construct; identical to SEQ ID NO: 2801

SEQ ID NO: 3131 - protein, 2096 aa, synthetic construct
MPAAKRVKLDGGDKKYSIGLDIGTNSVGWAVITDEYKVPSKKFKVLGNTDRHSIKKNLIGALLFDSGETAEATRLKRTARRRYTRRKNRICYLQEIFSNEMAKVDDSFFHRLEESFLVEEDKKHERHPIFGNIVDEVAYHEKYPTIYHLRKKLVDSTDKADLRLIYLALAHMIKFRGHFLIEGDLNPDNSDVDKLFIQLVQTYNQLFEENPINASGVDAKAILSARLSKSRRLENLIAQLPGEKKNGLFGNLIALSLGLTPNFKSNFDLAEDAKLQLSKDTYDDDLDNLLAQIGDQYADLFLAAKNLSDAILLSDILRVNTEITKAPLSASMIKRYDEHHQDLTLLKALVRQQLPEKYKEIFFDQSKNGYAGYIDGGASQEEFYKFIKPILEKMDGTEELLVKLNREDLLRKQRTFDNGSIPHQIHLGELHAILRRQEDFYPFLKDNREKIEKILTFRIPYYVGPLARGNSRFAWMTRKSEETITPWNFEEVVDKGASAQSFIERMTNFDKNLPNEKVLPKHSLLYEYFTVYNELTKVKYVTEGMRKPAFLSGEQKKAIVDLLFKTNRKVTVKQLKEDYFKKIECFDSVEISGVEDRFNASLGTYHDLLKIIKDKDFLDNEENEDILEDIVLTLTLFEDREMIEERLKTYAHLFDDKVMKQLKRRRYTGWGRLSRKLINGIRDKQSGKTILDFLKSDGFANRNFMQLIHDDSLTFKEDIQKAQVSGQGDSLHEHIANLAGSPAIKKGILQTVKVVDELVKVMGRHKPENIVIEMARENQTTQKGQKNSRERMKRIEEGIKELGSQILKEHPVENTQLQNEKLYLYYLQNGRDMYVDQELDINRLSDYDVDHIVPQSFLKDDSIDNKVLTRSDKARGKSDNVPSEEVVKKMKNYWRQLLNAKLITQRKFDNLTKAERGGLSELDKAGFIKRQLVETRQITKHVAQILDSRMNTKYDENDKLIREVKVITLKSKLVSDFRKDFQFYKVREINNYHHAHDAYLNAVVGTALIKKYPKLESEFVYGDYKVYDVRKMIAKSEQEIGKATAKYFFYSNIMNFFKTEITLANGEIRKRPLIETNGETGEIVWDKGRDFATVRKVLSMPQVNIVKKTEVQTGGFSKESILPKRNSDKLIARKKDWDPKKYGGFDSPTVAYSVLVVAKVEKGKSKKLKSVKELLGITIMERSSFEKNPIDFLEAKGYKEVKKDLIIKLPKYSLFELENGRKRMLASAGELQKGNELALPSKYVNFLYLASHYEKLKGSPEDNEQKQLFVEQHKHYLDEIIEQISEFSKRVILADANLDKVLSAYNKHRDKPIREQAENIIHLFTLTNLGAPAAFKYFDTTIDRKRYTSTKEVLDATLIHQSITGLYETRIDLSQLGGDGGGSSEAAAKGGSGGTLNIEDEHRLHETSKEPDVSLGSTWLSDFPQAWAETGGMGLAVRQAPLIIPLKATSTPVSIKQYPMSQEARLGIKPHIQRLLDQGILVPCQSPWNTPLLPVKKPGTNDYRPVQDLREVNKRVEDIHPTVPNPYNLLSGLPPSHQWYTVLDLKDAFFCLRLHPTSQPLFAFEWRDPEMGISGQLTWTRLPQGFKNSPTLFNEALHRDLADFRIQHPDLILLQYVDDLLLAATSELDCQQGTRALLQTLGNLGYRASAKKAQICQKQVKYLGYLLKEGQRWLTEARKETVMGQPTPKTPRQLREFLGKAGFCRLFIPGFAEMAAPLYPLTKPGTLFNWGPDQQKAYQEIKQALLTAPALGLPDLTKPFELFVDEKQGYAKGVLTQKLGPWRRPVAYLSKKLDPVAAGWPPCLRMVAAIAVLTKDAGKLTMGQPLVILAPHAVEALVKQPPDRWLSNARMTHYQALLLDTDRVQFGPVVALNPATLLPLPEEGLQHNCLDILAEAHGTRPDLTDQPLPDADHTWYTDGSSLLQEGQRKAGAAVTTETEVIWAKALPAGTSAQRAELIALTQALKMAEGKKLNVYTDSRYAFATAHIHGEIYRRRGWLTSEGKEIKNKDEILALLKALFLPKRLSIIHCPGHQKGHSAEARGNRMADQAARKAAITETPDTSTLLAGKRTADGSEFEKRTADGSEFESPKKKAKVE

SEQ ID NO: 3132-3135 - skipped (4 entries)

SEQ ID NO: 3136 - protein, 2096 aa, synthetic construct
MPAAKRVKLDGGDKKYSIGLDIGTNSVGWAVITDEYKVPSKKFKVLGNTDRHSIKKNLIGALLFDSGETAEATRLKRTARRRYTRRKNRICYLQEIFSNEMAKVDDSFFHRLEESFLVEEDKKHERHPIFGNIVDEVAYHEKYPTIYHLRKKLVDSTDKADLRLIYLALAHMIKFRGHFLIEGDLNPDNSDVDKLFIQLVQTYNQLFEENPINASGVDAKAILSARLSKSRRLENLIAQLPGEKKNGLFGNLIALSLGLTPNFKSNFDLAEDAKLQLSKDTYDDDLDNLLAQIGDQYADLFLAAKNLSDAILLSDILRVNTEITKAPLSASMIKRYDEHHQDLTLLKALVRQQLPEKYKEIFFDQSKNGYAGYIDGGASQEEFYKFIKPILEKMDGTEELLVKLNREDLLRKQRTFDNGSIPHQIHLGELHAILRRQEDFYPFLKDNREKIEKILTFRIPYYVGPLARGNSRFAWMTRKSEETITPWNFEEVVDKGASAQSFIERMTNFDKNLPNEKVLPKHSLLYEYFTVYNELTKVKYVTEGMRKPAFLSGEQKKAIVDLLFKTNRKVTVKQLKEDYFKKIECFDSVEISGVEDRFNASLGTYHDLLKIIKDKDFLDNEENEDILEDIVLTLTLFEDREMIEERLKTYAHLFDDKVMKQLKRRRYTGWGRLSRKLINGIRDKQSGKTILDFLKSDGFANRNFMQLIHDDSLTFKEDIQKAQVSGQGDSLHEHIANLAGSPAIKKGILQTVKVVDELVKVMGRHKPENIVIEMARENQTTQKGQKNSRERMKRIEEGIKELGSQILKEHPVENTQLQNEKLYLYYLQNGRDMYVDQELDINRLSDYDVDHIVPQSFLKDDSIDNKVLTRSDKARGKSDNVPSEEVVKKMKNYWRQLLNAKLITQRKFDNLTKAERGGLSELDKAGFIKRQLVETRQITKHVAQILDSRMNTKYDENDKLIREVKVITLKSKLVSDFRKDFQFYKVREINNYHHAHDAYLNAVVGTALIKKYPKLESEFVYGDYKVYDVRKMIAKSEQEIGKATAKYFFYSNIMNFFKTEITLANGEIRKRPLIETNGETGEIVWDKGRDFATVRKVLSMPQVNIVKKTEVQTGGFSKESILPKRNSDKLIARKKDWDPKKYGGFDSPTVAYSVLVVAKVEKGKSKKLKSVKELLGITIMERSSFEKNPIDFLEAKGYKEVKKDLIIKLPKYSLFELENGRKRMLASAGELQKGNELALPSKYVNFLYLASHYEKLKGSPEDNEQKQLFVEQHKHYLDEIIEQISEFSKRVILADANLDKVLSAYNKHRDKPIREQAENIIHLFTLTNLGAPAAFKYFDTTIDRKRYTSTKEVLDATLIHQSITGLYETRIDLSQLGGDGGGGGPAPEAAAKGGTLNIEDEHRLHETSKEPDVSLGSTWLSDFPQAWAETGGMGLAVRQAPLIIPLKATSTPVSIKQYPMSQEARLGIKPHIQRLLDQGILVPCQSPWNTPLLPVKKPGTNDYRPVQDLREVNKRVEDIHPTVPNPYNLLSGLPPSHQWYTVLDLKDAFFCLRLHPTSQPLFAFEWRDPEMGISGQLTWTRLPQGFKNSPTLFNEALHRDLADFRIQHPDLILLQYVDDLLLAATSELDCQQGTRALLQTLGNLGYRASAKKAQICQKQVKYLGYLLKEGQRWLTEARKETVMGQPTPKTPRQLREFLGKAGFCRLFIPGFAEMAAPLYPLTKPGTLFNWGPDQQKAYQEIKQALLTAPALGLPDLTKPFELFVDEKQGYAKGVLTQKLGPWRRPVAYLSKKLDPVAAGWPPCLRMVAAIAVLTKDAGKLTMGQPLVILAPHAVEALVKQPPDRWLSNARMTHYQALLLDTDRVQFGPVVALNPATLLPLPEEGLQHNCLDILAEAHGTRPDLTDQPLPDADHTWYTDGSSLLQEGQRKAGAAVTTETEVIWAKALPAGTSAQRAELIALTQALKMAEGKKLNVYTDSRYAFATAHIHGEIYRRRGWLTSEGKEIKNKDEILALLKALFLPKRLSIIHCPGHQKGHSAEARGNRMADQAARKAAITETPDTSTLLAGKRTADGSEFEKRTADGSEFESPKKKAKVE

SEQ ID NO: 3137-3999 - skipped (863 entries)

SEQ ID NO: 4000 - protein, 1381 aa, synthetic construct
MPAAKRVKLDGGDKKYSIGLDIGTNSVGWAVITDEYKVPSKKFKVLGNTDRHSIKKNLIGALLFDSGETAEATRLKRTARRRYTRRKNRICYLQEIFSNEMAKVDDSFFHRLEESFLVEEDKKHERHPIFGNIVDEVAYHEKYPTIYHLRKKLVDSTDKADLRLIYLALAHMIKFRGHFLIEGDLNPDNSDVDKLFIQLVQTYNQLFEENPINASGVDAKAILSARLSKSRRLENLIAQLPGEKKNGLFGNLIALSLGLTPNFKSNFDLAEDAKLQLSKDTYDDDLDNLLAQIGDQYADLFLAAKNLSDAILLSDILRVNTEITKAPLSASMIKRYDEHHQDLTLLKALVRQQLPEKYKEIFFDQSKNGYAGYIDGGASQEEFYKFIKPILEKMDGTEELLVKLNREDLLRKQRTFDNGSIPHQIHLGELHAILRRQEDFYPFLKDNREKIEKILTFRIPYYVGPLARGNSRFAWMTRKSEETITPWNFEEVVDKGASAQSFIERMTNFDKNLPNEKVLPKHSLLYEYFTVYNELTKVKYVTEGMRKPAFLSGEQKKAIVDLLFKTNRKVTVKQLKEDYFKKIECFDSVEISGVEDRFNASLGTYHDLLKIIKDKDFLDNEENEDILEDIVLTLTLFEDREMIEERLKTYAHLFDDKVMKQLKRRRYTGWGRLSRKLINGIRDKQSGKTILDFLKSDGFANRNFMQLIHDDSLTFKEDIQKAQVSGQGDSLHEHIANLAGSPAIKKGILQTVKVVDELVKVMGRHKPENIVIEMARENQTTQKGQKNSRERMKRIEEGIKELGSQILKEHPVENTQLQNEKLYLYYLQNGRDMYVDQELDINRLSDYDVDHIVPQSFLKDDSIDNKVLTRSDKARGKSDNVPSEEVVKKMKNYWRQLLNAKLITQRKFDNLTKAERGGLSELDKAGFIKRQLVETRQITKHVAQILDSRMNTKYDENDKLIREVKVITLKSKLVSDFRKDFQFYKVREINNYHHAHDAYLNAVVGTALIKKYPKLESEFVYGDYKVYDVRKMIAKSEQEIGKATAKYFFYSNIMNFFKTEITLANGEIRKRPLIETNGETGEIVWDKGRDFATVRKVLSMPQVNIVKKTEVQTGGFSKESILPKRNSDKLIARKKDWDPKKYGGFDSPTVAYSVLVVAKVEKGKSKKLKSVKELLGITIMERSSFEKNPIDFLEAKGYKEVKKDLIIKLPKYSLFELENGRKRMLASAGELQKGNELALPSKYVNFLYLASHYEKLKGSPEDNEQKQLFVEQHKHYLDEIIEQISEFSKRVILADANLDKVLSAYNKHRDKPIREQAENIIHLFTLTNLGAPAAFKYFDTTIDRKRYTSTKEVLDATLIHQSITGLYETRIDLSQLGGDGG

SEQ ID NO: 4001 - protein, 31 aa, synthetic construct
AGKRTADGSEFEKRTADGSEFESPKKKAKVE

SEQ ID NO: 4002 - protein, 2138 aa, synthetic construct
MPAAKRVKLDGGDKKYSIGLDIGTNSVGWAVITDEYKVPSKKFKVLGNTDRHSIKKNLIGALLFDSGETAEATRLKRTARRRYTRRKNRICYLQEIFSNEMAKVDDSFFHRLEESFLVEEDKKHERHPIFGNIVDEVAYHEKYPTIYHLRKKLVDSTDKADLRLIYLALAHMIKFRGHFLIEGDLNPDNSDVDKLFIQLVQTYNQLFEENPINASGVDAKAILSARLSKSRRLENLIAQLPGEKKNGLFGNLIALSLGLTPNFKSNFDLAEDAKLQLSKDTYDDDLDNLLAQIGDQYADLFLAAKNLSDAILLSDILRVNTEITKAPLSASMIKRYDEHHQDLTLLKALVRQQLPEKYKEIFFDQSKNGYAGYIDGGASQEEFYKFIKPILEKMDGTEELLVKLNREDLLRKQRTFDNGSIPHQIHLGELHAILRRQEDFYPFLKDNREKIEKILTFRIPYYVGPLARGNSRFAWMTRKSEETITPWNFEEVVDKGASAQSFIERMTNFDKNLPNEKVLPKHSLLYEYFTVYNELTKVKYVTEGMRKPAFLSGEQKKAIVDLLFKTNRKVTVKQLKEDYFKKIECFDSVEISGVEDRFNASLGTYHDLLKIIKDKDFLDNEENEDILEDIVLTLTLFEDREMIEERLKTYAHLFDDKVMKQLKRRRYTGWGRLSRKLINGIRDKQSGKTILDFLKSDGFANRNFMQLIHDDSLTFKEDIQKAQVSGQGDSLHEHIANLAGSPAIKKGILQTVKVVDELVKVMGRHKPENIVIEMARENQTTQKGQKNSRERMKRIEEGIKELGSQILKEHPVENTQLQNEKLYLYYLQNGRDMYVDQELDINRLSDYDVDHIVPQSFLKDDSIDNKVLTRSDKARGKSDNVPSEEVVKKMKNYWRQLLNAKLITQRKFDNLTKAERGGLSELDKAGFIKRQLVETRQITKHVAQILDSRMNTKYDENDKLIREVKVITLKSKLVSDFRKDFQFYKVREINNYHHAHDAYLNAVVGTALIKKYPKLESEFVYGDYKVYDVRKMIAKSEQEIGKATAKYFFYSNIMNFFKTEITLANGEIRKRPLIETNGETGEIVWDKGRDFATVRKVLSMPQVNIVKKTEVQTGGFSKESILPKRNSDKLIARKKDWDPKKYGGFDSPTVAYSVLVVAKVEKGKSKKLKSVKELLGITIMERSSFEKNPIDFLEAKGYKEVKKDLIIKLPKYSLFELENGRKRMLASAGELQKGNELALPSKYVNFLYLASHYEKLKGSPEDNEQKQLFVEQHKHYLDEIIEQISEFSKRVILADANLDKVLSAYNKHRDKPIREQAENIIHLFTLTNLGAPAAFKYFDTTIDRKRYTSTKEVLDATLIHQSITGLYETRIDLSQLGGDGGSGGSSGGSSGSETPGTSESATPESSGGSSGGSSGGTLNIEDEYRLHETSKEPDVSLGSTWLSDFPQAWAETGGMGLAVRQAPLIIPLKATSTPVSIKQYPMSQEARLGIKPHIQRLLDQGILVPCQSPWNTPLLPVKKPGTNDYRPVQDLREVNKRVEDIHPTVPNPYNLLSGLPPSHQWYTVLDLKDAFFCLRLHPTSQPLFAFEWRDPEMGISGQLTWTRLPQGFKNSPTLFNEALHRDLADFRIQHPDLILLQYVDDLLLAATSELDCQQGTRALLQTLGNLGYRASAKKAQICQKQVKYLGYLLKEGQRWLTEARKETVMGQPTPKTPRQLREFLGKAGFCRLFIPGFAEMAAPLYPLTKPGTLFNWGPDQQKAYQEIKQALLTAPALGLPDLTKPFELFVDEKQGYAKGVLTQKLGPWRRPVAYLSKKLDPVAAGWPPCLRMVAAIAVLTKDAGKLTMGQPLVILAPHAVEALVKQPPDRWLSNARMTHYQALLLDTDRVQFGPVVALNPATLLPLPEEGLQHNCLDILAEAHGTRPDLTDQPLPDADHTWYTDGSSLLQEGQRKAGAAVTTETEVIWAKALPAGTSAQRAELIALTQALKMAEGKKLNVYTDSRYAFATAHIHGEIYRRRGWLTSEGKEIKNKDEILALLKALFLPKRLSIIHCPGHQKGHSAEARGNRMADQAARKAAITETPDTSTLLIENSSPSGGSKRTADGSEFEAGKRTADGSEFEKRTADGSEFESPKKKAKVE

SEQ ID NO: 4003-4500 - skipped (498 entries)

SEQ ID NO: 4501 - protein, 2096 aa, synthetic construct
MPAAKRVKLDGGDKKYSIGLDIGTNSVGWAVITDEYKVPSKKFKVLGNTDRHSIKKNLIGALLFDSGETAEATRLKRTARRRYTRRKNRICYLQEIFSNEMAKVDDSFFHRLEESFLVEEDKKHERHPIFGNIVDEVAYHEKYPTIYHLRKKLVDSTDKADLRLIYLALAHMIKFRGHFLIEGDLNPDNSDVDKLFIQLVQTYNQLFEENPINASGVDAKAILSARLSKSRRLENLIAQLPGEKKNGLFGNLIALSLGLTPNFKSNFDLAEDAKLQLSKDTYDDDLDNLLAQIGDQYADLFLAAKNLSDAILLSDILRVNTEITKAPLSASMIKRYDEHHQDLTLLKALVRQQLPEKYKEIFFDQSKNGYAGYIDGGASQEEFYKFIKPILEKMDGTEELLVKLNREDLLRKQRTFDNGSIPHQIHLGELHAILRRQEDFYPFLKDNREKIEKILTFRIPYYVGPLARGNSRFAWMTRKSEETITPWNFEEVVDKGASAQSFIERMTNFDKNLPNEKVLPKHSLLYEYFTVYNELTKVKYVTEGMRKPAFLSGEQKKAIVDLLFKTNRKVTVKQLKEDYFKKIECFDSVEISGVEDRFNASLGTYHDLLKIIKDKDFLDNEENEDILEDIVLTLTLFEDREMIEERLKTYAHLFDDKVMKQLKRRRYTGWGRLSRKLINGIRDKQSGKTILDFLKSDGFANRNFMQLIHDDSLTFKEDIQKAQVSGQGDSLHEHIANLAGSPAIKKGILQTVKVVDELVKVMGRHKPENIVIEMARENQTTQKGQKNSRERMKRIEEGIKELGSQILKEHPVENTQLQNEKLYLYYLQNGRDMYVDQELDINRLSDYDVDHIVPQSFLKDDSIDNKVLTRSDKARGKSDNVPSEEVVKKMKNYWRQLLNAKLITQRKFDNLTKAERGGLSELDKAGFIKRQLVETRQITKHVAQILDSRMNTKYDENDKLIREVKVITLKSKLVSDFRKDFQFYKVREINNYHHAHDAYLNAVVGTALIKKYPKLESEFVYGDYKVYDVRKMIAKSEQEIGKATAKYFFYSNIMNFFKTEITLANGEIRKRPLIETNGETGEIVWDKGRDFATVRKVLSMPQVNIVKKTEVQTGGFSKESILPKRNSDKLIARKKDWDPKKYGGFDSPTVAYSVLVVAKVEKGKSKKLKSVKELLGITIMERSSFEKNPIDFLEAKGYKEVKKDLIIKLPKYSLFELENGRKRMLASAGELQKGNELALPSKYVNFLYLASHYEKLKGSPEDNEQKQLFVEQHKHYLDEIIEQISEFSKRVILADANLDKVLSAYNKHRDKPIREQAENIIHLFTLTNLGAPAAFKYFDTTIDRKRYTSTKEVLDATLIHQSITGLYETRIDLSQLGGDGGGGSGGSGGSGGTAPLEEEYRLFLEAPIQNVTLLEQWKREIPKVWAEINPPGLASTQAPIHVQLLSTALPVRVRQYPITLEAKRSLRETIRKFRAAGILRPVHSPWNTPLLPVRKSGTSEYRMVQDLREVNKRVETIHPTVPNPYTLLSLLPPDRIWYSVLDLKDAFFCIPLAPESQLIFAFEWADAEEGESGQLTWTRLPQGFKNSPTLFNEALNRDLQGFRLDHPSVSLLQYVDDLLIAADTQAACLSATRDLLMTLAELGYRVSGKKAQLCQEEVTYLGFKIHKGSRSLSNSRTQAILQIPVPKTKRQVREFLGKIGYCRLFIPGFAELAQPLYAATRPGNDPLVWGEKEEEAFQSLKLALTQPPALALPSLDKPFQLFVEETSGAAKGVLTQALGPWKRPVAYLSKRLDPVAAGWPRCLRAIAAAALLTREASKLTFGQDIEITSSHNLESLLRSPPDKWLTNARITQYQVLLLDPPRVRFKQTAALNPATLLPETDDTLPIHHCLDTLDSLTSTRPDLTDQPLAQAEATLFTDGSSYIRDGKRYAGAAVVTLDSVIWAEPLPIGTSAQKAELIALTKALEWSKDKSVNIYTDSRYAFATLHVHGMIYRERGWLTAGGKAIKNAPEILALLTAVWLPKRVAVMHCKGHQKDDAPTSTGNRRADEVAREVAIRPLSTQATISAGKRTADGSEFEKRTADGSEFESPKKKAKVE

SEQ ID NO: 4502 - protein, 2098 aa, synthetic construct
MPAAKRVKLDGGDKKYSIGLDIGTNSVGWAVITDEYKVPSKKFKVLGNTDRHSIKKNLIGALLFDSGETAEATRLKRTARRRYTRRKNRICYLQEIFSNEMAKVDDSFFHRLEESFLVEEDKKHERHPIFGNIVDEVAYHEKYPTIYHLRKKLVDSTDKADLRLIYLALAHMIKFRGHFLIEGDLNPDNSDVDKLFIQLVQTYNQLFEENPINASGVDAKAILSARLSKSRRLENLIAQLPGEKKNGLFGNLIALSLGLTPNFKSNFDLAEDAKLQLSKDTYDDDLDNLLAQIGDQYADLFLAAKNLSDAILLSDILRVNTEITKAPLSASMIKRYDEHHQDLTLLKALVRQQLPEKYKEIFFDQSKNGYAGYIDGGASQEEFYKFIKPILEKMDGTEELLVKLNREDLLRKQRTFDNGSIPHQIHLGELHAILRRQEDFYPFLKDNREKIEKILTFRIPYYVGPLARGNSRFAWMTRKSEETITPWNFEEVVDKGASAQSFIERMTNFDKNLPNEKVLPKHSLLYEYFTVYNELTKVKYVTEGMRKPAFLSGEQKKAIVDLLFKTNRKVTVKQLKEDYFKKIECFDSVEISGVEDRFNASLGTYHDLLKIIKDKDFLDNEENEDILEDIVLTLTLFEDREMIEERLKTYAHLFDDKVMKQLKRRRYTGWGRLSRKLINGIRDKQSGKTILDFLKSDGFANRNFMQLIHDDSLTFKEDIQKAQVSGQGDSLHEHIANLAGSPAIKKGILQTVKVVDELVKVMGRHKPENIVIEMARENQTTQKGQKNSRERMKRIEEGIKELGSQILKEHPVENTQLQNEKLYLYYLQNGRDMYVDQELDINRLSDYDVDHIVPQSFLKDDSIDNKVLTRSDKARGKSDNVPSEEVVKKMKNYWRQLLNAKLITQRKFDNLTKAERGGLSELDKAGFIKRQLVETRQITKHVAQILDSRMNTKYDENDKLIREVKVITLKSKLVSDFRKDFQFYKVREINNYHHAHDAYLNAVVGTALIKKYPKLESEFVYGDYKVYDVRKMIAKSEQEIGKATAKYFFYSNIMNFFKTEITLANGEIRKRPLIETNGETGEIVWDKGRDFATVRKVLSMPQVNIVKKTEVQTGGFSKESILPKRNSDKLIARKKDWDPKKYGGFDSPTVAYSVLVVAKVEKGKSKKLKSVKELLGITIMERSSFEKNPIDFLEAKGYKEVKKDLIIKLPKYSLFELENGRKRMLASAGELQKGNELALPSKYVNFLYLASHYEKLKGSPEDNEQKQLFVEQHKHYLDEIIEQISEFSKRVILADANLDKVLSAYNKHRDKPIREQAENIIHLFTLTNLGAPAAFKYFDTTIDRKRYTSTKEVLDATLIHQSITGLYETRIDLSQLGGDGGGGSGGSGGSGGSGGSGGVLNLEEEYRLHEKPVPSSIDPSWLQLFPTVWAERAGMGLANQVPPVVVELRSGASPVAVRQYPMSKEAREGIRPHIQRFLDLGVLVPCQSPWNTPLLPVKKPGTNDYRPVQDLREINKRVQDIHPTVPNPYNLLSSLPPSHTWYSVLDLKDAFFCLKLHPNSQPLFAFEWRDPEKGNTGQLTWTRLPQGFKNSPTLFNEALHRDLAPFRALNPQVVLLQYVDDLLVAAPTYRDCKEGTQKLLQELSKLGYRVSAKKAQLCQKEVTYLGYLLKEGKRWLTPARKATVMKIPPPTTPRQVREFLGTAGFCRLWIPGFASLAAPLYPLTKPSIPFIWTEEHQKAFDRIKEALLSAPALALPDLTKPFTLYVDERAGVARGVLTQTLGPWRRPVAYLSKKLDPVASGWPTCLKAVAAVALLLKDADKLTLGQNVTVIASHSLESIVRQPPDRWMTNARMTHYQSLLLNERVSFAPPAVLNPATLLPVESEATPVHRCSEILAEETGTRRDLKDQPLPGVPAWYTDGSSFIAEGKRRAGAAIVDGKRTVWASSLPEGTSAQKAELVALTQALRLAEGKDINIYTDSRYAFATAHIHGAIYKQRGWLTSAGKDIKNKEEILALLEAIHLPKRVAIIHCPGHQKGNDPVATGNRRADEAAKQAALSTRVLAETTKPAGKRTADGSEFEKRTADGSEFESPKKKAKVE

SEQ ID NO: 4503 - protein, 2103 aa, synthetic construct
MPAAKRVKLDGGDKKYSIGLDIGTNSVGWAVITDEYKVPSKKFKVLGNTDRHSIKKNLIGALLFDSGETAEATRLKRTARRRYTRRKNRICYLQEIFSNEMAKVDDSFFHRLEESFLVEEDKKHERHPIFGNIVDEVAYHEKYPTIYHLRKKLVDSTDKADLRLIYLALAHMIKFRGHFLIEGDLNPDNSDVDKLFIQLVQTYNQLFEENPINASGVDAKAILSARLSKSRRLENLIAQLPGEKKNGLFGNLIALSLGLTPNFKSNFDLAEDAKLQLSKDTYDDDLDNLLAQIGDQYADLFLAAKNLSDAILLSDILRVNTEITKAPLSASMIKRYDEHHQDLTLLKALVRQQLPEKYKEIFFDQSKNGYAGYIDGGASQEEFYKFIKPILEKMDGTEELLVKLNREDLLRKQRTFDNGSIPHQIHLGELHAILRRQEDFYPFLKDNREKIEKILTFRIPYYVGPLARGNSRFAWMTRKSEETITPWNFEEVVDKGASAQSFIERMTNFDKNLPNEKVLPKHSLLYEYFTVYNELTKVKYVTEGMRKPAFLSGEQKKAIVDLLFKTNRKVTVKQLKEDYFKKIECFDSVEISGVEDRFNASLGTYHDLLKIIKDKDFLDNEENEDILEDIVLTLTLFEDREMIEERLKTYAHLFDDKVMKQLKRRRYTGWGRLSRKLINGIRDKQSGKTILDFLKSDGFANRNFMQLIHDDSLTFKEDIQKAQVSGQGDSLHEHIANLAGSPAIKKGILQTVKVVDELVKVMGRHKPENIVIEMARENQTTQKGQKNSRERMKRIEEGIKELGSQILKEHPVENTQLQNEKLYLYYLQNGRDMYVDQELDINRLSDYDVDHIVPQSFLKDDSIDNKVLTRSDKARGKSDNVPSEEVVKKMKNYWRQLLNAKLITQRKFDNLTKAERGGLSELDKAGFIKRQLVETRQITKHVAQILDSRMNTKYDENDKLIREVKVITLKSKLVSDFRKDFQFYKVREINNYHHAHDAYLNAVVGTALIKKYPKLESEFVYGDYKVYDVRKMIAKSEQEIGKATAKYFFYSNIMNFFKTEITLANGEIRKRPLIETNGETGEIVWDKGRDFATVRKVLSMPQVNIVKKTEVQTGGFSKESILPKRNSDKLIARKKDWDPKKYGGFDSPTVAYSVLVVAKVEKGKSKKLKSVKELLGITIMERSSFEKNPIDFLEAKGYKEVKKDLIIKLPKYSLFELENGRKRMLASAGELQKGNELALPSKYVNFLYLASHYEKLKGSPEDNEQKQLFVEQHKHYLDEIIEQISEFSKRVILADANLDKVLSAYNKHRDKPIREQAENIIHLFTLTNLGAPAAFKYFDTTIDRKRYTSTKEVLDATLIHQSITGLYETRIDLSQLGGDGGGGSGGSGGSGGSGGSGGSGGLGIEDEYRLHETSTEPDVSLGSTWLSDFPQAWAETGGMGLAVRQAPLIIPLKATSTPVSIQQYPMSHEARLGIKPHIQRLLDQGILVPCQSPWNTPLLPVKKPGTNDYRPVQDLREVNKRVEDIHPTVPNPYNLLSGLPPSHQWYTVLDLKDAFFCLRLHPTSQPLFAFEWRDPGMGISGQLTWTRLPQGFKNSPTLFNEALHRDLADFRIQHPDLILLQYVDDILLAATSELDCQQGTRALLQTLGDLGYRASAKKAQICQKQVKYLGYLLREGQRWLTEARKETVMGQPVPKTPRQLREFLGKAGFCRLFIPGFAEMAAPLYPLTKPGTLFSWGPDQQKAYQEIKQALLTAPALGLPDLTKPFELFVDEKQGYAKGVLTQKLGPWRRPVAYLSKKLDPVAAGWPPCLRMVAAIAVLTKDAGKLTMGQPLVILAPHAVEALVKQPPDRWLSNARMTHYQAMLLDTDRVQFGPVVALNPATLLPLPEEGAPHDCLEILAETHGTRPDLTDQPIPDADHTWYTDGSSFLQEGQRKAGAAVTTETEVIWAGALPAGTSAQRAELIALTQALKMAEGKRLNVYTDSRYAFATAHIHGEIYRRRGWLTSEGREIKNKSEILALLKALFLPKRLSIIHCLGHQKGDSAEARGNRLADQAAREAAIKTPPDTSTLLIAGKRTADGSEFEKRTADGSEFESPKKKAKVE

SEQ ID NO: 4504 - protein, 2110 aa, synthetic construct
MPAAKRVKLDGGDKKYSIGLDIGTNSVGWAVITDEYKVPSKKFKVLGNTDRHSIKKNLIGALLFDSGETAEATRLKRTARRRYTRRKNRICYLQEIFSNEMAKVDDSFFHRLEESFLVEEDKKHERHPIFGNIVDEVAYHEKYPTIYHLRKKLVDSTDKADLRLIYLALAHMIKFRGHFLIEGDLNPDNSDVDKLFIQLVQTYNQLFEENPINASGVDAKAILSARLSKSRRLENLIAQLPGEKKNGLFGNLIALSLGLTPNFKSNFDLAEDAKLQLSKDTYDDDLDNLLAQIGDQYADLFLAAKNLSDAILLSDILRVNTEITKAPLSASMIKRYDEHHQDLTLLKALVRQQLPEKYKEIFFDQSKNGYAGYIDGGASQEEFYKFIKPILEKMDGTEELLVKLNREDLLRKQRTFDNGSIPHQIHLGELHAILRRQEDFYPFLKDNREKIEKILTFRIPYYVGPLARGNSRFAWMTRKSEETITPWNFEEVVDKGASAQSFIERMTNFDKNLPNEKVLPKHSLLYEYFTVYNELTKVKYVTEGMRKPAFLSGEQKKAIVDLLFKTNRKVTVKQLKEDYFKKIECFDSVEISGVEDRFNASLGTYHDLLKIIKDKDFLDNEENEDILEDIVLTLTLFEDREMIEERLKTYAHLFDDKVMKQLKRRRYTGWGRLSRKLINGIRDKQSGKTILDFLKSDGFANRNFMQLIHDDSLTFKEDIQKAQVSGQGDSLHEHIANLAGSPAIKKGILQTVKVVDELVKVMGRHKPENIVIEMARENQTTQKGQKNSRERMKRIEEGIKELGSQILKEHPVENTQLQNEKLYLYYLQNGRDMYVDQELDINRLSDYDVDHIVPQSFLKDDSIDNKVLTRSDKARGKSDNVPSEEVVKKMKNYWRQLLNAKLITQRKFDNLTKAERGGLSELDKAGFIKRQLVETRQITKHVAQILDSRMNTKYDENDKLIREVKVITLKSKLVSDFRKDFQFYKVREINNYHHAHDAYLNAVVGTALIKKYPKLESEFVYGDYKVYDVRKMIAKSEQEIGKATAKYFFYSNIMNFFKTEITLANGEIRKRPLIETNGETGEIVWDKGRDFATVRKVLSMPQVNIVKKTEVQTGGFSKESILPKRNSDKLIARKKDWDPKKYGGFDSPTVAYSVLVVAKVEKGKSKKLKSVKELLGITIMERSSFEKNPIDFLEAKGYKEVKKDLIIKLPKYSLFELENGRKRMLASAGELQKGNELALPSKYVNFLYLASHYEKLKGSPEDNEQKQLFVEQHKHYLDEIIEQISEFSKRVILADANLDKVLSAYNKHRDKPIREQAENIIHLFTLTNLGAPAAFKYFDTTIDRKRYTSTKEVLDATLIHQSITGLYETRIDLSQLGGDGGGGGGSGGGGSGGGGSGGGGSGGGGSGGTLNIEDEHRLHETSKEPDVSLGSTWLSDFPQAWAETGGMGLAVRQAPLIIPLKATSTPVSIKQYPMSQEARLGIKPHIQRLLDQGILVPCQSPWNTPLLPVKKPGTNDYRPVQDLREVNKRVEDIHPTVPNPYNLLSGLPPSHQWYTVLDLKDAFFCLRLHPTSQPLFAFEWRDPEMGISGQLTWTRLPQGFKNSPTLFNEALHRDLADFRIQHPDLILLQYVDDLLLAATSELDCQQGTRALLQTLGNLGYRASAKKAQICQKQVKYLGYLLKEGQRWLTEARKETVMGQPTPKTPRQLREFLGKAGFCRLFIPGFAEMAAPLYPLTKPGTLFNWGPDQQKAYQEIKQALLTAPALGLPDLTKPFELFVDEKQGYAKGVLTQKLGPWRRPVAYLSKKLDPVAAGWPPCLRMVAAIAVLTKDAGKLTMGQPLVILAPHAVEALVKQPPDRWLSNARMTHYQALLLDTDRVQFGPVVALNPATLLPLPEEGLQHNCLDILAEAHGTRPDLTDQPLPDADHTWYTDGSSLLQEGQRKAGAAVTTETEVIWAKALPAGTSAQRAELIALTQALKMAEGKKLNVYTDSRYAFATAHIHGEIYRRRGWLTSEGKEIKNKDEILALLKALFLPKRLSIIHCPGHQKGHSAEARGNRMADQAARKAAITETPDTSTLLAGKRTADGSEFEKRTADGSEFESPKKKAKVE

SEQ ID NO: 4505 - protein, 2094 aa, synthetic construct
MPAAKRVKLDGGDKKYSIGLDIGTNSVGWAVITDEYKVPSKKFKVLGNTDRHSIKKNLIGALLFDSGETAEATRLKRTARRRYTRRKNRICYLQEIFSNEMAKVDDSFFHRLEESFLVEEDKKHERHPIFGNIVDEVAYHEKYPTIYHLRKKLVDSTDKADLRLIYLALAHMIKFRGHFLIEGDLNPDNSDVDKLFIQLVQTYNQLFEENPINASGVDAKAILSARLSKSRRLENLIAQLPGEKKNGLFGNLIALSLGLTPNFKSNFDLAEDAKLQLSKDTYDDDLDNLLAQIGDQYADLFLAAKNLSDAILLSDILRVNTEITKAPLSASMIKRYDEHHQDLTLLKALVRQQLPEKYKEIFFDQSKNGYAGYIDGGASQEEFYKFIKPILEKMDGTEELLVKLNREDLLRKQRTFDNGSIPHQIHLGELHAILRRQEDFYPFLKDNREKIEKILTFRIPYYVGPLARGNSRFAWMTRKSEETITPWNFEEVVDKGASAQSFIERMTNFDKNLPNEKVLPKHSLLYEYFTVYNELTKVKYVTEGMRKPAFLSGEQKKAIVDLLFKTNRKVTVKQLKEDYFKKIECFDSVEISGVEDRFNASLGTYHDLLKIIKDKDFLDNEENEDILEDIVLTLTLFEDREMIEERLKTYAHLFDDKVMKQLKRRRYTGWGRLSRKLINGIRDKQSGKTILDFLKSDGFANRNFMQLIHDDSLTFKEDIQKAQVSGQGDSLHEHIANLAGSPAIKKGILQTVKVVDELVKVMGRHKPENIVIEMARENQTTQKGQKNSRERMKRIEEGIKELGSQILKEHPVENTQLQNEKLYLYYLQNGRDMYVDQELDINRLSDYDVDHIVPQSFLKDDSIDNKVLTRSDKARGKSDNVPSEEVVKKMKNYWRQLLNAKLITQRKFDNLTKAERGGLSELDKAGFIKRQLVETRQITKHVAQILDSRMNTKYDENDKLIREVKVITLKSKLVSDFRKDFQFYKVREINNYHHAHDAYLNAVVGTALIKKYPKLESEFVYGDYKVYDVRKMIAKSEQEIGKATAKYFFYSNIMNFFKTEITLANGEIRKRPLIETNGETGEIVWDKGRDFATVRKVLSMPQVNIVKKTEVQTGGFSKESILPKRNSDKLIARKKDWDPKKYGGFDSPTVAYSVLVVAKVEKGKSKKLKSVKELLGITIMERSSFEKNPIDFLEAKGYKEVKKDLIIKLPKYSLFELENGRKRMLASAGELQKGNELALPSKYVNFLYLASHYEKLKGSPEDNEQKQLFVEQHKHYLDEIIEQISEFSKRVILADANLDKVLSAYNKHRDKPIREQAENIIHLFTLTNLGAPAAFKYFDTTIDRKRYTSTKEVLDATLIHQSITGLYETRIDLSQLGGDGGGSSGSSGSSGGTLNIEDEHRLHETSKEPDVSLGSTWLSDFPQAWAETGGMGLAVRQAPLIIPLKATSTPVSIKQYPMSQEARLGIKPHIQRLLDQGILVPCQSPWNTPLLPVKKPGTNDYRPVQDLREVNKRVEDIHPTVPNPYNLLSGLPPSHQWYTVLDLKDAFFCLRLHPTSQPLFAFEWRDPEMGISGQLTWTRLPQGFKNSPTLFNEALHRDLADFRIQHPDLILLQYVDDLLLAATSELDCQQGTRALLQTLGNLGYRASAKKAQICQKQVKYLGYLLKEGQRWLTEARKETVMGQPTPKTPRQLREFLGTAGFCRLWIPGFAEMAAPLYPLTKPGTLFNWGPDQQKAYQEIKQALLTAPALGLPDLTKPFELFVDEKQGYAKGVLTQKLGPWRRPVAYLSKKLDPVAAGWPPCLRMVAAIAVLTKDAGKLTMGQPLVILAPHAVEALVKQPPDRWLSNARMTHYQALLLDTDRVQFGPVVALNPATLLPLPEEGLQHNCLDILAEAHGTRPDLTDQPLPDADHTWYTDGSSLLQEGQRKAGAAVTTETEVIWAKALPAGTSAQRAELIALTQALKMAEGKKLNVYTDSRYAFATAHIHGEIYRRRGWLTSEGKEIKNKDEILALLKALFLPKRLSIIHCPGHQKGHSAEARGNRMADQAARKAAITETPDTSTLLAGKRTADGSEFEKRTADGSEFESPKKKAKVE

SEQ ID NO: 4506 - protein, 2100 aa, synthetic construct
MPAAKRVKLDGGDKKYSIGLDIGTNSVGWAVITDEYKVPSKKFKVLGNTDRHSIKKNLIGALLFDSGETAEATRLKRTARRRYTRRKNRICYLQEIFSNEMAKVDDSFFHRLEESFLVEEDKKHERHPIFGNIVDEVAYHEKYPTIYHLRKKLVDSTDKADLRLIYLALAHMIKFRGHFLIEGDLNPDNSDVDKLFIQLVQTYNQLFEENPINASGVDAKAILSARLSKSRRLENLIAQLPGEKKNGLFGNLIALSLGLTPNFKSNFDLAEDAKLQLSKDTYDDDLDNLLAQIGDQYADLFLAAKNLSDAILLSDILRVNTEITKAPLSASMIKRYDEHHQDLTLLKALVRQQLPEKYKEIFFDQSKNGYAGYIDGGASQEEFYKFIKPILEKMDGTEELLVKLNREDLLRKQRTFDNGSIPHQIHLGELHAILRRQEDFYPFLKDNREKIEKILTFRIPYYVGPLARGNSRFAWMTRKSEETITPWNFEEVVDKGASAQSFIERMTNFDKNLPNEKVLPKHSLLYEYFTVYNELTKVKYVTEGMRKPAFLSGEQKKAIVDLLFKTNRKVTVKQLKEDYFKKIECFDSVEISGVEDRFNASLGTYHDLLKIIKDKDFLDNEENEDILEDIVLTLTLFEDREMIEERLKTYAHLFDDKVMKQLKRRRYTGWGRLSRKLINGIRDKQSGKTILDFLKSDGFANRNFMQLIHDDSLTFKEDIQKAQVSGQGDSLHEHIANLAGSPAIKKGILQTVKVVDELVKVMGRHKPENIVIEMARENQTTQKGQKNSRERMKRIEEGIKELGSQILKEHPVENTQLQNEKLYLYYLQNGRDMYVDQELDINRLSDYDVDHIVPQSFLKDDSIDNKVLTRSDKARGKSDNVPSEEVVKKMKNYWRQLLNAKLITQRKFDNLTKAERGGLSELDKAGFIKRQLVETRQITKHVAQILDSRMNTKYDENDKLIREVKVITLKSKLVSDFRKDFQFYKVREINNYHHAHDAYLNAVVGTALIKKYPKLESEFVYGDYKVYDVRKMIAKSEQEIGKATAKYFFYSNIMNFFKTEITLANGEIRKRPLIETNGETGEIVWDKGRDFATVRKVLSMPQVNIVKKTEVQTGGFSKESILPKRNSDKLIARKKDWDPKKYGGFDSPTVAYSVLVVAKVEKGKSKKLKSVKELLGITIMERSSFEKNPIDFLEAKGYKEVKKDLIIKLPKYSLFELENGRKRMLASAGELQKGNELALPSKYVNFLYLASHYEKLKGSPEDNEQKQLFVEQHKHYLDEIIEQISEFSKRVILADANLDKVLSAYNKHRDKPIREQAENIIHLFTLTNLGAPAAFKYFDTTIDRKRYTSTKEVLDATLIHQSITGLYETRIDLSQLGGDGGEAAAKEAAAKEAAAKGGTLNIEDEYRLHETSKEPDVPLGSTWLSDFPQAWAETGGMGLAVRQAPLIIPLKATSTPVSIKQYPMSQEARLGIKPHIQRLLDQGILVPCQSPWNTPLLPVKKPGTNDYRPVQDLREVNKRVEDIHPTVPNPYNLLSGLPPSHQWYTVLDLKDAFFCLRLHPTSQPLFAFEWRDPEMGISGQLTWTRLPQGFKNSPTLFNEALHRDLADFRIQHPDLILLQYVDDLLLAATSEQDCQRGTRALLQTLGNLGYRASAKKAQICQKQVKYLGYLLKEGQRWLTEARKETVMGQPTPKTPRQLREFLGKAGFCRLFIPGFAEMAAPLYPLTKPGTLFNWGPDQQKAYQEIKQALLTAPALGLPDLTKPFELFVDEKQGYAKGVLTQKLGPWRRPVAYLSKKLDPVAAGWPPCLRMVAAIAVLTKDAGKLTMGQPLVILAPHAVEALVKQPPDRWLSNARMTHYQAMLLDTDRVQFGPVVALNPATLLPLPEKEAPHDCLEILAETHGTRPDLTDQPIPDADYTWYTDGSSFLQEGQRRAGAAVTTETEVIWARALPAGTSAQRAELIALTQALKMAEGKKLNVYTDSRYAFATAHVHGEIYRRRGWLTSEGREIKNKNEILALLKALFLPKRLSIIHCPGHQKGNSAEARGNRMADQAAREAAMKAVLETSTLLAGKRTADGSEFEKRTADGSEFESPKKKAKVE

SEQ ID NO: 4507 - protein, 2110 aa, synthetic construct
MPAAKRVKLDGGDKKYSIGLDIGTNSVGWAVITDEYKVPSKKFKVLGNTDRHSIKKNLIGALLFDSGETAEATRLKRTARRRYTRRKNRICYLQEIFSNEMAKVDDSFFHRLEESFLVEEDKKHERHPIFGNIVDEVAYHEKYPTIYHLRKKLVDSTDKADLRLIYLALAHMIKFRGHFLIEGDLNPDNSDVDKLFIQLVQTYNQLFEENPINASGVDAKAILSARLSKSRRLENLIAQLPGEKKNGLFGNLIALSLGLTPNFKSNFDLAEDAKLQLSKDTYDDDLDNLLAQIGDQYADLFLAAKNLSDAILLSDILRVNTEITKAPLSASMIKRYDEHHQDLTLLKALVRQQLPEKYKEIFFDQSKNGYAGYIDGGASQEEFYKFIKPILEKMDGTEELLVKLNREDLLRKQRTFDNGSIPHQIHLGELHAILRRQEDFYPFLKDNREKIEKILTFRIPYYVGPLARGNSRFAWMTRKSEETITPWNFEEVVDKGASAQSFIERMTNFDKNLPNEKVLPKHSLLYEYFTVYNELTKVKYVTEGMRKPAFLSGEQKKAIVDLLFKTNRKVTVKQLKEDYFKKIECFDSVEISGVEDRFNASLGTYHDLLKIIKDKDFLDNEENEDILEDIVLTLTLFEDREMIEERLKTYAHLFDDKVMKQLKRRRYTGWGRLSRKLINGIRDKQSGKTILDFLKSDGFANRNFMQLIHDDSLTFKEDIQKAQVSGQGDSLHEHIANLAGSPAIKKGILQTVKVVDELVKVMGRHKPENIVIEMARENQTTQKGQKNSRERMKRIEEGIKELGSQILKEHPVENTQLQNEKLYLYYLQNGRDMYVDQELDINRLSDYDVDHIVPQSFLKDDSIDNKVLTRSDKARGKSDNVPSEEVVKKMKNYWRQLLNAKLITQRKFDNLTKAERGGLSELDKAGFIKRQLVETRQITKHVAQILDSRMNTKYDENDKLIREVKVITLKSKLVSDFRKDFQFYKVREINNYHHAHDAYLNAVVGTALIKKYPKLESEFVYGDYKVYDVRKMIAKSEQEIGKATAKYFFYSNIMNFFKTEITLANGEIRKRPLIETNGETGEIVWDKGRDFATVRKVLSMPQVNIVKKTEVQTGGFSKESILPKRNSDKLIARKKDWDPKKYGGFDSPTVAYSVLVVAKVEKGKSKKLKSVKELLGITIMERSSFEKNPIDFLEAKGYKEVKKDLIIKLPKYSLFELENGRKRMLASAGELQKGNELALPSKYVNFLYLASHYEKLKGSPEDNEQKQLFVEQHKHYLDEIIEQISEFSKRVILADANLDKVLSAYNKHRDKPIREQAENIIHLFTLTNLGAPAAFKYFDTTIDRKRYTSTKEVLDATLIHQSITGLYETRIDLSQLGGDGGEAAAKEAAAKEAAAKEAAAKEAAAKGGTLNIEDEYRLHETSKEPDVSLGSTWLSDFPQAWAETGGMGLAVRQAPLIIPLKATSTPVSIKQYPMSQEARLGIKPHIQRLLDQGILVPCQSPWNTPLLPVKKPGTNDYRPVQDLREVNKRVEDIHPTVPNPYNLLSGLPPSHQWYTVLDLKDAFFCLRLHPTSQPLFAFEWRDPEMGISGQLTWTRLPQGFKNSPTLFNEALHRDLAGFRIQHPDLILLQYVDDLLLAATSELDCQQGTRALLQTLGDLGYRASAKKAQICQKQVKYLGYLLKEGQRWLTEARKETVMGQPIPKTPRQLREFLGTAGFCRLWIPGFAEMAAPLYPLTKPGTLFNWGPDQQKAFQEIKQALLTAPALGLPDLTKPFELFVDEKQGYAKGVLTQKLGPWRRPVAYLSKKLDPVAAGWPPCLRMVAAIAVLTKDAGKLTMGQPLVILAPHAVEALVKQPPDRWLSNARMTHYQALLLDTDRVQFGPVVALNPATLLPLPEEGLQHDCLDILAEAHGTRSDLMDQPLPDADHTWYTDGSSFLQEGQRKAGAAVTTETEVIWARALPAGTSAQRAELIALTQALKMAEGKKLNVYTDSRYAFATAHIHGEIYRRRGWLTSEGKEIKNKDEILALLKALFLPKRLSIIHCPGHQKGNSAEARGNRMADQAAREVATRETPETSTLLAGKRTADGSEFEKRTADGSEFESPKKKAKVE

SEQ ID NO: 4508 - protein, 2112 aa, synthetic construct
MPAAKRVKLDGGDKKYSIGLDIGTNSVGWAVITDEYKVPSKKFKVLGNTDRHSIKKNLIGALLFDSGETAEATRLKRTARRRYTRRKNRICYLQEIFSNEMAKVDDSFFHRLEESFLVEEDKKHERHPIFGNIVDEVAYHEKYPTIYHLRKKLVDSTDKADLRLIYLALAHMIKFRGHFLIEGDLNPDNSDVDKLFIQLVQTYNQLFEENPINASGVDAKAILSARLSKSRRLENLIAQLPGEKKNGLFGNLIALSLGLTPNFKSNFDLAEDAKLQLSKDTYDDDLDNLLAQIGDQYADLFLAAKNLSDAILLSDILRVNTEITKAPLSASMIKRYDEHHQDLTLLKALVRQQLPEKYKEIFFDQSKNGYAGYIDGGASQEEFYKFIKPILEKMDGTEELLVKLNREDLLRKQRTFDNGSIPHQIHLGELHAILRRQEDFYPFLKDNREKIEKILTFRIPYYVGPLARGNSRFAWMTRKSEETITPWNFEEVVDKGASAQSFIERMTNFDKNLPNEKVLPKHSLLYEYFTVYNELTKVKYVTEGMRKPAFLSGEQKKAIVDLLFKTNRKVTVKQLKEDYFKKIECFDSVEISGVEDRFNASLGTYHDLLKIIKDKDFLDNEENEDILEDIVLTLTLFEDREMIEERLKTYAHLFDDKVMKQLKRRRYTGWGRLSRKLINGIRDKQSGKTILDFLKSDGFANRNFMQLIHDDSLTFKEDIQKAQVSGQGDSLHEHIANLAGSPAIKKGILQTVKVVDELVKVMGRHKPENIVIEMARENQTTQKGQKNSRERMKRIEEGIKELGSQILKEHPVENTQLQNEKLYLYYLQNGRDMYVDQELDINRLSDYDVDHIVPQSFLKDDSIDNKVLTRSDKARGKSDNVPSEEVVKKMKNYWRQLLNAKLITQRKFDNLTKAERGGLSELDKAGFIKRQLVETRQITKHVAQILDSRMNTKYDENDKLIREVKVITLKSKLVSDFRKDFQFYKVREINNYHHAHDAYLNAVVGTALIKKYPKLESEFVYGDYKVYDVRKMIAKSEQEIGKATAKYFFYSNIMNFFKTEITLANGEIRKRPLIETNGETGEIVWDKGRDFATVRKVLSMPQVNIVKKTEVQTGGFSKESILPKRNSDKLIARKKDWDPKKYGGFDSPTVAYSVLVVAKVEKGKSKKLKSVKELLGITIMERSSFEKNPIDFLEAKGYKEVKKDLIIKLPKYSLFELENGRKRMLASAGELQKGNELALPSKYVNFLYLASHYEKLKGSPEDNEQKQLFVEQHKHYLDEIIEQISEFSKRVILADANLDKVLSAYNKHRDKPIREQAENIIHLFTLTNLGAPAAFKYFDTTIDRKRYTSTKEVLDATLIHQSITGLYETRIDLSQLGGDGGPAPAPAPGGTLNIEDEYRLHETSKEPDVSLGSTWLSDFPQAWAETGGMGLAVRQAPLIIPLKATSTPVSIKQYPMSQEARLGIKPHIQRLLDQGILVPCQSPWNTPLLPVKKPGTNDYRPVQDLREVNKRVEDIHPTVPNPYNLLSGLPPSHQWYTVLDLKDAFFCLRLHPTSQPLFAFEWRDPEMGISGQLTWTRLPQGFKNSPTLFNEALHRDLADFRIQHPDLILLQYVDDLLLAATSELDCQQGTRALLQTLGNLGYRASAKKAQICQKQVKYLGYLLKEGQRWLTEARKETVMGQPTPKTPRQLREFLGKAGFCRLFIPGFAEMAAPLYPLTKPGTLFNWGPDQQKAYQEIKQALLTAPALGLPDLTKPFELFVDEKQGYAKGVLTQKLGPWRRPVAYLSKKLDPVAAGWPPCLRMVAAIAVLTKDAGKLTMGQPLVILAPHAVEALVKQPPDRWLSNARMTHYQALLLDTDRVQFGPVVALNPATLLPLPEEGLQHNCLDILAEAHGTRPDLTDQPLPDADHTWYTDGSSLLQEGQRKAGAAVTTETEVIWAKALPAGTSAQRAELIALTQALKMAEGKKLNVYTDSRYAFATAHIHGEIYRRRGWLTSEGKEIKNKDEILALLKALFLPKRLSIIHCPGHQKGHSAEARGNRMADQAARKAAITETPDTSTLLIENSSPSGGSKRTADGSEFEAGKRTADGSEFEKRTADGSEFESPKKKAKVE

SEQ ID NO: 4509 - protein, 2096 aa, synthetic construct
MPAAKRVKLDGGDKKYSIGLDIGTNSVGWAVITDEYKVPSKKFKVLGNTDRHSIKKNLIGALLFDSGETAEATRLKRTARRRYTRRKNRICYLQEIFSNEMAKVDDSFFHRLEESFLVEEDKKHERHPIFGNIVDEVAYHEKYPTIYHLRKKLVDSTDKADLRLIYLALAHMIKFRGHFLIEGDLNPDNSDVDKLFIQLVQTYNQLFEENPINASGVDAKAILSARLSKSRRLENLIAQLPGEKKNGLFGNLIALSLGLTPNFKSNFDLAEDAKLQLSKDTYDDDLDNLLAQIGDQYADLFLAAKNLSDAILLSDILRVNTEITKAPLSASMIKRYDEHHQDLTLLKALVRQQLPEKYKEIFFDQSKNGYAGYIDGGASQEEFYKFIKPILEKMDGTEELLVKLNREDLLRKQRTFDNGSIPHQIHLGELHAILRRQEDFYPFLKDNREKIEKILTFRIPYYVGPLARGNSRFAWMTRKSEETITPWNFEEVVDKGASAQSFIERMTNFDKNLPNEKVLPKHSLLYEYFTVYNELTKVKYVTEGMRKPAFLSGEQKKAIVDLLFKTNRKVTVKQLKEDYFKKIECFDSVEISGVEDRFNASLGTYHDLLKIIKDKDFLDNEENEDILEDIVLTLTLFEDREMIEERLKTYAHLFDDKVMKQLKRRRYTGWGRLSRKLINGIRDKQSGKTILDFLKSDGFANRNFMQLIHDDSLTFKEDIQKAQVSGQGDSLHEHIANLAGSPAIKKGILQTVKVVDELVKVMGRHKPENIVIEMARENQTTQKGQKNSRERMKRIEEGIKELGSQILKEHPVENTQLQNEKLYLYYLQNGRDMYVDQELDINRLSDYDVDHIVPQSFLKDDSIDNKVLTRSDKARGKSDNVPSEEVVKKMKNYWRQLLNAKLITQRKFDNLTKAERGGLSELDKAGFIKRQLVETRQITKHVAQILDSRMNTKYDENDKLIREVKVITLKSKLVSDFRKDFQFYKVREINNYHHAHDAYLNAVVGTALIKKYPKLESEFVYGDYKVYDVRKMIAKSEQEIGKATAKYFFYSNIMNFFKTEITLANGEIRKRPLIETNGETGEIVWDKGRDFATVRKVLSMPQVNIVKKTEVQTGGFSKESILPKRNSDKLIARKKDWDPKKYGGFDSPTVAYSVLVVAKVEKGKSKKLKSVKELLGITIMERSSFEKNPIDFLEAKGYKEVKKDLIIKLPKYSLFELENGRKRMLASAGELQKGNELALPSKYVNFLYLASHYEKLKGSPEDNEQKQLFVEQHKHYLDEIIEQISEFSKRVILADANLDKVLSAYNKHRDKPIREQAENIIHLFTLTNLGAPAAFKYFDTTIDRKRYTSTKEVLDATLIHQSITGLYETRIDLSQLGGDGGPAPAPAPAPAPAPGGVLNLEEEYRLHEKPVPSSIDPSWLQLFPTVWAERAGMGLANQVPPVVVELRSGASPVAVRQYPMSKEAREGIRPHIQRFLDLGVLVPCQSPWNTPLLPVKKPGTNDYRPVQDLREINKRVQDIHPTVPNPYNLLSSLPPSHTWYSVLDLKDAFFCLKLHPNSQPLFAFEWRDPEKGNTGQLTWTRLPQGFKNSPTLFNEALHRDLAPFRALNPQVVLLQYVDDLLVAAPTYRDCKEGTQKLLQELSKLGYRVSAKKAQLCQKEVTYLGYLLKEGKRWLTPARKATVMKIPPPTTPRQVREFLGTAGFCRLWIPGFASLAAPLYPLTKPSIPFIWTEEHQKAFDRIKEALLSAPALALPDLTKPFTLYVDERAGVARGVLTQTLGPWRRPVAYLSKKLDPVASGWPTCLKAVAAVALLLKDADKLTLGQNVTVIASHSLESIVRQPPDRWMTNARMTHYQSLLLNERVSFAPPAVLNPATLLPVESEATPVHRCSEILAEETGTRRDLKDQPLPGVPAWYTDGSSFIAEGKRRAGAAIVDGKRTVWASSLPEGTSAQKAELVALTQALRLAEGKDINIYTDSRYAFATAHIHGAIYKQRGWLTSAGKDIKNKEEILALLEAIHLPKRVAIIHCPGHQKGNDPVATGNRRADEAAKQAALSTRVLAETTKPAGKRTADGSEFEKRTADGSEFESPKKKAKVE

SEQ ID NO: 4510 - protein, 2098 aa, synthetic construct
MPAAKRVKLDGGDKKYSIGLDIGTNSVGWAVITDEYKVPSKKFKVLGNTDRHSIKKNLIGALLFDSGETAEATRLKRTARRRYTRRKNRICYLQEIFSNEMAKVDDSFFHRLEESFLVEEDKKHERHPIFGNIVDEVAYHEKYPTIYHLRKKLVDSTDKADLRLIYLALAHMIKFRGHFLIEGDLNPDNSDVDKLFIQLVQTYNQLFEENPINASGVDAKAILSARLSKSRRLENLIAQLPGEKKNGLFGNLIALSLGLTPNFKSNFDLAEDAKLQLSKDTYDDDLDNLLAQIGDQYADLFLAAKNLSDAILLSDILRVNTEITKAPLSASMIKRYDEHHQDLTLLKALVRQQLPEKYKEIFFDQSKNGYAGYIDGGASQEEFYKFIKPILEKMDGTEELLVKLNREDLLRKQRTFDNGSIPHQIHLGELHAILRRQEDFYPFLKDNREKIEKILTFRIPYYVGPLARGNSRFAWMTRKSEETITPWNFEEVVDKGASAQSFIERMTNFDKNLPNEKVLPKHSLLYEYFTVYNELTKVKYVTEGMRKPAFLSGEQKKAIVDLLFKTNRKVTVKQLKEDYFKKIECFDSVEISGVEDRFNASLGTYHDLLKIIKDKDFLDNEENEDILEDIVLTLTLFEDREMIEERLKTYAHLFDDKVMKQLKRRRYTGWGRLSRKLINGIRDKQSGKTILDFLKSDGFANRNFMQLIHDDSLTFKEDIQKAQVSGQGDSLHEHIANLAGSPAIKKGILQTVKVVDELVKVMGRHKPENIVIEMARENQTTQKGQKNSRERMKRIEEGIKELGSQILKEHPVENTQLQNEKLYLYYLQNGRDMYVDQELDINRLSDYDVDHIVPQSFLKDDSIDNKVLTRSDKARGKSDNVPSEEVVKKMKNYWRQLLNAKLITQRKFDNLTKAERGGLSELDKAGFIKRQLVETRQITKHVAQILDSRMNTKYDENDKLIREVKVITLKSKLVSDFRKDFQFYKVREINNYHHAHDAYLNAVVGTALIKKYPKLESEFVYGDYKVYDVRKMIAKSEQEIGKATAKYFFYSNIMNFFKTEITLANGEIRKRPLIETNGETGEIVWDKGRDFATVRKVLSMPQVNIVKKTEVQTGGFSKESILPKRNSDKLIARKKDWDPKKYGGFDSPTVAYSVLVVAKVEKGKSKKLKSVKELLGITIMERSSFEKNPIDFLEAKGYKEVKKDLIIKLPKYSLFELENGRKRMLASAGELQKGNELALPSKYVNFLYLASHYEKLKGSPEDNEQKQLFVEQHKHYLDEIIEQISEFSKRVILADANLDKVLSAYNKHRDKPIREQAENIIHLFTLTNLGAPAAFKYFDTTIDRKRYTSTKEVLDATLIHQSITGLYETRIDLSQLGGDGGPAPAPAPAPAPAPGGTLNIEDEYRLHETSKEPDVPLGSTWLSDFPQAWAETGGMGLAVRQAPLIIPLKATSTPVSIKQYPMSQEARLGIKPHIQRLLDQGILVPCQSPWNTPLLPVKKPGTNDYRPVQDLREVNKRVEDIHPTVPNPYNLLSGLPPSHQWYTVLDLKDAFFCLRLHPTSQPLFAFEWRDPEMGISGQLTWTRLPQGFKNSPTLFNEALHRDLADFRIQHPDLILLQYVDDLLLAATSEQDCQRGTRALLQTLGNLGYRASAKKAQICQKQVKYLGYLLKEGQRWLTEARKETVMGQPTPKTPRQLREFLGTAGFCRLWIPGFAEMAAPLYPLTKPGTLFNWGPDQQKAYQEIKQALLTAPALGLPDLTKPFELFVDEKQGYAKGVLTQKLGPWRRPVAYLSKKLDPVAAGWPPCLRMVAAIAVLTKDAGKLTMGQPLVILAPHAVEALVKQPPDRWLSNARMTHYQAMLLDTDRVQFGPVVALNPATLLPLPEKEAPHDCLEILAETHGTRPDLTDQPIPDADYTWYTDGSSFLQEGQRRAGAAVTTETEVIWARALPAGTSAQRAELIALTQALKMAEGKKLNVYTDSRYAFATAHVHGEIYRRRGWLTSEGREIKNKNEILALLKALFLPKRLSIIHCPGHQKGNSAEARGNRMADQAAREAAMKAVLETSTLLAGKRTADGSEFEKRTADGSEFESPKKKAKVE

SEQ ID NO: 4511 - protein, 2091 aa, synthetic construct
MPAAKRVKLDGGDKKYSIGLDIGTNSVGWAVITDEYKVPSKKFKVLGNTDRHSIKKNLIGALLFDSGETAEATRLKRTARRRYTRRKNRICYLQEIFSNEMAKVDDSFFHRLEESFLVEEDKKHERHPIFGNIVDEVAYHEKYPTIYHLRKKLVDSTDKADLRLIYLALAHMIKFRGHFLIEGDLNPDNSDVDKLFIQLVQTYNQLFEENPINASGVDAKAILSARLSKSRRLENLIAQLPGEKKNGLFGNLIALSLGLTPNFKSNFDLAEDAKLQLSKDTYDDDLDNLLAQIGDQYADLFLAAKNLSDAILLSDILRVNTEITKAPLSASMIKRYDEHHQDLTLLKALVRQQLPEKYKEIFFDQSKNGYAGYIDGGASQEEFYKFIKPILEKMDGTEELLVKLNREDLLRKQRTFDNGSIPHQIHLGELHAILRRQEDFYPFLKDNREKIEKILTFRIPYYVGPLARGNSRFAWMTRKSEETITPWNFEEVVDKGASAQSFIERMTNFDKNLPNEKVLPKHSLLYEYFTVYNELTKVKYVTEGMRKPAFLSGEQKKAIVDLLFKTNRKVTVKQLKEDYFKKIECFDSVEISGVEDRFNASLGTYHDLLKIIKDKDFLDNEENEDILEDIVLTLTLFEDREMIEERLKTYAHLFDDKVMKQLKRRRYTGWGRLSRKLINGIRDKQSGKTILDFLKSDGFANRNFMQLIHDDSLTFKEDIQKAQVSGQGDSLHEHIANLAGSPAIKKGILQTVKVVDELVKVMGRHKPENIVIEMARENQTTQKGQKNSRERMKRIEEGIKELGSQILKEHPVENTQLQNEKLYLYYLQNGRDMYVDQELDINRLSDYDVDHIVPQSFLKDDSIDNKVLTRSDKARGKSDNVPSEEVVKKMKNYWRQLLNAKLITQRKFDNLTKAERGGLSELDKAGFIKRQLVETRQITKHVAQILDSRMNTKYDENDKLIREVKVITLKSKLVSDFRKDFQFYKVREINNYHHAHDAYLNAVVGTALIKKYPKLESEFVYGDYKVYDVRKMIAKSEQEIGKATAKYFFYSNIMNFFKTEITLANGEIRKRPLIETNGETGEIVWDKGRDFATVRKVLSMPQVNIVKKTEVQTGGFSKESILPKRNSDKLIARKKDWDPKKYGGFDSPTVAYSVLVVAKVEKGKSKKLKSVKELLGITIMERSSFEKNPIDFLEAKGYKEVKKDLIIKLPKYSLFELENGRKRMLASAGELQKGNELALPSKYVNFLYLASHYEKLKGSPEDNEQKQLFVEQHKHYLDEIIEQISEFSKRVILADANLDKVLSAYNKHRDKPIREQAENIIHLFTLTNLGAPAAFKYFDTTIDRKRYTSTKEVLDATLIHQSITGLYETRIDLSQLGGDGGGGGGGSGGLGIEDEYRLHETSTEPDVSLGSTWLSDFPQAWAETGGMGLAVRQAPLIIPLKATSTPVSIQQYPMSHEARLGIKPHIQRLLDQGILVPCQSPWNTPLLPVKKPGTNDYRPVQDLREVNKRVEDIHPTVPNPYNLLSGLPPSHQWYTVLDLKDAFFCLRLHPTSQPLFAFEWRDPGMGISGQLTWTRLPQGFKNSPTLFNEALHRDLADFRIQHPDLILLQYVDDILLAATSELDCQQGTRALLQTLGDLGYRASAKKAQICQKQVKYLGYLLREGQRWLTEARKETVMGQPVPKTPRQLREFLGKAGFCRLFIPGFAEMAAPLYPLTKPGTLFSWGPDQQKAYQEIKQALLTAPALGLPDLTKPFELFVDEKQGYAKGVLTQKLGPWRRPVAYLSKKLDPVAAGWPPCLRMVAAIAVLTKDAGKLTMGQPLVILAPHAVEALVKQPPDRWLSNARMTHYQAMLLDTDRVQFGPVVALNPATLLPLPEEGAPHDCLEILAETHGTRPDLTDQPIPDADHTWYTDGSSFLQEGQRKAGAAVTTETEVIWAGALPAGTSAQRAELIALTQALKMAEGKRLNVYTDSRYAFATAHIHGEIYRRRGWLTSEGREIKNKSEILALLKALFLPKRLSIIHCLGHQKGDSAEARGNRLADQAAREAAIKTPPDTSTLLIAGKRTADGSEFEKRTADGSEFESPKKKAKVE

SEQ ID NO: 4512 - protein, 2093 aa, synthetic construct
MPAAKRVKLDGGDKKYSIGLDIGTNSVGWAVITDEYKVPSKKFKVLGNTDRHSIKKNLIGALLFDSGETAEATRLKRTARRRYTRRKNRICYLQEIFSNEMAKVDDSFFHRLEESFLVEEDKKHERHPIFGNIVDEVAYHEKYPTIYHLRKKLVDSTDKADLRLIYLALAHMIKFRGHFLIEGDLNPDNSDVDKLFIQLVQTYNQLFEENPINASGVDAKAILSARLSKSRRLENLIAQLPGEKKNGLFGNLIALSLGLTPNFKSNFDLAEDAKLQLSKDTYDDDLDNLLAQIGDQYADLFLAAKNLSDAILLSDILRVNTEITKAPLSASMIKRYDEHHQDLTLLKALVRQQLPEKYKEIFFDQSKNGYAGYIDGGASQEEFYKFIKPILEKMDGTEELLVKLNREDLLRKQRTFDNGSIPHQIHLGELHAILRRQEDFYPFLKDNREKIEKILTFRIPYYVGPLARGNSRFAWMTRKSEETITPWNFEEVVDKGASAQSFIERMTNFDKNLPNEKVLPKHSLLYEYFTVYNELTKVKYVTEGMRKPAFLSGEQKKAIVDLLFKTNRKVTVKQLKEDYFKKIECFDSVEISGVEDRFNASLGTYHDLLKIIKDKDFLDNEENEDILEDIVLTLTLFEDREMIEERLKTYAHLFDDKVMKQLKRRRYTGWGRLSRKLINGIRDKQSGKTILDFLKSDGFANRNFMQLIHDDSLTFKEDIQKAQVSGQGDSLHEHIANLAGSPAIKKGILQTVKVVDELVKVMGRHKPENIVIEMARENQTTQKGQKNSRERMKRIEEGIKELGSQILKEHPVENTQLQNEKLYLYYLQNGRDMYVDQELDINRLSDYDVDHIVPQSFLKDDSIDNKVLTRSDKARGKSDNVPSEEVVKKMKNYWRQLLNAKLITQRKFDNLTKAERGGLSELDKAGFIKRQLVETRQITKHVAQILDSRMNTKYDENDKLIREVKVITLKSKLVSDFRKDFQFYKVREINNYHHAHDAYLNAVVGTALIKKYPKLESEFVYGDYKVYDVRKMIAKSEQEIGKATAKYFFYSNIMNFFKTEITLANGEIRKRPLIETNGETGEIVWDKGRDFATVRKVLSMPQVNIVKKTEVQTGGFSKESILPKRNSDKLIARKKDWDPKKYGGFDSPTVAYSVLVVAKVEKGKSKKLKSVKELLGITIMERSSFEKNPIDFLEAKGYKEVKKDLIIKLPKYSLFELENGRKRMLASAGELQKGNELALPSKYVNFLYLASHYEKLKGSPEDNEQKQLFVEQHKHYLDEIIEQISEFSKRVILADANLDKVLSAYNKHRDKPIREQAENIIHLFTLTNLGAPAAFKYFDTTIDRKRYTSTKEVLDATLIHQSITGLYETRIDLSQLGGDGGEAAAKGSSGGLGIEDEYRLHETSTEPDVSLGSTWLSDFPQAWAETGGMGLAVRQAPLIIPLKATSTPVSIQQYPMSHEARLGIKPHIQRLLDQGILVPCQSPWNTPLLPVKKPGTNDYRPVQDLREVNKRVEDIHPTVPNPYNLLSGLPPSHQWYTVLDLKDAFFCLRLHPTSQPLFAFEWRDPGMGISGQLTWTRLPQGFKNSPTLFNEALHRDLADFRIQHPDLILLQYVDDILLAATSELDCQQGTRALLQTLGDLGYRASAKKAQICQKQVKYLGYLLREGQRWLTEARKETVMGQPVPKTPRQLREFLGKAGFCRLFIPGFAEMAAPLYPLTKPGTLFSWGPDQQKAYQEIKQALLTAPALGLPDLTKPFELFVDEKQGYAKGVLTQKLGPWRRPVAYLSKKLDPVAAGWPPCLRMVAAIAVLTKDAGKLTMGQPLVILAPHAVEALVKQPPDRWLSNARMTHYQAMLLDTDRVQFGPVVALNPATLLPLPEEGAPHDCLEILAETHGTRPDLTDQPIPDADHTWYTDGSSFLQEGQRKAGAAVTTETEVIWAGALPAGTSAQRAELIALTQALKMAEGKRLNVYTDSRYAFATAHIHGEIYRRRGWLTSEGREIKNKSEILALLKALFLPKRLSIIHCLGHQKGDSAEARGNRLADQAAREAAIKTPPDTSTLLIAGKRTADGSEFEKRTADGSEFESPKKKAKVE

SEQ ID NO: 4513 - protein, 2091 aa, synthetic construct
MPAAKRVKLDGGDKKYSIGLDIGTNSVGWAVITDEYKVPSKKFKVLGNTDRHSIKKNLIGALLFDSGETAEATRLKRTARRRYTRRKNRICYLQEIFSNEMAKVDDSFFHRLEESFLVEEDKKHERHPIFGNIVDEVAYHEKYPTIYHLRKKLVDSTDKADLRLIYLALAHMIKFRGHFLIEGDLNPDNSDVDKLFIQLVQTYNQLFEENPINASGVDAKAILSARLSKSRRLENLIAQLPGEKKNGLFGNLIALSLGLTPNFKSNFDLAEDAKLQLSKDTYDDDLDNLLAQIGDQYADLFLAAKNLSDAILLSDILRVNTEITKAPLSASMIKRYDEHHQDLTLLKALVRQQLPEKYKEIFFDQSKNGYAGYIDGGASQEEFYKFIKPILEKMDGTEELLVKLNREDLLRKQRTFDNGSIPHQIHLGELHAILRRQEDFYPFLKDNREKIEKILTFRIPYYVGPLARGNSRFAWMTRKSEETITPWNFEEVVDKGASAQSFIERMTNFDKNLPNEKVLPKHSLLYEYFTVYNELTKVKYVTEGMRKPAFLSGEQKKAIVDLLFKTNRKVTVKQLKEDYFKKIECFDSVEISGVEDRFNASLGTYHDLLKIIKDKDFLDNEENEDILEDIVLTLTLFEDREMIEERLKTYAHLFDDKVMKQLKRRRYTGWGRLSRKLINGIRDKQSGKTILDFLKSDGFANRNFMQLIHDDSLTFKEDIQKAQVSGQGDSLHEHIANLAGSPAIKKGILQTVKVVDELVKVMGRHKPENIVIEMARENQTTQKGQKNSRERMKRIEEGIKELGSQILKEHPVENTQLQNEKLYLYYLQNGRDMYVDQELDINRLSDYDVDHIVPQSFLKDDSIDNKVLTRSDKARGKSDNVPSEEVVKKMKNYWRQLLNAKLITQRKFDNLTKAERGGLSELDKAGFIKRQLVETRQITKHVAQILDSRMNTKYDENDKLIREVKVITLKSKLVSDFRKDFQFYKVREINNYHHAHDAYLNAVVGTALIKKYPKLESEFVYGDYKVYDVRKMIAKSEQEIGKATAKYFFYSNIMNFFKTEITLANGEIRKRPLIETNGETGEIVWDKGRDFATVRKVLSMPQVNIVKKTEVQTGGFSKESILPKRNSDKLIARKKDWDPKKYGGFDSPTVAYSVLVVAKVEKGKSKKLKSVKELLGITIMERSSFEKNPIDFLEAKGYKEVKKDLIIKLPKYSLFELENGRKRMLASAGELQKGNELALPSKYVNFLYLASHYEKLKGSPEDNEQKQLFVEQHKHYLDEIIEQISEFSKRVILADANLDKVLSAYNKHRDKPIREQAENIIHLFTLTNLGAPAAFKYFDTTIDRKRYTSTKEVLDATLIHQSITGLYETRIDLSQLGGDGGPAPGSSGGTLNIEDEHRLHETSKEPDVSLGSTWLSDFPQAWAETGGMGLAVRQAPLIIPLKATSTPVSIKQYPMSQEARLGIKPHIQRLLDQGILVPCQSPWNTPLLPVKKPGTNDYRPVQDLREVNKRVEDIHPTVPNPYNLLSGLPPSHQWYTVLDLKDAFFCLRLHPTSQPLFAFEWRDPEMGISGQLTWTRLPQGFKNSPTLFNEALHRDLADFRIQHPDLILLQYVDDLLLAATSELDCQQGTRALLQTLGNLGYRASAKKAQICQKQVKYLGYLLKEGQRWLTEARKETVMGQPTPKTPRQLREFLGKAGFCRLFIPGFAEMAAPLYPLTKPGTLFNWGPDQQKAYQEIKQALLTAPALGLPDLTKPFELFVDEKQGYAKGVLTQKLGPWRRPVAYLSKKLDPVAAGWPPCLRMVAAIAVLTKDAGKLTMGQPLVILAPHAVEALVKQPPDRWLSNARMTHYQALLLDTDRVQFGPVVALNPATLLPLPEEGLQHNCLDILAEAHGTRPDLTDQPLPDADHTWYTDGSSLLQEGQRKAGAAVTTETEVIWAKALPAGTSAQRAELIALTQALKMAEGKKLNVYTDSRYAFATAHIHGEIYRRRGWLTSEGKEIKNKDEILALLKALFLPKRLSIIHCPGHQKGHSAEARGNRMADQAARKAAITETPDTSTLLAGKRTADGSEFEKRTADGSEFESPKKKAKVE

SEQ ID NO: 4514 - protein, 2091 aa, synthetic construct; identical to SEQ ID NO: 4513

SEQ ID NO: 4515 - protein, 2091 aa, synthetic construct
MPAAKRVKLDGGDKKYSIGLDIGTNSVGWAVITDEYKVPSKKFKVLGNTDRHSIKKNLIGALLFDSGETAEATRLKRTARRRYTRRKNRICYLQEIFSNEMAKVDDSFFHRLEESFLVEEDKKHERHPIFGNIVDEVAYHEKYPTIYHLRKKLVDSTDKADLRLIYLALAHMIKFRGHFLIEGDLNPDNSDVDKLFIQLVQTYNQLFEENPINASGVDAKAILSARLSKSRRLENLIAQLPGEKKNGLFGNLIALSLGLTPNFKSNFDLAEDAKLQLSKDTYDDDLDNLLAQIGDQYADLFLAAKNLSDAILLSDILRVNTEITKAPLSASMIKRYDEHHQDLTLLKALVRQQLPEKYKEIFFDQSKNGYAGYIDGGASQEEFYKFIKPILEKMDGTEELLVKLNREDLLRKQRTFDNGSIPHQIHLGELHAILRRQEDFYPFLKDNREKIEKILTFRIPYYVGPLARGNSRFAWMTRKSEETITPWNFEEVVDKGASAQSFIERMTNFDKNLPNEKVLPKHSLLYEYFTVYNELTKVKYVTEGMRKPAFLSGEQKKAIVDLLFKTNRKVTVKQLKEDYFKKIECFDSVEISGVEDRFNASLGTYHDLLKIIKDKDFLDNEENEDILEDIVLTLTLFEDREMIEERLKTYAHLFDDKVMKQLKRRRYTGWGRLSRKLINGIRDKQSGKTILDFLKSDGFANRNFMQLIHDDSLTFKEDIQKAQVSGQGDSLHEHIANLAGSPAIKKGILQTVKVVDELVKVMGRHKPENIVIEMARENQTTQKGQKNSRERMKRIEEGIKELGSQILKEHPVENTQLQNEKLYLYYLQNGRDMYVDQELDINRLSDYDVDHIVPQSFLKDDSIDNKVLTRSDKARGKSDNVPSEEVVKKMKNYWRQLLNAKLITQRKFDNLTKAERGGLSELDKAGFIKRQLVETRQITKHVAQILDSRMNTKYDENDKLIREVKVITLKSKLVSDFRKDFQFYKVREINNYHHAHDAYLNAVVGTALIKKYPKLESEFVYGDYKVYDVRKMIAKSEQEIGKATAKYFFYSNIMNFFKTEITLANGEIRKRPLIETNGETGEIVWDKGRDFATVRKVLSMPQVNIVKKTEVQTGGFSKESILPKRNSDKLIARKKDWDPKKYGGFDSPTVAYSVLVVAKVEKGKSKKLKSVKELLGITIMERSSFEKNPIDFLEAKGYKEVKKDLIIKLPKYSLFELENGRKRMLASAGELQKGNELALPSKYVNFLYLASHYEKLKGSPEDNEQKQLFVEQHKHYLDEIIEQISEFSKRVILADANLDKVLSAYNKHRDKPIREQAENIIHLFTLTNLGAPAAFKYFDTTIDRKRYTSTKEVLDATLIHQSITGLYETRIDLSQLGGDGGEAAAKPAPGGVLNLEEEYRLHEKPVPSSIDPSWLQLFPTVWAERAGMGLANQVPPVVVELRSGASPVAVRQYPMSKEAREGIRPHIQRFLDLGVLVPCQSPWNTPLLPVKKPGTNDYRPVQDLREINKRVQDIHPTVPNPYNLLSSLPPSHTWYSVLDLKDAFFCLKLHPNSQPLFAFEWRDPEKGNTGQLTWTRLPQGFKNSPTLFNEALHRDLAPFRALNPQVVLLQYVDDLLVAAPTYRDCKEGTQKLLQELSKLGYRVSAKKAQLCQKEVTYLGYLLKEGKRWLTPARKATVMKIPPPTTPRQVREFLGKAGFCRLFIPGFASLAAPLYPLTKPSIPFIWTEEHQKAFDRIKEALLSAPALALPDLTKPFTLYVDERAGVARGVLTQTLGPWRRPVAYLSKKLDPVASGWPTCLKAVAAVALLLKDADKLTLGQNVTVIASHSLESIVRQPPDRWMTNARMTHYQSLLLNERVSFAPPAVLNPATLLPVESEATPVHRCSEILAEETGTRRDLKDQPLPGVPAWYTDGSSFIAEGKRRAGAAIVDGKRTVWASSLPEGTSAQKAELVALTQALRLAEGKDINIYTDSRYAFATAHIHGAIYKQRGWLTSAGKDIKNKEEILALLEAIHLPKRVAIIHCPGHQKGNDPVATGNRRADEAAKQAALSTRVLAETTKPAGKRTADGSEFEKRTADGSEFESPKKKAKVE

SEQ ID NO: 4516 - protein, 2093 aa, synthetic construct
MPAAKRVKLDGGDKKYSIGLDIGTNSVGWAVITDEYKVPSKKFKVLGNTDRHSIKKNLIGALLFDSGETAEATRLKRTARRRYTRRKNRICYLQEIFSNEMAKVDDSFFHRLEESFLVEEDKKHERHPIFGNIVDEVAYHEKYPTIYHLRKKLVDSTDKADLRLIYLALAHMIKFRGHFLIEGDLNPDNSDVDKLFIQLVQTYNQLFEENPINASGVDAKAILSARLSKSRRLENLIAQLPGEKKNGLFGNLIALSLGLTPNFKSNFDLAEDAKLQLSKDTYDDDLDNLLAQIGDQYADLFLAAKNLSDAILLSDILRVNTEITKAPLSASMIKRYDEHHQDLTLLKALVRQQLPEKYKEIFFDQSKNGYAGYIDGGASQEEFYKFIKPILEKMDGTEELLVKLNREDLLRKQRTFDNGSIPHQIHLGELHAILRRQEDFYPFLKDNREKIEKILTFRIPYYVGPLARGNSRFAWMTRKSEETITPWNFEEVVDKGASAQSFIERMTNFDKNLPNEKVLPKHSLLYEYFTVYNELTKVKYVTEGMRKPAFLSGEQKKAIVDLLFKTNRKVTVKQLKEDYFKKIECFDSVEISGVEDRFNASLGTYHDLLKIIKDKDFLDNEENEDILEDIVLTLTLFEDREMIEERLKTYAHLFDDKVMKQLKRRRYTGWGRLSRKLINGIRDKQSGKTILDFLKSDGFANRNFMQLIHDDSLTFKEDIQKAQVSGQGDSLHEHIANLAGSPAIKKGILQTVKVVDELVKVMGRHKPENIVIEMARENQTTQKGQKNSRERMKRIEEGIKELGSQILKEHPVENTQLQNEKLYLYYLQNGRDMYVDQELDINRLSDYDVDHIVPQSFLKDDSIDNKVLTRSDKARGKSDNVPSEEVVKKMKNYWRQLLNAKLITQRKFDNLTKAERGGLSELDKAGFIKRQLVETRQITKHVAQILDSRMNTKYDENDKLIREVKVITLKSKLVSDFRKDFQFYKVREINNYHHAHDAYLNAVVGTALIKKYPKLESEFVYGDYKVYDVRKMIAKSEQEIGKATAKYFFYSNIMNFFKTEITLANGEIRKRPLIETNGETGEIVWDKGRDFATVRKVLSMPQVNIVKKTEVQTGGFSKESILPKRNSDKLIARKKDWDPKKYGGFDSPTVAYSVLVVAKVEKGKSKKLKSVKELLGITIMERSSFEKNPIDFLEAKGYKEVKKDLIIKLPKYSLFELENGRKRMLASAGELQKGNELALPSKYVNFLYLASHYEKLKGSPEDNEQKQLFVEQHKHYLDEIIEQISEFSKRVILADANLDKVLSAYNKHRDKPIREQAENIIHLFTLTNLGAPAAFKYFDTTIDRKRYTSTKEVLDATLIHQSITGLYETRIDLSQLGGDGGPAPEAAAKGGLGIEDEYRLHETSTEPDVSLGSTWLSDFPQAWAETGGMGLAVRQAPLIIPLKATSTPVSIQQYPMSHEARLGIKPHIQRLLDQGILVPCQSPWNTPLLPVKKPGTNDYRPVQDLREVNKRVEDIHPTVPNPYNLLSGLPPSHQWYTVLDLKDAFFCLRLHPTSQPLFAFEWRDPGMGISGQLTWTRLPQGFKNSPTLFNEALHRDLADFRIQHPDLILLQYVDDILLAATSELDCQQGTRALLQTLGDLGYRASAKKAQICQKQVKYLGYLLREGQRWLTEARKETVMGQPVPKTPRQLREFLGKAGFCRLFIPGFAEMAAPLYPLTKPGTLFSWGPDQQKAYQEIKQALLTAPALGLPDLTKPFELFVDEKQGYAKGVLTQKLGPWRRPVAYLSKKLDPVAAGWPPCLRMVAAIAVLTKDAGKLTMGQPLVILAPHAVEALVKQPPDRWLSNARMTHYQAMLLDTDRVQFGPVVALNPATLLPLPEEGAPHDCLEILAETHGTRPDLTDQPIPDADHTWYTDGSSFLQEGQRKAGAAVTTETEVIWAGALPAGTSAQRAELIALTQALKMAEGKRLNVYTDSRYAFATAHIHGEIYRRRGWLTSEGREIKNKSEILALLKALFLPKRLSIIHCLGHQKGDSAEARGNRLADQAAREAAIKTPPDTSTLLIAGKRTADGSEFEKRTADGSEFESPKKKAKVE

SEQ ID NO: 4517 - protein, 2094 aa, synthetic construct
MPAAKRVKLDGGDKKYSIGLDIGTNSVGWAVITDEYKVPSKKFKVLGNTDRHSIKKNLIGALLFDSGETAEATRLKRTARRRYTRRKNRICYLQEIFSNEMAKVDDSFFHRLEESFLVEEDKKHERHPIFGNIVDEVAYHEKYPTIYHLRKKLVDSTDKADLRLIYLALAHMIKFRGHFLIEGDLNPDNSDVDKLFIQLVQTYNQLFEENPINASGVDAKAILSARLSKSRRLENLIAQLPGEKKNGLFGNLIALSLGLTPNFKSNFDLAEDAKLQLSKDTYDDDLDNLLAQIGDQYADLFLAAKNLSDAILLSDILRVNTEITKAPLSASMIKRYDEHHQDLTLLKALVRQQLPEKYKEIFFDQSKNGYAGYIDGGASQEEFYKFIKPILEKMDGTEELLVKLNREDLLRKQRTFDNGSIPHQIHLGELHAILRRQEDFYPFLKDNREKIEKILTFRIPYYVGPLARGNSRFAWMTRKSEETITPWNFEEVVDKGASAQSFIERMTNFDKNLPNEKVLPKHSLLYEYFTVYNELTKVKYVTEGMRKPAFLSGEQKKAIVDLLFKTNRKVTVKQLKEDYFKKIECFDSVEISGVEDRFNASLGTYHDLLKIIKDKDFLDNEENEDILEDIVLTLTLFEDREMIEERLKTYAHLFDDKVMKQLKRRRYTGWGRLSRKLINGIRDKQSGKTILDFLKSDGFANRNFMQLIHDDSLTFKEDIQKAQVSGQGDSLHEHIANLAGSPAIKKGILQTVKVVDELVKVMGRHKPENIVIEMARENQTTQKGQKNSRERMKRIEEGIKELGSQILKEHPVENTQLQNEKLYLYYLQNGRDMYVDQELDINRLSDYDVDHIVPQSFLKDDSIDNKVLTRSDKARGKSDNVPSEEVVKKMKNYWRQLLNAKLITQRKFDNLTKAERGGLSELDKAGFIKRQLVETRQITKHVAQILDSRMNTKYDENDKLIREVKVITLKSKLVSDFRKDFQFYKVREINNYHHAHDAYLNAVVGTALIKKYPKLESEFVYGDYKVYDVRKMIAKSEQEIGKATAKYFFYSNIMNFFKTEITLANGEIRKRPLIETNGETGEIVWDKGRDFATVRKVLSMPQVNIVKKTEVQTGGFSKESILPKRNSDKLIARKKDWDPKKYGGFDSPTVAYSVLVVAKVEKGKSKKLKSVKELLGITIMERSSFEKNPIDFLEAKGYKEVKKDLIIKLPKYSLFELENGRKRMLASAGELQKGNELALPSKYVNFLYLASHYEKLKGSPEDNEQKQLFVEQHKHYLDEIIEQISEFSKRVILADANLDKVLSAYNKHRDKPIREQAENIIHLFTLTNLGAPAAFKYFDTTIDRKRYTSTKEVLDATLIHQSITGLYETRIDLSQLGGDGGGSSGGGGGSGGLGIEDEYRLHETSTEPDVSLGSTWLSDFPQAWAETGGMGLAVRQAPLIIPLKATSTPVSIQQYPMSHEARLGIKPHIQRLLDQGILVPCQSPWNTPLLPVKKPGTNDYRPVQDLREVNKRVEDIHPTVPNPYNLLSGLPPSHQWYTVLDLKDAFFCLRLHPTSQPLFAFEWRDPGMGISGQLTWTRLPQGFKNSPTLFNEALHRDLADFRIQHPDLILLQYVDDILLAATSELDCQQGTRALLQTLGDLGYRASAKKAQICQKQVKYLGYLLREGQRWLTEARKETVMGQPVPKTPRQLREFLGKAGFCRLFIPGFAEMAAPLYPLTKPGTLFSWGPDQQKAYQEIKQALLTAPALGLPDLTKPFELFVDEKQGYAKGVLTQKLGPWRRPVAYLSKKLDPVAAGWPPCLRMVAAIAVLTKDAGKLTMGQPLVILAPHAVEALVKQPPDRWLSNARMTHYQAMLLDTDRVQFGPVVALNPATLLPLPEEGAPHDCLEILAETHGTRPDLTDQPIPDADHTWYTDGSSFLQEGQRKAGAAVTTETEVIWAGALPAGTSAQRAELIALTQALKMAEGKRLNVYTDSRYAFATAHIHGEIYRRRGWLTSEGREIKNKSEILALLKALFLPKRLSIIHCLGHQKGDSAEARGNRLADQAAREAAIKTPPDTSTLLIAGKRTADGSEFEKRTADGSEFESPKKKAKVE

SEQ ID NO: 4518 - protein, 2094 aa, synthetic construct
MPAAKRVKLDGGDKKYSIGLDIGTNSVGWAVITDEYKVPSKKFKVLGNTDRHSIKKNLIGALLFDSGETAEATRLKRTARRRYTRRKNRICYLQEIFSNEMAKVDDSFFHRLEESFLVEEDKKHERHPIFGNIVDEVAYHEKYPTIYHLRKKLVDSTDKADLRLIYLALAHMIKFRGHFLIEGDLNPDNSDVDKLFIQLVQTYNQLFEENPINASGVDAKAILSARLSKSRRLENLIAQLPGEKKNGLFGNLIALSLGLTPNFKSNFDLAEDAKLQLSKDTYDDDLDNLLAQIGDQYADLFLAAKNLSDAILLSDILRVNTEITKAPLSASMIKRYDEHHQDLTLLKALVRQQLPEKYKEIFFDQSKNGYAGYIDGGASQEEFYKFIKPILEKMDGTEELLVKLNREDLLRKQRTFDNGSIPHQIHLGELHAILRRQEDFYPFLKDNREKIEKILTFRIPYYVGPLARGNSRFAWMTRKSEETITPWNFEEVVDKGASAQSFIERMTNFDKNLPNEKVLPKHSLLYEYFTVYNELTKVKYVTEGMRKPAFLSGEQKKAIVDLLFKTNRKVTVKQLKEDYFKKIECFDSVEISGVEDRFNASLGTYHDLLKIIKDKDFLDNEENEDILEDIVLTLTLFEDREMIEERLKTYAHLFDDKVMKQLKRRRYTGWGRLSRKLINGIRDKQSGKTILDFLKSDGFANRNFMQLIHDDSLTFKEDIQKAQVSGQGDSLHEHIANLAGSPAIKKGILQTVKVVDELVKVMGRHKPENIVIEMARENQTTQKGQKNSRERMKRIEEGIKELGSQILKEHPVENTQLQNEKLYLYYLQNGRDMYVDQELDINRLSDYDVDHIVPQSFLKDDSIDNKVLTRSDKARGKSDNVPSEEVVKKMKNYWRQLLNAKLITQRKFDNLTKAERGGLSELDKAGFIKRQLVETRQITKHVAQILDSRMNTKYDENDKLIREVKVITLKSKLVSDFRKDFQFYKVREINNYHHAHDAYLNAVVGTALIKKYPKLESEFVYGDYKVYDVRKMIAKSEQEIGKATAKYFFYSNIMNFFKTEITLANGEIRKRPLIETNGETGEIVWDKGRDFATVRKVLSMPQVNIVKKTEVQTGGFSKESILPKRNSDKLIARKKDWDPKKYGGFDSPTVAYSVLVVAKVEKGKSKKLKSVKELLGITIMERSSFEKNPIDFLEAKGYKEVKKDLIIKLPKYSLFELENGRKRMLASAGELQKGNELALPSKYVNFLYLASHYEKLKGSPEDNEQKQLFVEQHKHYLDEIIEQISEFSKRVILADANLDKVLSAYNKHRDKPIREQAENIIHLFTLTNLGAPAAFKYFDTTIDRKRYTSTKEVLDATLIHQSITGLYETRIDLSQLGGDGGGSSGGGGGSGGTLNIEDEYRLHETSKEPDVPLGSTWLSDFPQAWAETGGMGLAVRQAPLIIPLKATSTPVSIKQYPMSQEARLGIKPHIQRLLDQGILVPCQSPWNTPLLPVKKPGTNDYRPVQDLREVNKRVEDIHPTVPNPYNLLSGLPPSHQWYTVLDLKDAFFCLRLHPTSQPLFAFEWRDPEMGISGQLTWTRLPQGFKNSPTLFNEALHRDLADFRIQHPDLILLQYVDDLLLAATSEQDCQRGTRALLQTLGNLGYRASAKKAQICQKQVKYLGYLLKEGQRWLTEARKETVMGQPTPKTPRQLREFLGKAGFCRLFIPGFAEMAAPLYPLTKPGTLFNWGPDQQKAYQEIKQALLTAPALGLPDLTKPFELFVDEKQGYAKGVLTQKLGPWRRPVAYLSKKLDPVAAGWPPCLRMVAAIAVLTKDAGKLTMGQPLVILAPHAVEALVKQPPDRWLSNARMTHYQAMLLDTDRVQFGPVVALNPATLLPLPEKEAPHDCLEILAETHGTRPDLTDQPIPDADYTWYTDGSSFLQEGQRRAGAAVTTETEVIWARALPAGTSAQRAELIALTQALKMAEGKKLNVYTDSRYAFATAHVHGEIYRRRGWLTSEGREIKNKNEILALLKALFLPKRLSIIHCPGHQKGNSAEARGNRMADQAAREAAMKAVLETSTLLAGKRTADGSEFEKRTADGSEFESPKKKAKVE

SEQ ID NO: 4519 - protein, 2096 aa, synthetic construct
MPAAKRVKLDGGDKKYSIGLDIGTNSVGWAVITDEYKVPSKKFKVLGNTDRHSIKKNLIGALLFDSGETAEATRLKRTARRRYTRRKNRICYLQEIFSNEMAKVDDSFFHRLEESFLVEEDKKHERHPIFGNIVDEVAYHEKYPTIYHLRKKLVDSTDKADLRLIYLALAHMIKFRGHFLIEGDLNPDNSDVDKLFIQLVQTYNQLFEENPINASGVDAKAILSARLSKSRRLENLIAQLPGEKKNGLFGNLIALSLGLTPNFKSNFDLAEDAKLQLSKDTYDDDLDNLLAQIGDQYADLFLAAKNLSDAILLSDILRVNTEITKAPLSASMIKRYDEHHQDLTLLKALVRQQLPEKYKEIFFDQSKNGYAGYIDGGASQEEFYKFIKPILEKMDGTEELLVKLNREDLLRKQRTFDNGSIPHQIHLGELHAILRRQEDFYPFLKDNREKIEKILTFRIPYYVGPLARGNSRFAWMTRKSEETITPWNFEEVVDKGASAQSFIERMTNFDKNLPNEKVLPKHSLLYEYFTVYNELTKVKYVTEGMRKPAFLSGEQKKAIVDLLFKTNRKVTVKQLKEDYFKKIECFDSVEISGVEDRFNASLGTYHDLLKIIKDKDFLDNEENEDILEDIVLTLTLFEDREMIEERLKTYAHLFDDKVMKQLKRRRYTGWGRLSRKLINGIRDKQSGKTILDFLKSDGFANRNFMQLIHDDSLTFKEDIQKAQVSGQGDSLHEHIANLAGSPAIKKGILQTVKVVDELVKVMGRHKPENIVIEMARENQTTQKGQKNSRERMKRIEEGIKELGSQILKEHPVENTQLQNEKLYLYYLQNGRDMYVDQELDINRLSDYDVDHIVPQSFLKDDSIDNKVLTRSDKARGKSDNVPSEEVVKKMKNYWRQLLNAKLITQRKFDNLTKAERGGLSELDKAGFIKRQLVETRQITKHVAQILDSRMNTKYDENDKLIREVKVITLKSKLVSDFRKDFQFYKVREINNYHHAHDAYLNAVVGTALIKKYPKLESEFVYGDYKVYDVRKMIAKSEQEIGKATAKYFFYSNIMNFFKTEITLANGEIRKRPLIETNGETGEIVWDKGRDFATVRKVLSMPQVNIVKKTEVQTGGFSKESILPKRNSDKLIARKKDWDPKKYGGFDSPTVAYSVLVVAKVEKGKSKKLKSVKELLGITIMERSSFEKNPIDFLEAKGYKEVKKDLIIKLPKYSLFELENGRKRMLASAGELQKGNELALPSKYVNFLYLASHYEKLKGSPEDNEQKQLFVEQHKHYLDEIIEQISEFSKRVILADANLDKVLSAYNKHRDKPIREQAENIIHLFTLTNLGAPAAFKYFDTTIDRKRYTSTKEVLDATLIHQSITGLYETRIDLSQLGGDGGGGGGGSEAAAKGGTLNIEDEYRLHETSKEPDVPLGSTWLSDFPQAWAETGGMGLAVRQAPLIIPLKATSTPVSIKQYPMSQEARLGIKPHIQRLLDQGILVPCQSPWNTPLLPVKKPGTNDYRPVQDLREVNKRVEDIHPTVPNPYNLLSGLPPSHQWYTVLDLKDAFFCLRLHPTSQPLFAFEWRDPEMGISGQLTWTRLPQGFKNSPTLFNEALHRDLADFRIQHPDLILLQYVDDLLLAATSEQDCQRGTRALLQTLGNLGYRASAKKAQICQKQVKYLGYLLKEGQRWLTEARKETVMGQPTPKTPRQLREFLGKAGFCRLFIPGFAEMAAPLYPLTKPGTLFNWGPDQQKAYQEIKQALLTAPALGLPDLTKPFELFVDEKQGYAKGVLTQKLGPWRRPVAYLSKKLDPVAAGWPPCLRMVAAIAVLTKDAGKLTMGQPLVILAPHAVEALVKQPPDRWLSNARMTHYQAMLLDTDRVQFGPVVALNPATLLPLPEKEAPHDCLEILAETHGTRPDLTDQPIPDADYTWYTDGSSFLQEGQRRAGAAVTTETEVIWARALPAGTSAQRAELIALTQALKMAEGKKLNVYTDSRYAFATAHVHGEIYRRRGWLTSEGREIKNKNEILALLKALFLPKRLSIIHCPGHQKGNSAEARGNRMADQAAREAAMKAVLETSTLLAGKRTADGSEFEKRTADGSEFESPKKKAKVE

SEQ ID NO: 4520 - protein, 2094 aa, synthetic construct
MPAAKRVKLDGGDKKYSIGLDIGTNSVGWAVITDEYKVPSKKFKVLGNTDRHSIKKNLIGALLFDSGETAEATRLKRTARRRYTRRKNRICYLQEIFSNEMAKVDDSFFHRLEESFLVEEDKKHERHPIFGNIVDEVAYHEKYPTIYHLRKKLVDSTDKADLRLIYLALAHMIKFRGHFLIEGDLNPDNSDVDKLFIQLVQTYNQLFEENPINASGVDAKAILSARLSKSRRLENLIAQLPGEKKNGLFGNLIALSLGLTPNFKSNFDLAEDAKLQLSKDTYDDDLDNLLAQIGDQYADLFLAAKNLSDAILLSDILRVNTEITKAPLSASMIKRYDEHHQDLTLLKALVRQQLPEKYKEIFFDQSKNGYAGYIDGGASQEEFYKFIKPILEKMDGTEELLVKLNREDLLRKQRTFDNGSIPHQIHLGELHAILRRQEDFYPFLKDNREKIEKILTFRIPYYVGPLARGNSRFAWMTRKSEETITPWNFEEVVDKGASAQSFIERMTNFDKNLPNEKVLPKHSLLYEYFTVYNELTKVKYVTEGMRKPAFLSGEQKKAIVDLLFKTNRKVTVKQLKEDYFKKIECFDSVEISGVEDRFNASLGTYHDLLKIIKDKDFLDNEENEDILEDIVLTLTLFEDREMIEERLKTYAHLFDDKVMKQLKRRRYTGWGRLSRKLINGIRDKQSGKTILDFLKSDGFANRNFMQLIHDDSLTFKEDIQKAQVSGQGDSLHEHIANLAGSPAIKKGILQTVKVVDELVKVMGRHKPENIVIEMARENQTTQKGQKNSRERMKRIEEGIKELGSQILKEHPVENTQLQNEKLYLYYLQNGRDMYVDQELDINRLSDYDVDHIVPQSFLKDDSIDNKVLTRSDKARGKSDNVPSEEVVKKMKNYWRQLLNAKLITQRKFDNLTKAERGGLSELDKAGFIKRQLVETRQITKHVAQILDSRMNTKYDENDKLIREVKVITLKSKLVSDFRKDFQFYKVREINNYHHAHDAYLNAVVGTALIKKYPKLESEFVYGDYKVYDVRKMIAKSEQEIGKATAKYFFYSNIMNFFKTEITLANGEIRKRPLIETNGETGEIVWDKGRDFATVRKVLSMPQVNIVKKTEVQTGGFSKESILPKRNSDKLIARKKDWDPKKYGGFDSPTVAYSVLVVAKVEKGKSKKLKSVKELLGITIMERSSFEKNPIDFLEAKGYKEVKKDLIIKLPKYSLFELENGRKRMLASAGELQKGNELALPSKYVNFLYLASHYEKLKGSPEDNEQKQLFVEQHKHYLDEIIEQISEFSKRVILADANLDKVLSAYNKHRDKPIREQAENIIHLFTLTNLGAPAAFKYFDTTIDRKRYTSTKEVLDATLIHQSITGLYETRIDLSQLGGDGGGGGGGSPAPGGTLNLEDEYRLYETSAEPEVSPGSTWLSDFPQAWAETGGMGLAVRQAPLIIPLKATSTPVSIKQYPMSQEAKLGIKPHIQRLLDQGILVPCQSPWNTPLLPVKKPGTNDYRPVQDLREVNKRVEDIHPTVPNPYNLLSGLPPSHRWYTVLDLKDAFFCLRLHPTSQPLFAFEWRDPGMGISGQLTWTRLPQGFKNSPTLFNEALHRDLADFRIQHPDLILLQYVDDILLAATSELDCQQGTRALLLTLGNLGYRASAKKAQLCQKQVKYLGYLLKEGQRWLTEARKETVMGQPTPKTPRQLREFLGKAGFCRLFIPGFAEMAAPLYPLTKPGTLFNWGPDQQKAYQEIKQALLTAPALGLPDLTKPFELFVDEKQGYAKGVLTQKLGPWRRPVAYLSKKLDPVAAGWPPCLRMVAAIAVLRKDAGKLTMGQPLVILAPHAVEALVKQPPDRWLSNARMTHYQAMLLDTDRVQFGPVVALNPATLLPLPEEGAPHDCLEILAETHGTRPDLTDQPIPDADHTWYTDGSSFLQEGQRKAGAAVTTETEVIWARALPAGTSAQRAELIALTQALKMAEGKRLNVYTDSRYAFATAHIHGEIYRRRGWLTSEGREIKNKSEILALLKALFLPKRLSIIHCLGHQKGDSAEARGNRLADQAAREAAIKTPPDTSTLLAGKRTADGSEFEKRTADGSEFESPKKKAKVE

SEQ ID NO: 4521 - protein, 2094 aa, synthetic construct
MPAAKRVKLDGGDKKYSIGLDIGTNSVGWAVITDEYKVPSKKFKVLGNTDRHSIKKNLIGALLFDSGETAEATRLKRTARRRYTRRKNRICYLQEIFSNEMAKVDDSFFHRLEESFLVEEDKKHERHPIFGNIVDEVAYHEKYPTIYHLRKKLVDSTDKADLRLIYLALAHMIKFRGHFLIEGDLNPDNSDVDKLFIQLVQTYNQLFEENPINASGVDAKAILSARLSKSRRLENLIAQLPGEKKNGLFGNLIALSLGLTPNFKSNFDLAEDAKLQLSKDTYDDDLDNLLAQIGDQYADLFLAAKNLSDAILLSDILRVNTEITKAPLSASMIKRYDEHHQDLTLLKALVRQQLPEKYKEIFFDQSKNGYAGYIDGGASQEEFYKFIKPILEKMDGTEELLVKLNREDLLRKQRTFDNGSIPHQIHLGELHAILRRQEDFYPFLKDNREKIEKILTFRIPYYVGPLARGNSRFAWMTRKSEETITPWNFEEVVDKGASAQSFIERMTNFDKNLPNEKVLPKHSLLYEYFTVYNELTKVKYVTEGMRKPAFLSGEQKKAIVDLLFKTNRKVTVKQLKEDYFKKIECFDSVEISGVEDRFNASLGTYHDLLKIIKDKDFLDNEENEDILEDIVLTLTLFEDREMIEERLKTYAHLFDDKVMKQLKRRRYTGWGRLSRKLINGIRDKQSGKTILDFLKSDGFANRNFMQLIHDDSLTFKEDIQKAQVSGQGDSLHEHIANLAGSPAIKKGILQTVKVVDELVKVMGRHKPENIVIEMARENQTTQKGQKNSRERMKRIEEGIKELGSQILKEHPVENTQLQNEKLYLYYLQNGRDMYVDQELDINRLSDYDVDHIVPQSFLKDDSIDNKVLTRSDKARGKSDNVPSEEVVKKMKNYWRQLLNAKLITQRKFDNLTKAERGGLSELDKAGFIKRQLVETRQITKHVAQILDSRMNTKYDENDKLIREVKVITLKSKLVSDFRKDFQFYKVREINNYHHAHDAYLNAVVGTALIKKYPKLESEFVYGDYKVYDVRKMIAKSEQEIGKATAKYFFYSNIMNFFKTEITLANGEIRKRPLIETNGETGEIVWDKGRDFATVRKVLSMPQVNIVKKTEVQTGGFSKESILPKRNSDKLIARKKDWDPKKYGGFDSPTVAYSVLVVAKVEKGKSKKLKSVKELLGITIMERSSFEKNPIDFLEAKGYKEVKKDLIIKLPKYSLFELENGRKRMLASAGELQKGNELALPSKYVNFLYLASHYEKLKGSPEDNEQKQLFVEQHKHYLDEIIEQISEFSKRVILADANLDKVLSAYNKHRDKPIREQAENIIHLFTLTNLGAPAAFKYFDTTIDRKRYTSTKEVLDATLIHQSITGLYETRIDLSQLGGDGGPAPGGGGGSGGTLNIEDEHRLHETSKEPDVSLGSTWLSDFPQAWAETGGMGLAVRQAPLIIPLKATSTPVSIKQYPMSQEARLGIKPHIQRLLDQGILVPCQSPWNTPLLPVKKPGTNDYRPVQDLREVNKRVEDIHPTVPNPYNLLSGLPPSHQWYTVLDLKDAFFCLRLHPTSQPLFAFEWRDPEMGISGQLTWTRLPQGFKNSPTLFNEALHRDLADFRIQHPDLILLQYVDDLLLAATSELDCQQGTRALLQTLGNLGYRASAKKAQICQKQVKYLGYLLKEGQRWLTEARKETVMGQPTPKTPRQLREFLGKAGFCRLFIPGFAEMAAPLYPLTKPGTLFNWGPDQQKAYQEIKQALLTAPALGLPDLTKPFELFVDEKQGYAKGVLTQKLGPWRRPVAYLSKKLDPVAAGWPPCLRMVAAIAVLTKDAGKLTMGQPLVILAPHAVEALVKQPPDRWLSNARMTHYQALLLDTDRVQFGPVVALNPATLLPLPEEGLQHNCLDILAEAHGTRPDLTDQPLPDADHTWYTDGSSLLQEGQRKAGAAVTTETEVIWAKALPAGTSAQRAELIALTQALKMAEGKKLNVYTDSRYAFATAHIHGEIYRRRGWLTSEGKEIKNKDEILALLKALFLPKRLSIIHCPGHQKGHSAEARGNRMADQAARKAAITETPDTSTLLAGKRTADGSEFEKRTADGSEFESPKKKAKVE

SEQ ID NO: 4522 - protein, 2096 aa, synthetic construct
MPAAKRVKLDGGDKKYSIGLDIGTNSVGWAVITDEYKVPSKKFKVLGNTDRHSIKKNLIGALLFDSGETAEATRLKRTARRRYTRRKNRICYLQEIFSNEMAKVDDSFFHRLEESFLVEEDKKHERHPIFGNIVDEVAYHEKYPTIYHLRKKLVDSTDKADLRLIYLALAHMIKFRGHFLIEGDLNPDNSDVDKLFIQLVQTYNQLFEENPINASGVDAKAILSARLSKSRRLENLIAQLPGEKKNGLFGNLIALSLGLTPNFKSNFDLAEDAKLQLSKDTYDDDLDNLLAQIGDQYADLFLAAKNLSDAILLSDILRVNTEITKAPLSASMIKRYDEHHQDLTLLKALVRQQLPEKYKEIFFDQSKNGYAGYIDGGASQEEFYKFIKPILEKMDGTEELLVKLNREDLLRKQRTFDNGSIPHQIHLGELHAILRRQEDFYPFLKDNREKIEKILTFRIPYYVGPLARGNSRFAWMTRKSEETITPWNFEEVVDKGASAQSFIERMTNFDKNLPNEKVLPKHSLLYEYFTVYNELTKVKYVTEGMRKPAFLSGEQKKAIVDLLFKTNRKVTVKQLKEDYFKKIECFDSVEISGVEDRFNASLGTYHDLLKIIKDKDFLDNEENEDILEDIVLTLTLFEDREMIEERLKTYAHLFDDKVMKQLKRRRYTGWGRLSRKLINGIRDKQSGKTILDFLKSDGFANRNFMQLIHDDSLTFKEDIQKAQVSGQGDSLHEHIANLAGSPAIKKGILQTVKVVDELVKVMGRHKPENIVIEMARENQTTQKGQKNSRERMKRIEEGIKELGSQILKEHPVENTQLQNEKLYLYYLQNGRDMYVDQELDINRLSDYDVDHIVPQSFLKDDSIDNKVLTRSDKARGKSDNVPSEEVVKKMKNYWRQLLNAKLITQRKFDNLTKAERGGLSELDKAGFIKRQLVETRQITKHVAQILDSRMNTKYDENDKLIREVKVITLKSKLVSDFRKDFQFYKVREINNYHHAHDAYLNAVVGTALIKKYPKLESEFVYGDYKVYDVRKMIAKSEQEIGKATAKYFFYSNIMNFFKTEITLANGEIRKRPLIETNGETGEIVWDKGRDFATVRKVLSMPQVNIVKKTEVQTGGFSKESILPKRNSDKLIARKKDWDPKKYGGFDSPTVAYSVLVVAKVEKGKSKKLKSVKELLGITIMERSSFEKNPIDFLEAKGYKEVKKDLIIKLPKYSLFELENGRKRMLASAGELQKGNELALPSKYVNFLYLASHYEKLKGSPEDNEQKQLFVEQHKHYLDEIIEQISEFSKRVILADANLDKVLSAYNKHRDKPIREQAENIIHLFTLTNLGAPAAFKYFDTTIDRKRYTSTKEVLDATLIHQSITGLYETRIDLSQLGGDGGGGSEAAAKGSSGGTLNIEDEYRLHETSKEPDVPLGSTWLSDFPQAWAETGGMGLAVRQAPLIIPLKATSTPVSIKQYPMSQEARLGIKPHIQRLLDQGILVPCQSPWNTPLLPVKKPGTNDYRPVQDLREVNKRVEDIHPTVPNPYNLLSGLPPSHQWYTVLDLKDAFFCLRLHPTSQPLFAFEWRDPEMGISGQLTWTRLPQGFKNSPTLFNEALHRDLADFRIQHPDLILLQYVDDLLLAATSEQDCQRGTRALLQTLGNLGYRASAKKAQICQKQVKYLGYLLKEGQRWLTEARKETVMGQPTPKTPRQLREFLGKAGFCRLFIPGFAEMAAPLYPLTKPGTLFNWGPDQQKAYQEIKQALLTAPALGLPDLTKPFELFVDEKQGYAKGVLTQKLGPWRRPVAYLSKKLDPVAAGWPPCLRMVAAIAVLTKDAGKLTMGQPLVILAPHAVEALVKQPPDRWLSNARMTHYQAMLLDTDRVQFGPVVALNPATLLPLPEKEAPHDCLEILAETHGTRPDLTDQPIPDADYTWYTDGSSFLQEGQRRAGAAVTTETEVIWARALPAGTSAQRAELIALTQALKMAEGKKLNVYTDSRYAFATAHVHGEIYRRRGWLTSEGREIKNKNEILALLKALFLPKRLSIIHCPGHQKGNSAEARGNRMADQAAREAAMKAVLETSTLLAGKRTADGSEFEKRTADGSEFESPKKKAKVE

SEQ ID NO: 4523 - protein, 2096 aa, synthetic construct
MPAAKRVKLDGGDKKYSIGLDIGTNSVGWAVITDEYKVPSKKFKVLGNTDRHSIKKNLIGALLFDSGETAEATRLKRTARRRYTRRKNRICYLQEIFSNEMAKVDDSFFHRLEESFLVEEDKKHERHPIFGNIVDEVAYHEKYPTIYHLRKKLVDSTDKADLRLIYLALAHMIKFRGHFLIEGDLNPDNSDVDKLFIQLVQTYNQLFEENPINASGVDAKAILSARLSKSRRLENLIAQLPGEKKNGLFGNLIALSLGLTPNFKSNFDLAEDAKLQLSKDTYDDDLDNLLAQIGDQYADLFLAAKNLSDAILLSDILRVNTEITKAPLSASMIKRYDEHHQDLTLLKALVRQQLPEKYKEIFFDQSKNGYAGYIDGGASQEEFYKFIKPILEKMDGTEELLVKLNREDLLRKQRTFDNGSIPHQIHLGELHAILRRQEDFYPFLKDNREKIEKILTFRIPYYVGPLARGNSRFAWMTRKSEETITPWNFEEVVDKGASAQSFIERMTNFDKNLPNEKVLPKHSLLYEYFTVYNELTKVKYVTEGMRKPAFLSGEQKKAIVDLLFKTNRKVTVKQLKEDYFKKIECFDSVEISGVEDRFNASLGTYHDLLKIIKDKDFLDNEENEDILEDIVLTLTLFEDREMIEERLKTYAHLFDDKVMKQLKRRRYTGWGRLSRKLINGIRDKQSGKTILDFLKSDGFANRNFMQLIHDDSLTFKEDIQKAQVSGQGDSLHEHIANLAGSPAIKKGILQTVKVVDELVKVMGRHKPENIVIEMARENQTTQKGQKNSRERMKRIEEGIKELGSQILKEHPVENTQLQNEKLYLYYLQNGRDMYVDQELDINRLSDYDVDHIVPQSFLKDDSIDNKVLTRSDKARGKSDNVPSEEVVKKMKNYWRQLLNAKLITQRKFDNLTKAERGGLSELDKAGFIKRQLVETRQITKHVAQILDSRMNTKYDENDKLIREVKVITLKSKLVSDFRKDFQFYKVREINNYHHAHDAYLNAVVGTALIKKYPKLESEFVYGDYKVYDVRKMIAKSEQEIGKATAKYFFYSNIMNFFKTEITLANGEIRKRPLIETNGETGEIVWDKGRDFATVRKVLSMPQVNIVKKTEVQTGGFSKESILPKRNSDKLIARKKDWDPKKYGGFDSPTVAYSVLVVAKVEKGKSKKLKSVKELLGITIMERSSFEKNPIDFLEAKGYKEVKKDLIIKLPKYSLFELENGRKRMLASAGELQKGNELALPSKYVNFLYLASHYEKLKGSPEDNEQKQLFVEQHKHYLDEIIEQISEFSKRVILADANLDKVLSAYNKHRDKPIREQAENIIHLFTLTNLGAPAAFKYFDTTIDRKRYTSTKEVLDATLIHQSITGLYETRIDLSQLGGDGGEAAAKGGSGSSGGTLNIEDEYRLHETSKEPDVPLGSTWLSDFPQAWAETGGMGLAVRQAPLIIPLKATSTPVSIKQYPMSQEARLGIKPHIQRLLDQGILVPCQSPWNTPLLPVKKPGTNDYRPVQDLREVNKRVEDIHPTVPNPYNLLSGLPPSHQWYTVLDLKDAFFCLRLHPTSQPLFAFEWRDPEMGISGQLTWTRLPQGFKNSPTLFNEALHRDLADFRIQHPDLILLQYVDDLLLAATSEQDCQRGTRALLQTLGNLGYRASAKKAQICQKQVKYLGYLLKEGQRWLTEARKETVMGQPTPKTPRQLREFLGTAGFCRLWIPGFAEMAAPLYPLTKPGTLFNWGPDQQKAYQEIKQALLTAPALGLPDLTKPFELFVDEKQGYAKGVLTQKLGPWRRPVAYLSKKLDPVAAGWPPCLRMVAAIAVLTKDAGKLTMGQPLVILAPHAVEALVKQPPDRWLSNARMTHYQAMLLDTDRVQFGPVVALNPATLLPLPEKEAPHDCLEILAETHGTRPDLTDQPIPDADYTWYTDGSSFLQEGQRRAGAAVTTETEVIWARALPAGTSAQRAELIALTQALKMAEGKKLNVYTDSRYAFATAHVHGEIYRRRGWLTSEGREIKNKNEILALLKALFLPKRLSIIHCPGHQKGNSAEARGNRMADQAAREAAMKAVLETSTLLAGKRTADGSEFEKRTADGSEFESPKKKAKVE

SEQ ID NO: 4524 - protein, 2096 aa, synthetic construct
MPAAKRVKLDGGDKKYSIGLDIGTNSVGWAVITDEYKVPSKKFKVLGNTDRHSIKKNLIGALLFDSGETAEATRLKRTARRRYTRRKNRICYLQEIFSNEMAKVDDSFFHRLEESFLVEEDKKHERHPIFGNIVDEVAYHEKYPTIYHLRKKLVDSTDKADLRLIYLALAHMIKFRGHFLIEGDLNPDNSDVDKLFIQLVQTYNQLFEENPINASGVDAKAILSARLSKSRRLENLIAQLPGEKKNGLFGNLIALSLGLTPNFKSNFDLAEDAKLQLSKDTYDDDLDNLLAQIGDQYADLFLAAKNLSDAILLSDILRVNTEITKAPLSASMIKRYDEHHQDLTLLKALVRQQLPEKYKEIFFDQSKNGYAGYIDGGASQEEFYKFIKPILEKMDGTEELLVKLNREDLLRKQRTFDNGSIPHQIHLGELHAILRRQEDFYPFLKDNREKIEKILTFRIPYYVGPLARGNSRFAWMTRKSEETITPWNFEEVVDKGASAQSFIERMTNFDKNLPNEKVLPKHSLLYEYFTVYNELTKVKYVTEGMRKPAFLSGEQKKAIVDLLFKTNRKVTVKQLKEDYFKKIECFDSVEISGVEDRFNASLGTYHDLLKIIKDKDFLDNEENEDILEDIVLTLTLFEDREMIEERLKTYAHLFDDKVMKQLKRRRYTGWGRLSRKLINGIRDKQSGKTILDFLKSDGFANRNFMQLIHDDSLTFKEDIQKAQVSGQGDSLHEHIANLAGSPAIKKGILQTVKVVDELVKVMGRHKPENIVIEMARENQTTQKGQKNSRERMKRIEEGIKELGSQILKEHPVENTQLQNEKLYLYYLQNGRDMYVDQELDINRLSDYDVDHIVPQSFLKDDSIDNKVLTRSDKARGKSDNVPSEEVVKKMKNYWRQLLNAKLITQRKFDNLTKAERGGLSELDKAGFIKRQLVETRQITKHVAQILDSRMNTKYDENDKLIREVKVITLKSKLVSDFRKDFQFYKVREINNYHHAHDAYLNAVVGTALIKKYPKLESEFVYGDYKVYDVRKMIAKSEQEIGKATAKYFFYSNIMNFFKTEITLANGEIRKRPLIETNGETGEIVWDKGRDFATVRKVLSMPQVNIVKKTEVQTGGFSKESILPKRNSDKLIARKKDWDPKKYGGFDSPTVAYSVLVVAKVEKGKSKKLKSVKELLGITIMERSSFEKNPIDFLEAKGYKEVKKDLIIKLPKYSLFELENGRKRMLASAGELQKGNELALPSKYVNFLYLASHYEKLKGSPEDNEQKQLFVEQHKHYLDEIIEQISEFSKRVILADANLDKVLSAYNKHRDKPIREQAENIIHLFTLTNLGAPAAFKYFDTTIDRKRYTSTKEVLDATLIHQSITGLYETRIDLSQLGGDGGEAAAKGSSGGSGGTLNIEDEYRLHETSKEPDVPLGSTWLSDFPQAWAETGGMGLAVRQAPLIIPLKATSTPVSIKQYPMSQEARLGIKPHIQRLLDQGILVPCQSPWNTPLLPVKKPGTNDYRPVQDLREVNKRVEDIHPTVPNPYNLLSGLPPSHQWYTVLDLKDAFFCLRLHPTSQPLFAFEWRDPEMGISGQLTWTRLPQGFKNSPTLFNEALHRDLADFRIQHPDLILLQYVDDLLLAATSEQDCQRGTRALLQTLGNLGYRASAKKAQICQKQVKYLGYLLKEGQRWLTEARKETVMGQPTPKTPRQLREFLGTAGFCRLWIPGFAEMAAPLYPLTKPGTLFNWGPDQQKAYQEIKQALLTAPALGLPDLTKPFELFVDEKQGYAKGVLTQKLGPWRRPVAYLSKKLDPVAAGWPPCLRMVAAIAVLTKDAGKLTMGQPLVILAPHAVEALVKQPPDRWLSNARMTHYQAMLLDTDRVQFGPVVALNPATLLPLPEKEAPHDCLEILAETHGTRPDLTDQPIPDADYTWYTDGSSFLQEGQRRAGAAVTTETEVIWARALPAGTSAQRAELIALTQALKMAEGKKLNVYTDSRYAFATAHVHGEIYRRRGWLTSEGREIKNKNEILALLKALFLPKRLSIIHCPGHQKGNSAEARGNRMADQAAREAAMKAVLETSTLLAGKRTADGSEFEKRTADGSEFESPKKKAKVE

SEQ ID NO: 4525 - protein, 2094 aa, synthetic construct
MPAAKRVKLDGGDKKYSIGLDIGTNSVGWAVITDEYKVPSKKFKVLGNTDRHSIKKNLIGALLFDSGETAEATRLKRTARRRYTRRKNRICYLQEIFSNEMAKVDDSFFHRLEESFLVEEDKKHERHPIFGNIVDEVAYHEKYPTIYHLRKKLVDSTDKADLRLIYLALAHMIKFRGHFLIEGDLNPDNSDVDKLFIQLVQTYNQLFEENPINASGVDAKAILSARLSKSRRLENLIAQLPGEKKNGLFGNLIALSLGLTPNFKSNFDLAEDAKLQLSKDTYDDDLDNLLAQIGDQYADLFLAAKNLSDAILLSDILRVNTEITKAPLSASMIKRYDEHHQDLTLLKALVRQQLPEKYKEIFFDQSKNGYAGYIDGGASQEEFYKFIKPILEKMDGTEELLVKLNREDLLRKQRTFDNGSIPHQIHLGELHAILRRQEDFYPFLKDNREKIEKILTFRIPYYVGPLARGNSRFAWMTRKSEETITPWNFEEVVDKGASAQSFIERMTNFDKNLPNEKVLPKHSLLYEYFTVYNELTKVKYVTEGMRKPAFLSGEQKKAIVDLLFKTNRKVTVKQLKEDYFKKIECFDSVEISGVEDRFNASLGTYHDLLKIIKDKDFLDNEENEDILEDIVLTLTLFEDREMIEERLKTYAHLFDDKVMKQLKRRRYTGWGRLSRKLINGIRDKQSGKTILDFLKSDGFANRNFMQLIHDDSLTFKEDIQKAQVSGQGDSLHEHIANLAGSPAIKKGILQTVKVVDELVKVMGRHKPENIVIEMARENQTTQKGQKNSRERMKRIEEGIKELGSQILKEHPVENTQLQNEKLYLYYLQNGRDMYVDQELDINRLSDYDVDHIVPQSFLKDDSIDNKVLTRSDKARGKSDNVPSEEVVKKMKNYWRQLLNAKLITQRKFDNLTKAERGGLSELDKAGFIKRQLVETRQITKHVAQILDSRMNTKYDENDKLIREVKVITLKSKLVSDFRKDFQFYKVREINNYHHAHDAYLNAVVGTALIKKYPKLESEFVYGDYKVYDVRKMIAKSEQEIGKATAKYFFYSNIMNFFKTEITLANGEIRKRPLIETNGETGEIVWDKGRDFATVRKVLSMPQVNIVKKTEVQTGGFSKESILPKRNSDKLIARKKDWDPKKYGGFDSPTVAYSVLVVAKVEKGKSKKLKSVKELLGITIMERSSFEKNPIDFLEAKGYKEVKKDLIIKLPKYSLFELENGRKRMLASAGELQKGNELALPSKYVNFLYLASHYEKLKGSPEDNEQKQLFVEQHKHYLDEIIEQISEFSKRVILADANLDKVLSAYNKHRDKPIREQAENIIHLFTLTNLGAPAAFKYFDTTIDRKRYTSTKEVLDATLIHQSITGLYETRIDLSQLGGDGGGGSPAPGSSGGTLNIEDEYRLHETSKEPDVPLGSTWLSDFPQAWAETGGMGLAVRQAPLIIPLKATSTPVSIKQYPMSQEARLGIKPHIQRLLDQGILVPCQSPWNTPLLPVKKPGTNDYRPVQDLREVNKRVEDIHPTVPNPYNLLSGLPPSHQWYTVLDLKDAFFCLRLHPTSQPLFAFEWRDPEMGISGQLTWTRLPQGFKNSPTLFNEALHRDLADFRIQHPDLILLQYVDDLLLAATSEQDCQRGTRALLQTLGNLGYRASAKKAQICQKQVKYLGYLLKEGQRWLTEARKETVMGQPTPKTPRQLREFLGKAGFCRLFIPGFAEMAAPLYPLTKPGTLFNWGPDQQKAYQEIKQALLTAPALGLPDLTKPFELFVDEKQGYAKGVLTQKLGPWRRPVAYLSKKLDPVAAGWPPCLRMVAAIAVLTKDAGKLTMGQPLVILAPHAVEALVKQPPDRWLSNARMTHYQAMLLDTDRVQFGPVVALNPATLLPLPEKEAPHDCLEILAETHGTRPDLTDQPIPDADYTWYTDGSSFLQEGQRRAGAAVTTETEVIWARALPAGTSAQRAELIALTQALKMAEGKKLNVYTDSRYAFATAHVHGEIYRRRGWLTSEGREIKNKNEILALLKALFLPKRLSIIHCPGHQKGNSAEARGNRMADQAAREAAMKAVLETSTLLAGKRTADGSEFEKRTADGSEFESPKKKAKVE

SEQ ID NO: 4526 - protein, 2125 aa, synthetic construct
MPAAKRVKLDGGDKKYSIGLDIGTNSVGWAVITDEYKVPSKKFKVLGNTDRHSIKKNLIGALLFDSGETAEATRLKRTARRRYTRRKNRICYLQEIFSNEMAKVDDSFFHRLEESFLVEEDKKHERHPIFGNIVDEVAYHEKYPTIYHLRKKLVDSTDKADLRLIYLALAHMIKFRGHFLIEGDLNPDNSDVDKLFIQLVQTYNQLFEENPINASGVDAKAILSARLSKSRRLENLIAQLPGEKKNGLFGNLIALSLGLTPNFKSNFDLAEDAKLQLSKDTYDDDLDNLLAQIGDQYADLFLAAKNLSDAILLSDILRVNTEITKAPLSASMIKRYDEHHQDLTLLKALVRQQLPEKYKEIFFDQSKNGYAGYIDGGASQEEFYKFIKPILEKMDGTEELLVKLNREDLLRKQRTFDNGSIPHQIHLGELHAILRRQEDFYPFLKDNREKIEKILTFRIPYYVGPLARGNSRFAWMTRKSEETITPWNFEEVVDKGASAQSFIERMTNFDKNLPNEKVLPKHSLLYEYFTVYNELTKVKYVTEGMRKPAFLSGEQKKAIVDLLFKTNRKVTVKQLKEDYFKKIECFDSVEISGVEDRFNASLGTYHDLLKIIKDKDFLDNEENEDILEDIVLTLTLFEDREMIEERLKTYAHLFDDKVMKQLKRRRYTGWGRLSRKLINGIRDKQSGKTILDFLKSDGFANRNFMQLIHDDSLTFKEDIQKAQVSGQGDSLHEHIANLAGSPAIKKGILQTVKVVDELVKVMGRHKPENIVIEMARENQTTQKGQKNSRERMKRIEEGIKELGSQILKEHPVENTQLQNEKLYLYYLQNGRDMYVDQELDINRLSDYDVDHIVPQSFLKDDSIDNKVLTRSDKARGKSDNVPSEEVVKKMKNYWRQLLNAKLITQRKFDNLTKAERGGLSELDKAGFIKRQLVETRQITKHVAQILDSRMNTKYDENDKLIREVKVITLKSKLVSDFRKDFQFYKVREINNYHHAHDAYLNAVVGTALIKKYPKLESEFVYGDYKVYDVRKMIAKSEQEIGKATAKYFFYSNIMNFFKTEITLANGEIRKRPLIETNGETGEIVWDKGRDFATVRKVLSMPQVNIVKKTEVQTGGFSKESILPKRNSDKLIARKKDWDPKKYGGFDSPTVAYSVLVVAKVEKGKSKKLKSVKELLGITIMERSSFEKNPIDFLEAKGYKEVKKDLIIKLPKYSLFELENGRKRMLASAGELQKGNELALPSKYVNFLYLASHYEKLKGSPEDNEQKQLFVEQHKHYLDEIIEQISEFSKRVILADANLDKVLSAYNKHRDKPIREQAENIIHLFTLTNLGAPAAFKYFDTTIDRKRYTSTKEVLDATLIHQSITGLYETRIDLSQLGGDGGGSSPAPGGSGGLLGRDLLTKLKAQIQFSTEGPQVTWEDRPAMCLVLNLEEEYRLHEKPVPPSIDPSWLQLFPMVWAEKAGMGLANQVPPVVVELKSDASPVAVRQYPMSKEAREGIRPHIQRFLDLGILVPCQSPWNTPLLPVKKPGTNDYRPVQDLREVNKRVQDIHPTVPNPYNLLSSLPPSHTWYSVLDLKDAFFCLKLHPNSQPLFAFEWRDPEKGNTGQLTWTRLPQGFKNSPTLFNEALHRDLASFRALNPQVVMLQYVDDLLVAAPTYRDCKEGTRRLLQELSKLGYRVSAKKAQLCREEVTYLGYLLKGGKRWLTPARKATVMKIPTPTTPRQVREFLGTAGFCRLWIPGFASLAAPLYPLTRPKVPFTWTEAHQEAFGRIKEALLSAPALALPDLTKPFALYVDEKEGVARGVLTQTLGPWRRPVAYLSKKLDPVASGWPTCLKAIAAVALLLKDADKLTLGQNVLVIAPHNLESIVRQPPDRWMTNARMTHYQSLLLNERVSFAPPAILNPATLLPVESDDTPIHICSEILAEETGTRPDLRDQPLPGVPAWYTDGSSFIMDGRRQAGAAIVDNKRTVWASNLPEGTSAQKAELIALTQALRLAEGKSINIYTDSRYAFATAHVHGAIYKQRGWLTSAGKDIKNKEEILALLEAIHLPKRVAIIHCPGHQRGTDPVATGNRKADEAAKQAAQSTRILTETTKNAGKRTADGSEFEKRTADGSEFESPKKKAKVE

SEQ ID NO: 4527 - protein, 2096 aa, synthetic construct
MPAAKRVKLDGGDKKYSIGLDIGTNSVGWAVITDEYKVPSKKFKVLGNTDRHSIKKNLIGALLFDSGETAEATRLKRTARRRYTRRKNRICYLQEIFSNEMAKVDDSFFHRLEESFLVEEDKKHERHPIFGNIVDEVAYHEKYPTIYHLRKKLVDSTDKADLRLIYLALAHMIKFRGHFLIEGDLNPDNSDVDKLFIQLVQTYNQLFEENPINASGVDAKAILSARLSKSRRLENLIAQLPGEKKNGLFGNLIALSLGLTPNFKSNFDLAEDAKLQLSKDTYDDDLDNLLAQIGDQYADLFLAAKNLSDAILLSDILRVNTEITKAPLSASMIKRYDEHHQDLTLLKALVRQQLPEKYKEIFFDQSKNGYAGYIDGGASQEEFYKFIKPILEKMDGTEELLVKLNREDLLRKQRTFDNGSIPHQIHLGELHAILRRQEDFYPFLKDNREKIEKILTFRIPYYVGPLARGNSRFAWMTRKSEETITPWNFEEVVDKGASAQSFIERMTNFDKNLPNEKVLPKHSLLYEYFTVYNELTKVKYVTEGMRKPAFLSGEQKKAIVDLLFKTNRKVTVKQLKEDYFKKIECFDSVEISGVEDRFNASLGTYHDLLKIIKDKDFLDNEENEDILEDIVLTLTLFEDREMIEERLKTYAHLFDDKVMKQLKRRRYTGWGRLSRKLINGIRDKQSGKTILDFLKSDGFANRNFMQLIHDDSLTFKEDIQKAQVSGQGDSLHEHIANLAGSPAIKKGILQTVKVVDELVKVMGRHKPENIVIEMARENQTTQKGQKNSRERMKRIEEGIKELGSQILKEHPVENTQLQNEKLYLYYLQNGRDMYVDQELDINRLSDYDVDHIVPQSFLKDDSIDNKVLTRSDKARGKSDNVPSEEVVKKMKNYWRQLLNAKLITQRKFDNLTKAERGGLSELDKAGFIKRQLVETRQITKHVAQILDSRMNTKYDENDKLIREVKVITLKSKLVSDFRKDFQFYKVREINNYHHAHDAYLNAVVGTALIKKYPKLESEFVYGDYKVYDVRKMIAKSEQEIGKATAKYFFYSNIMNFFKTEITLANGEIRKRPLIETNGETGEIVWDKGRDFATVRKVLSMPQVNIVKKTEVQTGGFSKESILPKRNSDKLIARKKDWDPKKYGGFDSPTVAYSVLVVAKVEKGKSKKLKSVKELLGITIMERSSFEKNPIDFLEAKGYKEVKKDLIIKLPKYSLFELENGRKRMLASAGELQKGNELALPSKYVNFLYLASHYEKLKGSPEDNEQKQLFVEQHKHYLDEIIEQISEFSKRVILADANLDKVLSAYNKHRDKPIREQAENIIHLFTLTNLGAPAAFKYFDTTIDRKRYTSTKEVLDATLIHQSITGLYETRIDLSQLGGDGGEAAAKPAPGGSGGTLNIEDEYRLHETSKEPDVPLGSTWLSDFPQAWAETGGMGLAVRQAPLIIPLKATSTPVSIKQYPMSQEARLGIKPHIQRLLDQGILVPCQSPWNTPLLPVKKPGTNDYRPVQDLREVNKRVEDIHPTVPNPYNLLSGLPPSHQWYTVLDLKDAFFCLRLHPTSQPLFAFEWRDPEMGISGQLTWTRLPQGFKNSPTLFNEALHRDLADFRIQHPDLILLQYVDDLLLAATSEQDCQRGTRALLQTLGNLGYRASAKKAQICQKQVKYLGYLLKEGQRWLTEARKETVMGQPTPKTPRQLREFLGKAGFCRLFIPGFAEMAAPLYPLTKPGTLFNWGPDQQKAYQEIKQALLTAPALGLPDLTKPFELFVDEKQGYAKGVLTQKLGPWRRPVAYLSKKLDPVAAGWPPCLRMVAAIAVLTKDAGKLTMGQPLVILAPHAVEALVKQPPDRWLSNARMTHYQAMLLDTDRVQFGPVVALNPATLLPLPEKEAPHDCLEILAETHGTRPDLTDQPIPDADYTWYTDGSSFLQEGQRRAGAAVTTETEVIWARALPAGTSAQRAELIALTQALKMAEGKKLNVYTDSRYAFATAHVHGEIYRRRGWLTSEGREIKNKNEILALLKALFLPKRLSIIHCPGHQKGNSAEARGNRMADQAAREAAMKAVLETSTLLAGKRTADGSEFEKRTADGSEFESPKKKAKVE

SEQ ID NO: 4528 - protein, 2096 aa, synthetic construct
MPAAKRVKLDGGDKKYSIGLDIGTNSVGWAVITDEYKVPSKKFKVLGNTDRHSIKKNLIGALLFDSGETAEATRLKRTARRRYTRRKNRICYLQEIFSNEMAKVDDSFFHRLEESFLVEEDKKHERHPIFGNIVDEVAYHEKYPTIYHLRKKLVDSTDKADLRLIYLALAHMIKFRGHFLIEGDLNPDNSDVDKLFIQLVQTYNQLFEENPINASGVDAKAILSARLSKSRRLENLIAQLPGEKKNGLFGNLIALSLGLTPNFKSNFDLAEDAKLQLSKDTYDDDLDNLLAQIGDQYADLFLAAKNLSDAILLSDILRVNTEITKAPLSASMIKRYDEHHQDLTLLKALVRQQLPEKYKEIFFDQSKNGYAGYIDGGASQEEFYKFIKPILEKMDGTEELLVKLNREDLLRKQRTFDNGSIPHQIHLGELHAILRRQEDFYPFLKDNREKIEKILTFRIPYYVGPLARGNSRFAWMTRKSEETITPWNFEEVVDKGASAQSFIERMTNFDKNLPNEKVLPKHSLLYEYFTVYNELTKVKYVTEGMRKPAFLSGEQKKAIVDLLFKTNRKVTVKQLKEDYFKKIECFDSVEISGVEDRFNASLGTYHDLLKIIKDKDFLDNEENEDILEDIVLTLTLFEDREMIEERLKTYAHLFDDKVMKQLKRRRYTGWGRLSRKLINGIRDKQSGKTILDFLKSDGFANRNFMQLIHDDSLTFKEDIQKAQVSGQGDSLHEHIANLAGSPAIKKGILQTVKVVDELVKVMGRHKPENIVIEMARENQTTQKGQKNSRERMKRIEEGIKELGSQILKEHPVENTQLQNEKLYLYYLQNGRDMYVDQELDINRLSDYDVDHIVPQSFLKDDSIDNKVLTRSDKARGKSDNVPSEEVVKKMKNYWRQLLNAKLITQRKFDNLTKAERGGLSELDKAGFIKRQLVETRQITKHVAQILDSRMNTKYDENDKLIREVKVITLKSKLVSDFRKDFQFYKVREINNYHHAHDAYLNAVVGTALIKKYPKLESEFVYGDYKVYDVRKMIAKSEQEIGKATAKYFFYSNIMNFFKTEITLANGEIRKRPLIETNGETGEIVWDKGRDFATVRKVLSMPQVNIVKKTEVQTGGFSKESILPKRNSDKLIARKKDWDPKKYGGFDSPTVAYSVLVVAKVEKGKSKKLKSVKELLGITIMERSSFEKNPIDFLEAKGYKEVKKDLIIKLPKYSLFELENGRKRMLASAGELQKGNELALPSKYVNFLYLASHYEKLKGSPEDNEQKQLFVEQHKHYLDEIIEQISEFSKRVILADANLDKVLSAYNKHRDKPIREQAENIIHLFTLTNLGAPAAFKYFDTTIDRKRYTSTKEVLDATLIHQSITGLYETRIDLSQLGGDGGPAPEAAAKGGSGGTLNLEDEYRLYETSAEPEVSPGSTWLSDFPQAWAETGGMGLAVRQAPLIIPLKATSTPVSIKQYPMSQEAKLGIKPHIQRLLDQGILVPCQSPWNTPLLPVKKPGTNDYRPVQDLREVNKRVEDIHPTVPNPYNLLSGLPPSHRWYTVLDLKDAFFCLRLHPTSQPLFAFEWRDPGMGISGQLTWTRLPQGFKNSPTLFNEALHRDLADFRIQHPDLILLQYVDDILLAATSELDCQQGTRALLLTLGNLGYRASAKKAQLCQKQVKYLGYLLKEGQRWLTEARKETVMGQPTPKTPRQLREFLGKAGFCRLFIPGFAEMAAPLYPLTKPGTLFNWGPDQQKAYQEIKQALLTAPALGLPDLTKPFELFVDEKQGYAKGVLTQKLGPWRRPVAYLSKKLDPVAAGWPPCLRMVAAIAVLRKDAGKLTMGQPLVILAPHAVEALVKQPPDRWLSNARMTHYQAMLLDTDRVQFGPVVALNPATLLPLPEEGAPHDCLEILAETHGTRPDLTDQPIPDADHTWYTDGSSFLQEGQRKAGAAVTTETEVIWARALPAGTSAQRAELIALTQALKMAEGKRLNVYTDSRYAFATAHIHGEIYRRRGWLTSEGREIKNKSEILALLKALFLPKRLSIIHCLGHQKGDSAEARGNRLADQAAREAAIKTPPDTSTLLAGKRTADGSEFEKRTADGSEFESPKKKAKVE

SEQ ID NO: 4529 - protein, 2088 aa, synthetic construct
MPAAKRVKLDGGDKKYSIGLDIGTNSVGWAVITDEYKVPSKKFKVLGNTDRHSIKKNLIGALLFDSGETAEATRLKRTARRRYTRRKNRICYLQEIFSNEMAKVDDSFFHRLEESFLVEEDKKHERHPIFGNIVDEVAYHEKYPTIYHLRKKLVDSTDKADLRLIYLALAHMIKFRGHFLIEGDLNPDNSDVDKLFIQLVQTYNQLFEENPINASGVDAKAILSARLSKSRRLENLIAQLPGEKKNGLFGNLIALSLGLTPNFKSNFDLAEDAKLQLSKDTYDDDLDNLLAQIGDQYADLFLAAKNLSDAILLSDILRVNTEITKAPLSASMIKRYDEHHQDLTLLKALVRQQLPEKYKEIFFDQSKNGYAGYIDGGASQEEFYKFIKPILEKMDGTEELLVKLNREDLLRKQRTFDNGSIPHQIHLGELHAILRRQEDFYPFLKDNREKIEKILTFRIPYYVGPLARGNSRFAWMTRKSEETITPWNFEEVVDKGASAQSFIERMTNFDKNLPNEKVLPKHSLLYEYFTVYNELTKVKYVTEGMRKPAFLSGEQKKAIVDLLFKTNRKVTVKQLKEDYFKKIECFDSVEISGVEDRFNASLGTYHDLLKIIKDKDFLDNEENEDILEDIVLTLTLFEDREMIEERLKTYAHLFDDKVMKQLKRRRYTGWGRLSRKLINGIRDKQSGKTILDFLKSDGFANRNFMQLIHDDSLTFKEDIQKAQVSGQGDSLHEHIANLAGSPAIKKGILQTVKVVDELVKVMGRHKPENIVIEMARENQTTQKGQKNSRERMKRIEEGIKELGSQILKEHPVENTQLQNEKLYLYYLQNGRDMYVDQELDINRLSDYDVDHIVPQSFLKDDSIDNKVLTRSDKARGKSDNVPSEEVVKKMKNYWRQLLNAKLITQRKFDNLTKAERGGLSELDKAGFIKRQLVETRQITKHVAQILDSRMNTKYDENDKLIREVKVITLKSKLVSDFRKDFQFYKVREINNYHHAHDAYLNAVVGTALIKKYPKLESEFVYGDYKVYDVRKMIAKSEQEIGKATAKYFFYSNIMNFFKTEITLANGEIRKRPLIETNGETGEIVWDKGRDFATVRKVLSMPQVNIVKKTEVQTGGFSKESILPKRNSDKLIARKKDWDPKKYGGFDSPTVAYSVLVVAKVEKGKSKKLKSVKELLGITIMERSSFEKNPIDFLEAKGYKEVKKDLIIKLPKYSLFELENGRKRMLASAGELQKGNELALPSKYVNFLYLASHYEKLKGSPEDNEQKQLFVEQHKHYLDEIIEQISEFSKRVILADANLDKVLSAYNKHRDKPIREQAENIIHLFTLTNLGAPAAFKYFDTTIDRKRYTSTKEVLDATLIHQSITGLYETRIDLSQLGGDGGPAPEAAAKGGSGGLDDEYRLYSPLVKPDQNIQFWLEQFPQAWAETAGMGLAKQVPPQVIQLKASATPVSVRQYPLSKEAQEGIRPHVQRLIQQGILVPVQSPWNTPLLPVRKPGTNDYRPVQDLREVNKRVQDIHPTVPNPYNLLCALPPQRSWYTVLDLKDAFFCLRLHPTSQPLFAFEWRDPGTGRTGQLTWTRLPQGFKNSPTIFNEALHRDLANFRIQHPQVTLLQYVDDLLLAGATKQDCLEGTKALLLELSDLGYRASAKKAQICRREVTYLGYSLRDGQRWLTEARKKTVVQIPAPTTAKQVREFLGKAGFCRLFIPGFATLAAPLYPLTKPKGEFSWAPEHQKAFDAIKKALLSAPALALPDVTKPFTLYVDERKGVARGVLTQTLGPWRRPVAYLSKKLDPVASGWPVCLKAIAAVAILVKDADKLTLGQNITVIAPHALENIVRQPPDRWMTNARMTHYQSLLLTERVTFAPPAALNPATLLPEETDEPVTHDCHQLLIEETGVRKDLTDIPLTGEVLTWFTDGSSYVVEGKRMAGAAVVDGTRTIWASSLPEGTSAQKAELMALTQALRLAEGKSINIYTDSRYAFATAHVHGAIYKQRGWLTSAGREIKNKEEILSLLEALHLPKRLAIIHCPGHQKAKDPISRGNQMADRVAKQAAQGVNLLPAGKRTADGSEFEKRTADGSEFESPKKKAKVE

SEQ ID NO: 4530 - protein, 2096 aa, synthetic construct
MPAAKRVKLDGGDKKYSIGLDIGTNSVGWAVITDEYKVPSKKFKVLGNTDRHSIKKNLIGALLFDSGETAEATRLKRTARRRYTRRKNRICYLQEIFSNEMAKVDDSFFHRLEESFLVEEDKKHERHPIFGNIVDEVAYHEKYPTIYHLRKKLVDSTDKADLRLIYLALAHMIKFRGHFLIEGDLNPDNSDVDKLFIQLVQTYNQLFEENPINASGVDAKAILSARLSKSRRLENLIAQLPGEKKNGLFGNLIALSLGLTPNFKSNFDLAEDAKLQLSKDTYDDDLDNLLAQIGDQYADLFLAAKNLSDAILLSDILRVNTEITKAPLSASMIKRYDEHHQDLTLLKALVRQQLPEKYKEIFFDQSKNGYAGYIDGGASQEEFYKFIKPILEKMDGTEELLVKLNREDLLRKQRTFDNGSIPHQIHLGELHAILRRQEDFYPFLKDNREKIEKILTFRIPYYVGPLARGNSRFAWMTRKSEETITPWNFEEVVDKGASAQSFIERMTNFDKNLPNEKVLPKHSLLYEYFTVYNELTKVKYVTEGMRKPAFLSGEQKKAIVDLLFKTNRKVTVKQLKEDYFKKIECFDSVEISGVEDRFNASLGTYHDLLKIIKDKDFLDNEENEDILEDIVLTLTLFEDREMIEERLKTYAHLFDDKVMKQLKRRRYTGWGRLSRKLINGIRDKQSGKTILDFLKSDGFANRNFMQLIHDDSLTFKEDIQKAQVSGQGDSLHEHIANLAGSPAIKKGILQTVKVVDELVKVMGRHKPENIVIEMARENQTTQKGQKNSRERMKRIEEGIKELGSQILKEHPVENTQLQNEKLYLYYLQNGRDMYVDQELDINRLSDYDVDHIVPQSFLKDDSIDNKVLTRSDKARGKSDNVPSEEVVKKMKNYWRQLLNAKLITQRKFDNLTKAERGGLSELDKAGFIKRQLVETRQITKHVAQILDSRMNTKYDENDKLIREVKVITLKSKLVSDFRKDFQFYKVREINNYHHAHDAYLNAVVGTALIKKYPKLESEFVYGDYKVYDVRKMIAKSEQEIGKATAKYFFYSNIMNFFKTEITLANGEIRKRPLIETNGETGEIVWDKGRDFATVRKVLSMPQVNIVKKTEVQTGGFSKESILPKRNSDKLIARKKDWDPKKYGGFDSPTVAYSVLVVAKVEKGKSKKLKSVKELLGITIMERSSFEKNPIDFLEAKGYKEVKKDLIIKLPKYSLFELENGRKRMLASAGELQKGNELALPSKYVNFLYLASHYEKLKGSPEDNEQKQLFVEQHKHYLDEIIEQISEFSKRVILADANLDKVLSAYNKHRDKPIREQAENIIHLFTLTNLGAPAAFKYFDTTIDRKRYTSTKEVLDATLIHQSITGLYETRIDLSQLGGDGGGGGEAAAKGSSGGTLNIEDEHRLHETSKEPDVSLGSTWLSDFPQAWAETGGMGLAVRQAPLIIPLKATSTPVSIKQYPMSQEARLGIKPHIQRLLDQGILVPCQSPWNTPLLPVKKPGTNDYRPVQDLREVNKRVEDIHPTVPNPYNLLSGLPPSHQWYTVLDLKDAFFCLRLHPTSQPLFAFEWRDPEMGISGQLTWTRLPQGFKNSPTLFNEALHRDLADFRIQHPDLILLQYVDDLLLAATSELDCQQGTRALLQTLGNLGYRASAKKAQICQKQVKYLGYLLKEGQRWLTEARKETVMGQPTPKTPRQLREFLGTAGFCRLWIPGFAEMAAPLYPLTKPGTLFNWGPDQQKAYQEIKQALLTAPALGLPDLTKPFELFVDEKQGYAKGVLTQKLGPWRRPVAYLSKKLDPVAAGWPPCLRMVAAIAVLTKDAGKLTMGQPLVILAPHAVEALVKQPPDRWLSNARMTHYQALLLDTDRVQFGPVVALNPATLLPLPEEGLQHNCLDILAEAHGTRPDLTDQPLPDADHTWYTDGSSLLQEGQRKAGAAVTTETEVIWAKALPAGTSAQRAELIALTQALKMAEGKKLNVYTDSRYAFATAHIHGEIYRRRGWLTSEGKEIKNKDEILALLKALFLPKRLSIIHCPGHQKGHSAEARGNRMADQAARKAAITETPDTSTLLAGKRTADGSEFEKRTADGSEFESPKKKAKVE

SEQ ID NO: 4531 - protein, 2094 aa, synthetic construct
MPAAKRVKLDGGDKKYSIGLDIGTNSVGWAVITDEYKVPSKKFKVLGNTDRHSIKKNLIGALLFDSGETAEATRLKRTARRRYTRRKNRICYLQEIFSNEMAKVDDSFFHRLEESFLVEEDKKHERHPIFGNIVDEVAYHEKYPTIYHLRKKLVDSTDKADLRLIYLALAHMIKFRGHFLIEGDLNPDNSDVDKLFIQLVQTYNQLFEENPINASGVDAKAILSARLSKSRRLENLIAQLPGEKKNGLFGNLIALSLGLTPNFKSNFDLAEDAKLQLSKDTYDDDLDNLLAQIGDQYADLFLAAKNLSDAILLSDILRVNTEITKAPLSASMIKRYDEHHQDLTLLKALVRQQLPEKYKEIFFDQSKNGYAGYIDGGASQEEFYKFIKPILEKMDGTEELLVKLNREDLLRKQRTFDNGSIPHQIHLGELHAILRRQEDFYPFLKDNREKIEKILTFRIPYYVGPLARGNSRFAWMTRKSEETITPWNFEEVVDKGASAQSFIERMTNFDKNLPNEKVLPKHSLLYEYFTVYNELTKVKYVTEGMRKPAFLSGEQKKAIVDLLFKTNRKVTVKQLKEDYFKKIECFDSVEISGVEDRFNASLGTYHDLLKIIKDKDFLDNEENEDILEDIVLTLTLFEDREMIEERLKTYAHLFDDKVMKQLKRRRYTGWGRLSRKLINGIRDKQSGKTILDFLKSDGFANRNFMQLIHDDSLTFKEDIQKAQVSGQGDSLHEHIANLAGSPAIKKGILQTVKVVDELVKVMGRHKPENIVIEMARENQTTQKGQKNSRERMKRIEEGIKELGSQILKEHPVENTQLQNEKLYLYYLQNGRDMYVDQELDINRLSDYDVDHIVPQSFLKDDSIDNKVLTRSDKARGKSDNVPSEEVVKKMKNYWRQLLNAKLITQRKFDNLTKAERGGLSELDKAGFIKRQLVETRQITKHVAQILDSRMNTKYDENDKLIREVKVITLKSKLVSDFRKDFQFYKVREINNYHHAHDAYLNAVVGTALIKKYPKLESEFVYGDYKVYDVRKMIAKSEQEIGKATAKYFFYSNIMNFFKTEITLANGEIRKRPLIETNGETGEIVWDKGRDFATVRKVLSMPQVNIVKKTEVQTGGFSKESILPKRNSDKLIARKKDWDPKKYGGFDSPTVAYSVLVVAKVEKGKSKKLKSVKELLGITIMERSSFEKNPIDFLEAKGYKEVKKDLIIKLPKYSLFELENGRKRMLASAGELQKGNELALPSKYVNFLYLASHYEKLKGSPEDNEQKQLFVEQHKHYLDEIIEQISEFSKRVILADANLDKVLSAYNKHRDKPIREQAENIIHLFTLTNLGAPAAFKYFDTTIDRKRYTSTKEVLDATLIHQSITGLYETRIDLSQLGGDGGEAAAKGGGGSSGGVLNLEEEYRLHEKPVPSSIDPSWLQLFPTVWAERAGMGLANQVPPVVVELRSGASPVAVRQYPMSKEAREGIRPHIQRFLDLGVLVPCQSPWNTPLLPVKKPGTNDYRPVQDLREINKRVQDIHPTVPNPYNLLSSLPPSHTWYSVLDLKDAFFCLKLHPNSQPLFAFEWRDPEKGNTGQLTWTRLPQGFKNSPTLFNEALHRDLAPFRALNPQVVLLQYVDDLLVAAPTYRDCKEGTQKLLQELSKLGYRVSAKKAQLCQKEVTYLGYLLKEGKRWLTPARKATVMKIPPPTTPRQVREFLGKAGFCRLFIPGFASLAAPLYPLTKPSIPFIWTEEHQKAFDRIKEALLSAPALALPDLTKPFTLYVDERAGVARGVLTQTLGPWRRPVAYLSKKLDPVASGWPTCLKAVAAVALLLKDADKLTLGQNVTVIASHSLESIVRQPPDRWMTNARMTHYQSLLLNERVSFAPPAVLNPATLLPVESEATPVHRCSEILAEETGTRRDLKDQPLPGVPAWYTDGSSFIAEGKRRAGAAIVDGKRTVWASSLPEGTSAQKAELVALTQALRLAEGKDINIYTDSRYAFATAHIHGAIYKQRGWLTSAGKDIKNKEEILALLEAIHLPKRVAIIHCPGHQKGNDPVATGNRRADEAAKQAALSTRVLAETTKPAGKRTADGSEFEKRTADGSEFESPKKKAKVE

SEQ ID NO: 4532 - protein, 2088 aa, synthetic construct
MPAAKRVKLDGGDKKYSIGLDIGTNSVGWAVITDEYKVPSKKFKVLGNTDRHSIKKNLIGALLFDSGETAEATRLKRTARRRYTRRKNRICYLQEIFSNEMAKVDDSFFHRLEESFLVEEDKKHERHPIFGNIVDEVAYHEKYPTIYHLRKKLVDSTDKADLRLIYLALAHMIKFRGHFLIEGDLNPDNSDVDKLFIQLVQTYNQLFEENPINASGVDAKAILSARLSKSRRLENLIAQLPGEKKNGLFGNLIALSLGLTPNFKSNFDLAEDAKLQLSKDTYDDDLDNLLAQIGDQYADLFLAAKNLSDAILLSDILRVNTEITKAPLSASMIKRYDEHHQDLTLLKALVRQQLPEKYKEIFFDQSKNGYAGYIDGGASQEEFYKFIKPILEKMDGTEELLVKLNREDLLRKQRTFDNGSIPHQIHLGELHAILRRQEDFYPFLKDNREKIEKILTFRIPYYVGPLARGNSRFAWMTRKSEETITPWNFEEVVDKGASAQSFIERMTNFDKNLPNEKVLPKHSLLYEYFTVYNELTKVKYVTEGMRKPAFLSGEQKKAIVDLLFKTNRKVTVKQLKEDYFKKIECFDSVEISGVEDRFNASLGTYHDLLKIIKDKDFLDNEENEDILEDIVLTLTLFEDREMIEERLKTYAHLFDDKVMKQLKRRRYTGWGRLSRKLINGIRDKQSGKTILDFLKSDGFANRNFMQLIHDDSLTFKEDIQKAQVSGQGDSLHEHIANLAGSPAIKKGILQTVKVVDELVKVMGRHKPENIVIEMARENQTTQKGQKNSRERMKRIEEGIKELGSQILKEHPVENTQLQNEKLYLYYLQNGRDMYVDQELDINRLSDYDVDHIVPQSFLKDDSIDNKVLTRSDKARGKSDNVPSEEVVKKMKNYWRQLLNAKLITQRKFDNLTKAERGGLSELDKAGFIKRQLVETRQITKHVAQILDSRMNTKYDENDKLIREVKVITLKSKLVSDFRKDFQFYKVREINNYHHAHDAYLNAVVGTALIKKYPKLESEFVYGDYKVYDVRKMIAKSEQEIGKATAKYFFYSNIMNFFKTEITLANGEIRKRPLIETNGETGEIVWDKGRDFATVRKVLSMPQVNIVKKTEVQTGGFSKESILPKRNSDKLIARKKDWDPKKYGGFDSPTVAYSVLVVAKVEKGKSKKLKSVKELLGITIMERSSFEKNPIDFLEAKGYKEVKKDLIIKLPKYSLFELENGRKRMLASAGELQKGNELALPSKYVNFLYLASHYEKLKGSPEDNEQKQLFVEQHKHYLDEIIEQISEFSKRVILADANLDKVLSAYNKHRDKPIREQAENIIHLFTLTNLGAPAAFKYFDTTIDRKRYTSTKEVLDATLIHQSITGLYETRIDLSQLGGDGGGSSGGGPAPGGTLQLDDEYRLYSPLVKPDQNIQFWLEQFPQAWAETAGMGLAKQVPPQVIQLKASATPVSVRQYPLSKEAQEGIRPHVQRLIQQGILVPVQSPWNTPLLPVRKPGTNDYRPVQDLREVNKRVQDIHPTVPNPYNLLCALPPQRSWYTVLDLKDAFFCLRLHPTSQPLFAFEWRDPGTGRTGQLTWTRLPQGFKNSPTIFNEALHRDLANFRIQHPQVTLLQYVDDLLLAGATKQDCLEGTKALLLELSDLGYRASAKKAQICRREVTYLGYSLRDGQRWLTEARKKTVVQIPAPTTAKQVREFLGTAGFCRLWIPGFATLAAPLYPLTKPKGEFSWAPEHQKAFDAIKKALLSAPALALPDVTKPFTLYVDERKGVARGVLTQTLGPWRRPVAYLSKKLDPVASGWPVCLKAIAAVAILVKDADKLTLGQNITVIAPHALENIVRQPPDRWMTNARMTHYQSLLLTERVTFAPPAALNPATLLPEETDEPVTHDCHQLLIEETGVRKDLTDIPLTGEVLTWFTDGSSYVVEGKRMAGAAVVDGTRTIWASSLPEGTSAQKAELMALTQALRLAEGKSINIYTDSRYAFATAHVHGAIYKQRGWLTSAGREIKNKEEILSLLEALHLPKRLAIIHCPGHQKAKDPISRGNQMADRVAKQAAQGVNLLAGKRTADGSEFEKRTADGSEFESPKKKAKVE

SEQ ID NO: 4533 - protein, 2094 aa, synthetic construct
MPAAKRVKLDGGDKKYSIGLDIGTNSVGWAVITDEYKVPSKKFKVLGNTDRHSIKKNLIGALLFDSGETAEATRLKRTARRRYTRRKNRICYLQEIFSNEMAKVDDSFFHRLEESFLVEEDKKHERHPIFGNIVDEVAYHEKYPTIYHLRKKLVDSTDKADLRLIYLALAHMIKFRGHFLIEGDLNPDNSDVDKLFIQLVQTYNQLFEENPINASGVDAKAILSARLSKSRRLENLIAQLPGEKKNGLFGNLIALSLGLTPNFKSNFDLAEDAKLQLSKDTYDDDLDNLLAQIGDQYADLFLAAKNLSDAILLSDILRVNTEITKAPLSASMIKRYDEHHQDLTLLKALVRQQLPEKYKEIFFDQSKNGYAGYIDGGASQEEFYKFIKPILEKMDGTEELLVKLNREDLLRKQRTFDNGSIPHQIHLGELHAILRRQEDFYPFLKDNREKIEKILTFRIPYYVGPLARGNSRFAWMTRKSEETITPWNFEEVVDKGASAQSFIERMTNFDKNLPNEKVLPKHSLLYEYFTVYNELTKVKYVTEGMRKPAFLSGEQKKAIVDLLFKTNRKVTVKQLKEDYFKKIECFDSVEISGVEDRFNASLGTYHDLLKIIKDKDFLDNEENEDILEDIVLTLTLFEDREMIEERLKTYAHLFDDKVMKQLKRRRYTGWGRLSRKLINGIRDKQSGKTILDFLKSDGFANRNFMQLIHDDSLTFKEDIQKAQVSGQGDSLHEHIANLAGSPAIKKGILQTVKVVDELVKVMGRHKPENIVIEMARENQTTQKGQKNSRERMKRIEEGIKELGSQILKEHPVENTQLQNEKLYLYYLQNGRDMYVDQELDINRLSDYDVDHIVPQSFLKDDSIDNKVLTRSDKARGKSDNVPSEEVVKKMKNYWRQLLNAKLITQRKFDNLTKAERGGLSELDKAGFIKRQLVETRQITKHVAQILDSRMNTKYDENDKLIREVKVITLKSKLVSDFRKDFQFYKVREINNYHHAHDAYLNAVVGTALIKKYPKLESEFVYGDYKVYDVRKMIAKSEQEIGKATAKYFFYSNIMNFFKTEITLANGEIRKRPLIETNGETGEIVWDKGRDFATVRKVLSMPQVNIVKKTEVQTGGFSKESILPKRNSDKLIARKKDWDPKKYGGFDSPTVAYSVLVVAKVEKGKSKKLKSVKELLGITIMERSSFEKNPIDFLEAKGYKEVKKDLIIKLPKYSLFELENGRKRMLASAGELQKGNELALPSKYVNFLYLASHYEKLKGSPEDNEQKQLFVEQHKHYLDEIIEQISEFSKRVILADANLDKVLSAYNKHRDKPIREQAENIIHLFTLTNLGAPAAFKYFDTTIDRKRYTSTKEVLDATLIHQSITGLYETRIDLSQLGGDGGPAPGSSGGGGGTLNLEDEYRLYETSAEPEVSPGSTWLSDFPQAWAETGGMGLAVRQAPLIIPLKATSTPVSIKQYPMSQEAKLGIKPHIQRLLDQGILVPCQSPWNTPLLPVKKPGTNDYRPVQDLREVNKRVEDIHPTVPNPYNLLSGLPPSHRWYTVLDLKDAFFCLRLHPTSQPLFAFEWRDPGMGISGQLTWTRLPQGFKNSPTLFNEALHRDLADFRIQHPDLILLQYVDDILLAATSELDCQQGTRALLLTLGNLGYRASAKKAQLCQKQVKYLGYLLKEGQRWLTEARKETVMGQPTPKTPRQLREFLGKAGFCRLFIPGFAEMAAPLYPLTKPGTLFNWGPDQQKAYQEIKQALLTAPALGLPDLTKPFELFVDEKQGYAKGVLTQKLGPWRRPVAYLSKKLDPVAAGWPPCLRMVAAIAVLRKDAGKLTMGQPLVILAPHAVEALVKQPPDRWLSNARMTHYQAMLLDTDRVQFGPVVALNPATLLPLPEEGAPHDCLEILAETHGTRPDLTDQPIPDADHTWYTDGSSFLQEGQRKAGAAVTTETEVIWARALPAGTSAQRAELIALTQALKMAEGKRLNVYTDSRYAFATAHIHGEIYRRRGWLTSEGREIKNKSEILALLKALFLPKRLSIIHCLGHQKGDSAEARGNRLADQAAREAAIKTPPDTSTLLAGKRTADGSEFEKRTADGSEFESPKKKAKVE

SEQ ID NO: 4534 - protein, 2096 aa, synthetic construct
MPAAKRVKLDGGDKKYSIGLDIGTNSVGWAVITDEYKVPSKKFKVLGNTDRHSIKKNLIGALLFDSGETAEATRLKRTARRRYTRRKNRICYLQEIFSNEMAKVDDSFFHRLEESFLVEEDKKHERHPIFGNIVDEVAYHEKYPTIYHLRKKLVDSTDKADLRLIYLALAHMIKFRGHFLIEGDLNPDNSDVDKLFIQLVQTYNQLFEENPINASGVDAKAILSARLSKSRRLENLIAQLPGEKKNGLFGNLIALSLGLTPNFKSNFDLAEDAKLQLSKDTYDDDLDNLLAQIGDQYADLFLAAKNLSDAILLSDILRVNTEITKAPLSASMIKRYDEHHQDLTLLKALVRQQLPEKYKEIFFDQSKNGYAGYIDGGASQEEFYKFIKPILEKMDGTEELLVKLNREDLLRKQRTFDNGSIPHQIHLGELHAILRRQEDFYPFLKDNREKIEKILTFRIPYYVGPLARGNSRFAWMTRKSEETITPWNFEEVVDKGASAQSFIERMTNFDKNLPNEKVLPKHSLLYEYFTVYNELTKVKYVTEGMRKPAFLSGEQKKAIVDLLFKTNRKVTVKQLKEDYFKKIECFDSVEISGVEDRFNASLGTYHDLLKIIKDKDFLDNEENEDILEDIVLTLTLFEDREMIEERLKTYAHLFDDKVMKQLKRRRYTGWGRLSRKLINGIRDKQSGKTILDFLKSDGFANRNFMQLIHDDSLTFKEDIQKAQVSGQGDSLHEHIANLAGSPAIKKGILQTVKVVDELVKVMGRHKPENIVIEMARENQTTQKGQKNSRERMKRIEEGIKELGSQILKEHPVENTQLQNEKLYLYYLQNGRDMYVDQELDINRLSDYDVDHIVPQSFLKDDSIDNKVLTRSDKARGKSDNVPSEEVVKKMKNYWRQLLNAKLITQRKFDNLTKAERGGLSELDKAGFIKRQLVETRQITKHVAQILDSRMNTKYDENDKLIREVKVITLKSKLVSDFRKDFQFYKVREINNYHHAHDAYLNAVVGTALIKKYPKLESEFVYGDYKVYDVRKMIAKSEQEIGKATAKYFFYSNIMNFFKTEITLANGEIRKRPLIETNGETGEIVWDKGRDFATVRKVLSMPQVNIVKKTEVQTGGFSKESILPKRNSDKLIARKKDWDPKKYGGFDSPTVAYSVLVVAKVEKGKSKKLKSVKELLGITIMERSSFEKNPIDFLEAKGYKEVKKDLIIKLPKYSLFELENGRKRMLASAGELQKGNELALPSKYVNFLYLASHYEKLKGSPEDNEQKQLFVEQHKHYLDEIIEQISEFSKRVILADANLDKVLSAYNKHRDKPIREQAENIIHLFTLTNLGAPAAFKYFDTTIDRKRYTSTKEVLDATLIHQSITGLYETRIDLSQLGGDGGGGGPAPEAAAKGGTLNIEDEHRLHETSKEPDVSLGSTWLSDFPQAWAETGGMGLAVRQAPLIIPLKATSTPVSIKQYPMSQEARLGIKPHIQRLLDQGILVPCQSPWNTPLLPVKKPGTNDYRPVQDLREVNKRVEDIHPTVPNPYNLLSGLPPSHQWYTVLDLKDAFFCLRLHPTSQPLFAFEWRDPEMGISGQLTWTRLPQGFKNSPTLFNEALHRDLADFRIQHPDLILLQYVDDLLLAATSELDCQQGTRALLQTLGNLGYRASAKKAQICQKQVKYLGYLLKEGQRWLTEARKETVMGQPTPKTPRQLREFLGTAGFCRLWIPGFAEMAAPLYPLTKPGTLFNWGPDQQKAYQEIKQALLTAPALGLPDLTKPFELFVDEKQGYAKGVLTQKLGPWRRPVAYLSKKLDPVAAGWPPCLRMVAAIAVLTKDAGKLTMGQPLVILAPHAVEALVKQPPDRWLSNARMTHYQALLLDTDRVQFGPVVALNPATLLPLPEEGLQHNCLDILAEAHGTRPDLTDQPLPDADHTWYTDGSSLLQEGQRKAGAAVTTETEVIWAKALPAGTSAQRAELIALTQALKMAEGKKLNVYTDSRYAFATAHIHGEIYRRRGWLTSEGKEIKNKDEILALLKALFLPKRLSIIHCPGHQKGHSAEARGNRMADQAARKAAITETPDTSTLLAGKRTADGSEFEKRTADGSEFESPKKKAKVE

SEQ ID NO: 4535 - protein, 2096 aa, synthetic construct
MPAAKRVKLDGGDKKYSIGLDIGTNSVGWAVITDEYKVPSKKFKVLGNTDRHSIKKNLIGALLFDSGETAEATRLKRTARRRYTRRKNRICYLQEIFSNEMAKVDDSFFHRLEESFLVEEDKKHERHPIFGNIVDEVAYHEKYPTIYHLRKKLVDSTDKADLRLIYLALAHMIKFRGHFLIEGDLNPDNSDVDKLFIQLVQTYNQLFEENPINASGVDAKAILSARLSKSRRLENLIAQLPGEKKNGLFGNLIALSLGLTPNFKSNFDLAEDAKLQLSKDTYDDDLDNLLAQIGDQYADLFLAAKNLSDAILLSDILRVNTEITKAPLSASMIKRYDEHHQDLTLLKALVRQQLPEKYKEIFFDQSKNGYAGYIDGGASQEEFYKFIKPILEKMDGTEELLVKLNREDLLRKQRTFDNGSIPHQIHLGELHAILRRQEDFYPFLKDNREKIEKILTFRIPYYVGPLARGNSRFAWMTRKSEETITPWNFEEVVDKGASAQSFIERMTNFDKNLPNEKVLPKHSLLYEYFTVYNELTKVKYVTEGMRKPAFLSGEQKKAIVDLLFKTNRKVTVKQLKEDYFKKIECFDSVEISGVEDRFNASLGTYHDLLKIIKDKDFLDNEENEDILEDIVLTLTLFEDREMIEERLKTYAHLFDDKVMKQLKRRRYTGWGRLSRKLINGIRDKQSGKTILDFLKSDGFANRNFMQLIHDDSLTFKEDIQKAQVSGQGDSLHEHIANLAGSPAIKKGILQTVKVVDELVKVMGRHKPENIVIEMARENQTTQKGQKNSRERMKRIEEGIKELGSQILKEHPVENTQLQNEKLYLYYLQNGRDMYVDQELDINRLSDYDVDHIVPQSFLKDDSIDNKVLTRSDKARGKSDNVPSEEVVKKMKNYWRQLLNAKLITQRKFDNLTKAERGGLSELDKAGFIKRQLVETRQITKHVAQILDSRMNTKYDENDKLIREVKVITLKSKLVSDFRKDFQFYKVREINNYHHAHDAYLNAVVGTALIKKYPKLESEFVYGDYKVYDVRKMIAKSEQEIGKATAKYFFYSNIMNFFKTEITLANGEIRKRPLIETNGETGEIVWDKGRDFATVRKVLSMPQVNIVKKTEVQTGGFSKESILPKRNSDKLIARKKDWDPKKYGGFDSPTVAYSVLVVAKVEKGKSKKLKSVKELLGITIMERSSFEKNPIDFLEAKGYKEVKKDLIIKLPKYSLFELENGRKRMLASAGELQKGNELALPSKYVNFLYLASHYEKLKGSPEDNEQKQLFVEQHKHYLDEIIEQISEFSKRVILADANLDKVLSAYNKHRDKPIREQAENIIHLFTLTNLGAPAAFKYFDTTIDRKRYTSTKEVLDATLIHQSITGLYETRIDLSQLGGDGGEAAAKGGGPAPGGTLNIEDEHRLHETSKEPDVSLGSTWLSDFPQAWAETGGMGLAVRQAPLIIPLKATSTPVSIKQYPMSQEARLGIKPHIQRLLDQGILVPCQSPWNTPLLPVKKPGTNDYRPVQDLREVNKRVEDIHPTVPNPYNLLSGLPPSHQWYTVLDLKDAFFCLRLHPTSQPLFAFEWRDPEMGISGQLTWTRLPQGFKNSPTLFNEALHRDLADFRIQHPDLILLQYVDDLLLAATSELDCQQGTRALLQTLGNLGYRASAKKAQICQKQVKYLGYLLKEGQRWLTEARKETVMGQPTPKTPRQLREFLGTAGFCRLWIPGFAEMAAPLYPLTKPGTLFNWGPDQQKAYQEIKQALLTAPALGLPDLTKPFELFVDEKQGYAKGVLTQKLGPWRRPVAYLSKKLDPVAAGWPPCLRMVAAIAVLTKDAGKLTMGQPLVILAPHAVEALVKQPPDRWLSNARMTHYQALLLDTDRVQFGPVVALNPATLLPLPEEGLQHNCLDILAEAHGTRPDLTDQPLPDADHTWYTDGSSLLQEGQRKAGAAVTTETEVIWAKALPAGTSAQRAELIALTQALKMAEGKKLNVYTDSRYAFATAHIHGEIYRRRGWLTSEGKEIKNKDEILALLKALFLPKRLSIIHCPGHQKGHSAEARGNRMADQAARKAAITETPDTSTLLAGKRTADGSEFEKRTADGSEFESPKKKAKVE

SEQ ID NO: 4536 - protein, 2096 aa, synthetic construct
MPAAKRVKLDGGDKKYSIGLDIGTNSVGWAVITDEYKVPSKKFKVLGNTDRHSIKKNLIGALLFDSGETAEATRLKRTARRRYTRRKNRICYLQEIFSNEMAKVDDSFFHRLEESFLVEEDKKHERHPIFGNIVDEVAYHEKYPTIYHLRKKLVDSTDKADLRLIYLALAHMIKFRGHFLIEGDLNPDNSDVDKLFIQLVQTYNQLFEENPINASGVDAKAILSARLSKSRRLENLIAQLPGEKKNGLFGNLIALSLGLTPNFKSNFDLAEDAKLQLSKDTYDDDLDNLLAQIGDQYADLFLAAKNLSDAILLSDILRVNTEITKAPLSASMIKRYDEHHQDLTLLKALVRQQLPEKYKEIFFDQSKNGYAGYIDGGASQEEFYKFIKPILEKMDGTEELLVKLNREDLLRKQRTFDNGSIPHQIHLGELHAILRRQEDFYPFLKDNREKIEKILTFRIPYYVGPLARGNSRFAWMTRKSEETITPWNFEEVVDKGASAQSFIERMTNFDKNLPNEKVLPKHSLLYEYFTVYNELTKVKYVTEGMRKPAFLSGEQKKAIVDLLFKTNRKVTVKQLKEDYFKKIECFDSVEISGVEDRFNASLGTYHDLLKIIKDKDFLDNEENEDILEDIVLTLTLFEDREMIEERLKTYAHLFDDKVMKQLKRRRYTGWGRLSRKLINGIRDKQSGKTILDFLKSDGFANRNFMQLIHDDSLTFKEDIQKAQVSGQGDSLHEHIANLAGSPAIKKGILQTVKVVDELVKVMGRHKPENIVIEMARENQTTQKGQKNSRERMKRIEEGIKELGSQILKEHPVENTQLQNEKLYLYYLQNGRDMYVDQELDINRLSDYDVDHIVPQSFLKDDSIDNKVLTRSDKARGKSDNVPSEEVVKKMKNYWRQLLNAKLITQRKFDNLTKAERGGLSELDKAGFIKRQLVETRQITKHVAQILDSRMNTKYDENDKLIREVKVITLKSKLVSDFRKDFQFYKVREINNYHHAHDAYLNAVVGTALIKKYPKLESEFVYGDYKVYDVRKMIAKSEQEIGKATAKYFFYSNIMNFFKTEITLANGEIRKRPLIETNGETGEIVWDKGRDFATVRKVLSMPQVNIVKKTEVQTGGFSKESILPKRNSDKLIARKKDWDPKKYGGFDSPTVAYSVLVVAKVEKGKSKKLKSVKELLGITIMERSSFEKNPIDFLEAKGYKEVKKDLIIKLPKYSLFELENGRKRMLASAGELQKGNELALPSKYVNFLYLASHYEKLKGSPEDNEQKQLFVEQHKHYLDEIIEQISEFSKRVILADANLDKVLSAYNKHRDKPIREQAENIIHLFTLTNLGAPAAFKYFDTTIDRKRYTSTKEVLDATLIHQSITGLYETRIDLSQLGGDGGEAAAKPAPGGGGGTLNIEDEYRLHETSKEPDVSLGSTWLSDFPQAWAETGGMGLAVRQAPLIIPLKATSTPVSIKQYPMSQEARLGIKPHIQRLLDQGILVPCQSPWNTPLLPVKKPGTNDYRPVQDLREVNKRVEDIHPTVPNPYNLLSGLPPSHQWYTVLDLKDAFFCLRLHPTSQPLFAFEWRDPEMGISGQLTWTRLPQGFKNSPTLFNEALHRDLAGFRIQHPDLILLQYVDDLLLAATSELDCQQGTRALLQTLGDLGYRASAKKAQICQKQVKYLGYLLKEGQRWLTEARKETVMGQPIPKTPRQLREFLGKAGFCRLFIPGFAEMAAPLYPLTKPGTLFNWGPDQQKAFQEIKQALLTAPALGLPDLTKPFELFVDEKQGYAKGVLTQKLGPWRRPVAYLSKKLDPVAAGWPPCLRMVAAIAVLTKDAGKLTMGQPLVILAPHAVEALVKQPPDRWLSNARMTHYQALLLDTDRVQFGPVVALNPATLLPLPEEGLQHDCLDILAEAHGTRSDLMDQPLPDADHTWYTDGSSFLQEGQRKAGAAVTTETEVIWARALPAGTSAQRAELIALTQALKMAEGKKLNVYTDSRYAFATAHIHGEIYRRRGWLTSEGKEIKNKDEILALLKALFLPKRLSIIHCPGHQKGNSAEARGNRMADQAAREVATRETPETSTLLAGKRTADGSEFEKRTADGSEFESPKKKAKVE

SEQ ID NO: 4537 - protein, 2127 aa, synthetic construct
MPAAKRVKLDGGDKKYSIGLDIGTNSVGWAVITDEYKVPSKKFKVLGNTDRHSIKKNLIGALLFDSGETAEATRLKRTARRRYTRRKNRICYLQEIFSNEMAKVDDSFFHRLEESFLVEEDKKHERHPIFGNIVDEVAYHEKYPTIYHLRKKLVDSTDKADLRLIYLALAHMIKFRGHFLIEGDLNPDNSDVDKLFIQLVQTYNQLFEENPINASGVDAKAILSARLSKSRRLENLIAQLPGEKKNGLFGNLIALSLGLTPNFKSNFDLAEDAKLQLSKDTYDDDLDNLLAQIGDQYADLFLAAKNLSDAILLSDILRVNTEITKAPLSASMIKRYDEHHQDLTLLKALVRQQLPEKYKEIFFDQSKNGYAGYIDGGASQEEFYKFIKPILEKMDGTEELLVKLNREDLLRKQRTFDNGSIPHQIHLGELHAILRRQEDFYPFLKDNREKIEKILTFRIPYYVGPLARGNSRFAWMTRKSEETITPWNFEEVVDKGASAQSFIERMTNFDKNLPNEKVLPKHSLLYEYFTVYNELTKVKYVTEGMRKPAFLSGEQKKAIVDLLFKTNRKVTVKQLKEDYFKKIECFDSVEISGVEDRFNASLGTYHDLLKIIKDKDFLDNEENEDILEDIVLTLTLFEDREMIEERLKTYAHLFDDKVMKQLKRRRYTGWGRLSRKLINGIRDKQSGKTILDFLKSDGFANRNFMQLIHDDSLTFKEDIQKAQVSGQGDSLHEHIANLAGSPAIKKGILQTVKVVDELVKVMGRHKPENIVIEMARENQTTQKGQKNSRERMKRIEEGIKELGSQILKEHPVENTQLQNEKLYLYYLQNGRDMYVDQELDINRLSDYDVDHIVPQSFLKDDSIDNKVLTRSDKARGKSDNVPSEEVVKKMKNYWRQLLNAKLITQRKFDNLTKAERGGLSELDKAGFIKRQLVETRQITKHVAQILDSRMNTKYDENDKLIREVKVITLKSKLVSDFRKDFQFYKVREINNYHHAHDAYLNAVVGTALIKKYPKLESEFVYGDYKVYDVRKMIAKSEQEIGKATAKYFFYSNIMNFFKTEITLANGEIRKRPLIETNGETGEIVWDKGRDFATVRKVLSMPQVNIVKKTEVQTGGFSKESILPKRNSDKLIARKKDWDPKKYGGFDSPTVAYSVLVVAKVEKGKSKKLKSVKELLGITIMERSSFEKNPIDFLEAKGYKEVKKDLIIKLPKYSLFELENGRKRMLASAGELQKGNELALPSKYVNFLYLASHYEKLKGSPEDNEQKQLFVEQHKHYLDEIIEQISEFSKRVILADANLDKVLSAYNKHRDKPIREQAENIIHLFTLTNLGAPAAFKYFDTTIDRKRYTSTKEVLDATLIHQSITGLYETRIDLSQLGGDGGPAPEAAAKGGGGGLLGRDLLTKLKAQIQFSTEGPQVTWEDRPAMCLVLNLEEEYRLHEKPVPPSIDPSWLQLFPMVWAEKAGMGLANQVPPVVVELKSDASPVAVRQYPMSKEAREGIRPHIQRFLDLGILVPCQSPWNTPLLPVKKPGTNDYRPVQDLREVNKRVQDIHPTVPNPYNLLSSLPPSHTWYSVLDLKDAFFCLKLHPNSQPLFAFEWRDPEKGNTGQLTWTRLPQGFKNSPTLFNEALHRDLASFRALNPQVVMLQYVDDLLVAAPTYRDCKEGTRRLLQELSKLGYRVSAKKAQLCREEVTYLGYLLKGGKRWLTPARKATVMKIPTPTTPRQVREFLGTAGFCRLWIPGFASLAAPLYPLTRPKVPFTWTEAHQEAFGRIKEALLSAPALALPDLTKPFALYVDEKEGVARGVLTQTLGPWRRPVAYLSKKLDPVASGWPTCLKAIAAVALLLKDADKLTLGQNVLVIAPHNLESIVRQPPDRWMTNARMTHYQSLLLNERVSFAPPAILNPATLLPVESDDTPIHICSEILAEETGTRPDLRDQPLPGVPAWYTDGSSFIMDGRRQAGAAIVDNKRTVWASNLPEGTSAQKAELIALTQALRLAEGKSINIYTDSRYAFATAHVHGAIYKQRGWLTSAGKDIKNKEEILALLEAIHLPKRVAIIHCPGHQRGTDPVATGNRKADEAAKQAAQSTRILTETTKNAGKRTADGSEFEKRTADGSEFESPKKKAKVE

SEQ ID NO: 4538 - protein, 2096 aa, synthetic construct
MPAAKRVKLDGGDKKYSIGLDIGTNSVGWAVITDEYKVPSKKFKVLGNTDRHSIKKNLIGALLFDSGETAEATRLKRTARRRYTRRKNRICYLQEIFSNEMAKVDDSFFHRLEESFLVEEDKKHERHPIFGNIVDEVAYHEKYPTIYHLRKKLVDSTDKADLRLIYLALAHMIKFRGHFLIEGDLNPDNSDVDKLFIQLVQTYNQLFEENPINASGVDAKAILSARLSKSRRLENLIAQLPGEKKNGLFGNLIALSLGLTPNFKSNFDLAEDAKLQLSKDTYDDDLDNLLAQIGDQYADLFLAAKNLSDAILLSDILRVNTEITKAPLSASMIKRYDEHHQDLTLLKALVRQQLPEKYKEIFFDQSKNGYAGYIDGGASQEEFYKFIKPILEKMDGTEELLVKLNREDLLRKQRTFDNGSIPHQIHLGELHAILRRQEDFYPFLKDNREKIEKILTFRIPYYVGPLARGNSRFAWMTRKSEETITPWNFEEVVDKGASAQSFIERMTNFDKNLPNEKVLPKHSLLYEYFTVYNELTKVKYVTEGMRKPAFLSGEQKKAIVDLLFKTNRKVTVKQLKEDYFKKIECFDSVEISGVEDRFNASLGTYHDLLKIIKDKDFLDNEENEDILEDIVLTLTLFEDREMIEERLKTYAHLFDDKVMKQLKRRRYTGWGRLSRKLINGIRDKQSGKTILDFLKSDGFANRNFMQLIHDDSLTFKEDIQKAQVSGQGDSLHEHIANLAGSPAIKKGILQTVKVVDELVKVMGRHKPENIVIEMARENQTTQKGQKNSRERMKRIEEGIKELGSQILKEHPVENTQLQNEKLYLYYLQNGRDMYVDQELDINRLSDYDVDHIVPQSFLKDDSIDNKVLTRSDKARGKSDNVPSEEVVKKMKNYWRQLLNAKLITQRKFDNLTKAERGGLSELDKAGFIKRQLVETRQITKHVAQILDSRMNTKYDENDKLIREVKVITLKSKLVSDFRKDFQFYKVREINNYHHAHDAYLNAVVGTALIKKYPKLESEFVYGDYKVYDVRKMIAKSEQEIGKATAKYFFYSNIMNFFKTEITLANGEIRKRPLIETNGETGEIVWDKGRDFATVRKVLSMPQVNIVKKTEVQTGGFSKESILPKRNSDKLIARKKDWDPKKYGGFDSPTVAYSVLVVAKVEKGKSKKLKSVKELLGITIMERSSFEKNPIDFLEAKGYKEVKKDLIIKLPKYSLFELENGRKRMLASAGELQKGNELALPSKYVNFLYLASHYEKLKGSPEDNEQKQLFVEQHKHYLDEIIEQISEFSKRVILADANLDKVLSAYNKHRDKPIREQAENIIHLFTLTNLGAPAAFKYFDTTIDRKRYTSTKEVLDATLIHQSITGLYETRIDLSQLGGDGGGSSEAAAKPAPGGTLNIEDEYRLHETSKEPDVPLGSTWLSDFPQAWAETGGMGLAVRQAPLIIPLKATSTPVSIKQYPMSQEARLGIKPHIQRLLDQGILVPCQSPWNTPLLPVKKPGTNDYRPVQDLREVNKRVEDIHPTVPNPYNLLSGLPPSHQWYTVLDLKDAFFCLRLHPTSQPLFAFEWRDPEMGISGQLTWTRLPQGFKNSPTLFNEALHRDLADFRIQHPDLILLQYVDDLLLAATSEQDCQRGTRALLQTLGNLGYRASAKKAQICQKQVKYLGYLLKEGQRWLTEARKETVMGQPTPKTPRQLREFLGTAGFCRLWIPGFAEMAAPLYPLTKPGTLFNWGPDQQKAYQEIKQALLTAPALGLPDLTKPFELFVDEKQGYAKGVLTQKLGPWRRPVAYLSKKLDPVAAGWPPCLRMVAAIAVLTKDAGKLTMGQPLVILAPHAVEALVKQPPDRWLSNARMTHYQAMLLDTDRVQFGPVVALNPATLLPLPEKEAPHDCLEILAETHGTRPDLTDQPIPDADYTWYTDGSSFLQEGQRRAGAAVTTETEVIWARALPAGTSAQRAELIALTQALKMAEGKKLNVYTDSRYAFATAHVHGEIYRRRGWLTSEGREIKNKNEILALLKALFLPKRLSIIHCPGHQKGNSAEARGNRMADQAAREAAMKAVLETSTLLAGKRTADGSEFEKRTADGSEFESPKKKAKVE

SEQ ID NO: 4539 - protein, 2098 aa, synthetic construct
MPAAKRVKLDGGDKKYSIGLDIGTNSVGWAVITDEYKVPSKKFKVLGNTDRHSIKKNLIGALLFDSGETAEATRLKRTARRRYTRRKNRICYLQEIFSNEMAKVDDSFFHRLEESFLVEEDKKHERHPIFGNIVDEVAYHEKYPTIYHLRKKLVDSTDKADLRLIYLALAHMIKFRGHFLIEGDLNPDNSDVDKLFIQLVQTYNQLFEENPINASGVDAKAILSARLSKSRRLENLIAQLPGEKKNGLFGNLIALSLGLTPNFKSNFDLAEDAKLQLSKDTYDDDLDNLLAQIGDQYADLFLAAKNLSDAILLSDILRVNTEITKAPLSASMIKRYDEHHQDLTLLKALVRQQLPEKYKEIFFDQSKNGYAGYIDGGASQEEFYKFIKPILEKMDGTEELLVKLNREDLLRKQRTFDNGSIPHQIHLGELHAILRRQEDFYPFLKDNREKIEKILTFRIPYYVGPLARGNSRFAWMTRKSEETITPWNFEEVVDKGASAQSFIERMTNFDKNLPNEKVLPKHSLLYEYFTVYNELTKVKYVTEGMRKPAFLSGEQKKAIVDLLFKTNRKVTVKQLKEDYFKKIECFDSVEISGVEDRFNASLGTYHDLLKIIKDKDFLDNEENEDILEDIVLTLTLFEDREMIEERLKTYAHLFDDKVMKQLKRRRYTGWGRLSRKLINGIRDKQSGKTILDFLKSDGFANRNFMQLIHDDSLTFKEDIQKAQVSGQGDSLHEHIANLAGSPAIKKGILQTVKVVDELVKVMGRHKPENIVIEMARENQTTQKGQKNSRERMKRIEEGIKELGSQILKEHPVENTQLQNEKLYLYYLQNGRDMYVDQELDINRLSDYDVDHIVPQSFLKDDSIDNKVLTRSDKARGKSDNVPSEEVVKKMKNYWRQLLNAKLITQRKFDNLTKAERGGLSELDKAGFIKRQLVETRQITKHVAQILDSRMNTKYDENDKLIREVKVITLKSKLVSDFRKDFQFYKVREINNYHHAHDAYLNAVVGTALIKKYPKLESEFVYGDYKVYDVRKMIAKSEQEIGKATAKYFFYSNIMNFFKTEITLANGEIRKRPLIETNGETGEIVWDKGRDFATVRKVLSMPQVNIVKKTEVQTGGFSKESILPKRNSDKLIARKKDWDPKKYGGFDSPTVAYSVLVVAKVEKGKSKKLKSVKELLGITIMERSSFEKNPIDFLEAKGYKEVKKDLIIKLPKYSLFELENGRKRMLASAGELQKGNELALPSKYVNFLYLASHYEKLKGSPEDNEQKQLFVEQHKHYLDEIIEQISEFSKRVILADANLDKVLSAYNKHRDKPIREQAENIIHLFTLTNLGAPAAFKYFDTTIDRKRYTSTKEVLDATLIHQSITGLYETRIDLSQLGGDGGGSSPAPEAAAKGGTAPLEEEYRLFLEAPIQNVTLLEQWKREIPKVWAEINPPGLASTQAPIHVQLLSTALPVRVRQYPITLEAKRSLRETIRKFRAAGILRPVHSPWNTPLLPVRKSGTSEYRMVQDLREVNKRVETIHPTVPNPYTLLSLLPPDRIWYSVLDLKDAFFCIPLAPESQLIFAFEWADAEEGESGQLTWTRLPQGFKNSPTLFNEALNRDLQGFRLDHPSVSLLQYVDDLLIAADTQAACLSATRDLLMTLAELGYRVSGKKAQLCQEEVTYLGFKIHKGSRSLSNSRTQAILQIPVPKTKRQVREFLGKIGYCRLFIPGFAELAQPLYAATRPGNDPLVWGEKEEEAFQSLKLALTQPPALALPSLDKPFQLFVEETSGAAKGVLTQALGPWKRPVAYLSKRLDPVAAGWPRCLRAIAAAALLTREASKLTFGQDIEITSSHNLESLLRSPPDKWLTNARITQYQVLLLDPPRVRFKQTAALNPATLLPETDDTLPIHHCLDTLDSLTSTRPDLTDQPLAQAEATLFTDGSSYIRDGKRYAGAAVVTLDSVIWAEPLPIGTSAQKAELIALTKALEWSKDKSVNIYTDSRYAFATLHVHGMIYRERGWLTAGGKAIKNAPEILALLTAVWLPKRVAVMHCKGHQKDDAPTSTGNRRADEVAREVAIRPLSTQATISAGKRTADGSEFEKRTADGSEFESPKKKAKVE

SEQ ID NO: 4540 - protein, 2131 aa, synthetic construct
MPAAKRVKLDGGDKKYSIGLDIGTNSVGWAVITDEYKVPSKKFKVLGNTDRHSIKKNLIGALLFDSGETAEATRLKRTARRRYTRRKNRICYLQEIFSNEMAKVDDSFFHRLEESFLVEEDKKHERHPIFGNIVDEVAYHEKYPTIYHLRKKLVDSTDKADLRLIYLALAHMIKFRGHFLIEGDLNPDNSDVDKLFIQLVQTYNQLFEENPINASGVDAKAILSARLSKSRRLENLIAQLPGEKKNGLFGNLIALSLGLTPNFKSNFDLAEDAKLQLSKDTYDDDLDNLLAQIGDQYADLFLAAKNLSDAILLSDILRVNTEITKAPLSASMIKRYDEHHQDLTLLKALVRQQLPEKYKEIFFDQSKNGYAGYIDGGASQEEFYKFIKPILEKMDGTEELLVKLNREDLLRKQRTFDNGSIPHQIHLGELHAILRRQEDFYPFLKDNREKIEKILTFRIPYYVGPLARGNSRFAWMTRKSEETITPWNFEEVVDKGASAQSFIERMTNFDKNLPNEKVLPKHSLLYEYFTVYNELTKVKYVTEGMRKPAFLSGEQKKAIVDLLFKTNRKVTVKQLKEDYFKKIECFDSVEISGVEDRFNASLGTYHDLLKIIKDKDFLDNEENEDILEDIVLTLTLFEDREMIEERLKTYAHLFDDKVMKQLKRRRYTGWGRLSRKLINGIRDKQSGKTILDFLKSDGFANRNFMQLIHDDSLTFKEDIQKAQVSGQGDSLHEHIANLAGSPAIKKGILQTVKVVDELVKVMGRHKPENIVIEMARENQTTQKGQKNSRERMKRIEEGIKELGSQILKEHPVENTQLQNEKLYLYYLQNGRDMYVDQELDINRLSDYDVDHIVPQSFLKDDSIDNKVLTRSDKARGKSDNVPSEEVVKKMKNYWRQLLNAKLITQRKFDNLTKAERGGLSELDKAGFIKRQLVETRQITKHVAQILDSRMNTKYDENDKLIREVKVITLKSKLVSDFRKDFQFYKVREINNYHHAHDAYLNAVVGTALIKKYPKLESEFVYGDYKVYDVRKMIAKSEQEIGKATAKYFFYSNIMNFFKTEITLANGEIRKRPLIETNGETGEIVWDKGRDFATVRKVLSMPQVNIVKKTEVQTGGFSKESILPKRNSDKLIARKKDWDPKKYGGFDSPTVAYSVLVVAKVEKGKSKKLKSVKELLGITIMERSSFEKNPIDFLEAKGYKEVKKDLIIKLPKYSLFELENGRKRMLASAGELQKGNELALPSKYVNFLYLASHYEKLKGSPEDNEQKQLFVEQHKHYLDEIIEQISEFSKRVILADANLDKVLSAYNKHRDKPIREQAENIIHLFTLTNLGAPAAFKYFDTTIDRKRYTSTKEVLDATLIHQSITGLYETRIDLSQLGGDGGAEAAAKEAAAKEAAAKEAAAKALEAEAAAKEAAAKEAAAKEAAAKAGGTLNIEDEYRLHETSKGPDVPLGSTWLSDFPQAWAETGGMGLAVRQAPLIIPLKATSTPVSIKQYPMSQEARLGIKPHIQRLLDQGILVPCQSPWNTPLLPVKKPGTNDYRPVQDLREVNKRVEDIHPTVPNPYNLLSGLPPSHQWYTVLDLKDAFFCLRLHPTSQSLFAFEWRDPEMGISGQLTWTRLPQGFKNSPTLFNEALHRDLADFRIQHPDLILLQYVDDLLLAATSELDCQQGTRALLQTLGDLGYRASAKKAQICQKQVKYLGYLLKEGQRWLTEARKETVMGQPTPKTPRQLREFLGTAGFCRLWIPGFAEMAAPLYPLTKPGTLFEWGPDQQKAYQEIKQALLTAPALGLPDLTKPFELFVDEKQGYAKGVLTQKLGPWRRPVAYLSKKLDPVAAGWPPCLRMVAAIAVLTKDAGKLTMGQPLVILAPHAVEALVKQPPDRWLSNARMTHYQALLLDTDRVQFGPIVALNPATLLPLPEEGLQHDCLDILAEAHGTRPDLTDQPLPDADHTWYTDGSSFLQEGQRKAGAAVTTETEVVWAKALPAGTSAQRAELIALTQALKMAEGKKLNVYTDSRYAFATAHIHGEIYRRRGWLTSEGKEIKNKDEILALLKALFLPKRLSIIHCPGHQKGNRAEARGNRMADQAAREVATRETPETSTLLAGKRTADGSEFEKRTADGSEFESPKKKAKVE

SEQ ID NO: 4541 - protein, 2122 aa, synthetic construct
MPAAKRVKLDGGDKKYSIGLDIGTNSVGWAVITDEYKVPSKKFKVLGNTDRHSIKKNLIGALLFDSGETAEATRLKRTARRRYTRRKNRICYLQEIFSNEMAKVDDSFFHRLEESFLVEEDKKHERHPIFGNIVDEVAYHEKYPTIYHLRKKLVDSTDKADLRLIYLALAHMIKFRGHFLIEGDLNPDNSDVDKLFIQLVQTYNQLFEENPINASGVDAKAILSARLSKSRRLENLIAQLPGEKKNGLFGNLIALSLGLTPNFKSNFDLAEDAKLQLSKDTYDDDLDNLLAQIGDQYADLFLAAKNLSDAILLSDILRVNTEITKAPLSASMIKRYDEHHQDLTLLKALVRQQLPEKYKEIFFDQSKNGYAGYIDGGASQEEFYKFIKPILEKMDGTEELLVKLNREDLLRKQRTFDNGSIPHQIHLGELHAILRRQEDFYPFLKDNREKIEKILTFRIPYYVGPLARGNSRFAWMTRKSEETITPWNFEEVVDKGASAQSFIERMTNFDKNLPNEKVLPKHSLLYEYFTVYNELTKVKYVTEGMRKPAFLSGEQKKAIVDLLFKTNRKVTVKQLKEDYFKKIECFDSVEISGVEDRFNASLGTYHDLLKIIKDKDFLDNEENEDILEDIVLTLTLFEDREMIEERLKTYAHLFDDKVMKQLKRRRYTGWGRLSRKLINGIRDKQSGKTILDFLKSDGFANRNFMQLIHDDSLTFKEDIQKAQVSGQGDSLHEHIANLAGSPAIKKGILQTVKVVDELVKVMGRHKPENIVIEMARENQTTQKGQKNSRERMKRIEEGIKELGSQILKEHPVENTQLQNEKLYLYYLQNGRDMYVDQELDINRLSDYDVDHIVPQSFLKDDSIDNKVLTRSDKARGKSDNVPSEEVVKKMKNYWRQLLNAKLITQRKFDNLTKAERGGLSELDKAGFIKRQLVETRQITKHVAQILDSRMNTKYDENDKLIREVKVITLKSKLVSDFRKDFQFYKVREINNYHHAHDAYLNAVVGTALIKKYPKLESEFVYGDYKVYDVRKMIAKSEQEIGKATAKYFFYSNIMNFFKTEITLANGEIRKRPLIETNGETGEIVWDKGRDFATVRKVLSMPQVNIVKKTEVQTGGFSKESILPKRNSDKLIARKKDWDPKKYGGFDSPTVAYSVLVVAKVEKGKSKKLKSVKELLGITIMERSSFEKNPIDFLEAKGYKEVKKDLIIKLPKYSLFELENGRKRMLASAGELQKGNELALPSKYVNFLYLASHYEKLKGSPEDNEQKQLFVEQHKHYLDEIIEQISEFSKRVILADANLDKVLSAYNKHRDKPIREQAENIIHLFTLTNLGAPAAFKYFDTTIDRKRYTSTKEVLDATLIHQSITGLYETRIDLSQLGGDGGAEAAAKEAAAKEAAAKEAAAKALEAEAAAKEAAAKEAAAKEAAAKAGGIPWLMKKPLQLTTLVPLQEYEERLLKQTMLTGSYKEKLQSLFLKYDALWQHWENQVGHRRIKPHHIATGTVNPRPQKQYPINPKAKASIQTVINDLLKQGVLIQQNSIMNTPVYPVPKPDGKWRMVLDYREVNKTIPLIAAQNQHSAGILSSIFRGKYKTTLDLSNGFWAHSITPESYWLTAFTWLGQQYCWTRLPQGFLNSPALFNADVVDLLKEVPNVQVYVDDIYISHDDPREHLEQLEKVFSLLLNAGYVVSLKKSEIAQHEVEFLGFNITKEGRGLTETFKQKLLNITPPRDLKQLQSILGKLNFARNFIPNFSELVKPLYNIIATAPGKYITWTTDNSQQLQNIISMLNSAENLEERNPEVRLIMKVNTSPSAGYIRFYNEFAKRPIMYLNYVYTKAEVKFTNTEKLLTTIHKGLIKALDLGMGQEILVYSPIVSMTKIQKTPLPERKALPIRWITWMSYLEDPRIQFHYDKTLPELQQVPTVTDDIIAKIKHPSEFSMVFYTDGSAIKHPNVNKSHNAGMGIAQVQFKPEFTVINTWSIPLGDHTAQLAEVAAVEFACKKALKIDGPVLIVTDSFYVAESVNKELPYWQSNGFFNNKKKPLKHVSKWKSIADCIQLKPDIIIIHEKGHQPTASTFHTEGNNLADKLATQGSYVVNAGKRTADGSEFEKRTADGSEFESPKKKAKVE

SEQ ID NO: 4542-4643 - skipped (102 entries)

SEQ ID NO: 4644 - protein, 9 aa, synthetic construct
PAAKRVKLD

SEQ ID NO: 4645-4648 - skipped (4 entries)

SEQ ID NO: 4649 - protein, 29 aa, synthetic construct
KRTADGSEFEKRTADGSEFESPKKKAKVE

SEQ ID NO: 4650 - protein, 10 aa, synthetic construct
KRTADGSEFE

SEQ ID NO: 4651-5001 - skipped (351 entries)

SEQ ID NO: 5002 - protein, 672 aa, Murine leukemia virus
TLNIEDEYRLHETSKEPDVSLGSTWLSDFPQAWAETGGMGLAVRQAPLIIPLKATSTPVSIKQYPMSQEARLGIKPHIQRLLDQGILVPCQSPWNTPLLPVKKPGTNDYRPVQDLREVNKRVEDIHPTVPNPYNLLSGLPPSHQWYTVLDLKDAFFCLRLHPTSQPLFAFEWRDPEMGISGQLTWTRLPQGFKNSPTLFDEALHRDLADFRIQHPDLILLQYVDDLLLAATSELDCQQGTRALLQTLGNLGYRASAKKAQICQKQVKYLGYLLKEGQRWLTEARKETVMGQPTPKTPRQLREFLGTAGFCRLWIPGFAEMAAPLYPLTKTGTLFNWGPDQQKAYQEIKQALLTAPALGLPDLTKPFELFVDEKQGYAKGVLTQKLGPWRRPVAYLSKKLDPVAAGWPPCLRMVAAIAVLTKDAGKLTMGQPLVILAPHAVEALVKQPPDRWLSNARMTHYQALLLDTDRVQFGPVVALNPATLLPLPEEGLQHNCLDILAEAHGTRPDLTDQPLPDADHTWYTDGSSLLQEGQRKAGAAVTTETEVIWAKALPAGTSAQRAELIALTQALKMAEGKKLNVYTDSRYAFATAHIHGEIYRRRGLLTSEGKEIKNKDEILALLKALFLPKRLSIIHCPGHQKGHSAEARGNRMADQAARKAAITETPDTSTLLI

SEQ ID NO: 5003 - protein, 671 aa, Murine leukemia virus
TLNIEDEHRLHETSKEPDVSLGSTWLSDFPQAWAETGGMGLAVRQAPLIIPLKATSTPVSIKQYPMSQEARLGIKPHIQRLLDQGILVPCQSPWNTPLLPVKKPGTNDYRPVQDLREVNKRVEDIHPTVPNPYNLLSGLPPSHQWYTVLDLKDAFFCLRLHPTSQPLFAFEWRDPEMGISGQLTWTRLPQGFKNSPTLFDEALHRDLADFRIQHPDLILLQYVDDLLLAATSELDCQQGTRALLQTLGNLGYRASAKKAQICQKQVKYLGYLLKEGQRWLTEARKETVMGQPTPKTPRQLREFLGTAGFCRLWIPGFAEMAAPLYPLTKTGTLFNWGPDQQKAYQEIKQALLTAPALGLPDLTKPFELFVDEKQGYAKGVLTQKLGPWRRPVAYLSKKLDPVAAGWPPCLRMVAAIAVLTKDAGKLTMGQPLVILAPHAVEALVKQPPDRWLSNARMTHYQALLLDTDRVQFGPVVALNPATLLPLPEEGLQHNCLDILAEAHGTRPDLTDQPLPDADHTWYTDGSSLLQEGQRKAGAAVTTETEVIWAKALPAGTSAQRAELIALTQALKMAEGKKLNVYTDSRYAFATAHIHGEIYRRRGLLTSEGKEIKNKDEILALLKALFLPKRLSIIHCPGHQKGHSAEARGNRMADQAARKAAITETPDTSTLL

SEQ ID NO: 5004 - protein, 660 aa, Murine leukemia virus
TLNIEDEHRLHETSKEPDVSLGSTWLSDFPQAWAETGGMGLAVRQAPLIIPLKATSTPVSIKQYPMSQEARLGIKPHIQRLLDQGILVPCQSPWNTPLLPVKKPGTNDYRPVQDLREVNKRVEDIHPTVPNPYNLLSGLPPSHQWYTVLDLKDAFFCLRLHPTSQPLFAFEWRDPEMGISGQLTWTRLPQGFKNSPTLFDEALHRDLADFRIQHPDLILLQYVDDLLLAATSELDCQQGTRALLQTLGNLGYRASAKKAQICQKQVKYLGYLLKEGQRWLTEARKETVMGQPTPKTPRQLREFLGTAGFCRLWIPGFAEMAAPLYPLTKTGTLFNWGPDQQKAYQEIKQALLTAPALGLPDLTKPFELFVDEKQGYAKGVLTQKLGPWRRPVAYLSKKLDPVAAGWPPCLRMVAAIAVLTKDAGKLTMGQPLVILAPHAVEALVKQPPDRWLSNARMTHYQALLLDTDRVQFGPVVALNPATLLPLPEEGLQHNCLDILAEAHGTRPDLTDQPLPDADHTWYTDGSSLLQEGQRKAGAAVTTETEVIWAKALPAGTSAQRAELIALTQALKMAEGKKLNVYTDSRYAFATAHIHGEIYRRRGLLTSEGKEIKNKDEILALLKALFLPKRLSIIHCPGHQKGHSAEARGNRMADQAARKAA

SEQ ID NO: 5005 - protein, 672 aa, Murine leukemia virus
TLNIEDEYRLHETSKEPDVSLGSTWLSDFPQAWAETGGMGLAVRQAPLIIPLKATSTPVSIKQYPMSQEARLGIKPHIQRLLDQGILVPCQSPWNTPLLPVKKPGTNDYRPVQDLREVNKRVEDIHPTVPNPYNLLSGLPPSHQWYTVLDLKDAFFCLRLHPTSQPLFAFEWRDPEMGISGQLTWTRLPQGFKNSPTLFNEALHRDLADFRIQHPDLILLQYVDDLLLAATSELDCQQGTRALLQTLGNLGYRASAKKAQICQKQVKYLGYLLKEGQRWLTEARKETVMGQPTPKTPRQLREFLGKAGFCRLFIPGFAEMAAPLYPLTKPGTLFNWGPDQQKAYQEIKQALLTAPALGLPDLTKPFELFVDEKQGYAKGVLTQKLGPWRRPVAYLSKKLDPVAAGWPPCLRMVAAIAVLTKDAGKLTMGQPLVILAPHAVEALVKQPPDRWLSNARMTHYQALLLDTDRVQFGPVVALNPATLLPLPEEGLQHNCLDILAEAHGTRPDLTDQPLPDADHTWYTDGSSLLQEGQRKAGAAVTTETEVIWAKALPAGTSAQRAELIALTQALKMAEGKKLNVYTDSRYAFATAHIHGEIYRRRGWLTSEGKEIKNKDEILALLKALFLPKRLSIIHCPGHQKGHSAEARGNRMADQAARKAAITETPDTSTLLI

SEQ ID NO: 5006 - protein, 33 aa, synthetic construct
SGGSSGGSSGSETPGTSESATPESSGGSSGGSS

SEQ ID NO: 5007 - protein, 1369 aa, synthetic construct
SMDKKYSIGLAIGTNSVGWAVITDDYKVPSKKFKVLGNTDRHSIKKNLIGALLFDSGETAEATRLKRTARRRYTRRKNRICYLQEIFSNEMAKVDDSFFHRLEESFLVEEDKKHERHPIFGNIVDEVAYHEKYPTIYHLRKKLVDSTDKADLRLIYLALAHMIKFRGHFLIEGDLNPDNSDVDKLFIQLVQTYNQLFEENPINASGVDAKAILSARLSKSRRLENLIAQLPGEKKNGLFGNLIALSLGLTPNFKSNFDLAEDAKLQLSKDTYDDDLDNLLAQIGDQYADLFLAAKNLSDAILLSDILRVNTEITKAPLSASMIKRYDEHHQDLTLLKALVRQQLPEKYKEIFFDQSKNGYAGYIDGGASQEEFYKFIKPILEKMDGTEELLVKLNREDLLRKQRTFDNGSIPHQIHLGELHAILRRQEDFYPFLKDNREKIEKILTFRIPYYVGPLARGNSRFAWMTRKSEETITPWNFEEVVDKGASAQSFIERMTNFDKNLPNEKVLPKHSLLYEYFTVYNELTKVKYVTEGMRKPAFLSGEQKKAIVDLLFKTNRKVTVKQLKEDYFKKIECFDSVEISGVEDRFNASLGTYHDLLKIIKDKDFLDNEENEDILEDIVLTLTLFEDREMIEERLKTYAHLFDDKVMKQLKRRRYTGWGRLSRKLINGIRDKQSGKTILDFLKSDGFANRNFMQLIHDDSLTFKEDIQKAQVSGQGDSLHEHIANLAGSPAIKKGILQTVKVVDELVKVMGRHKPENIVIEMARENQTTQKGQKNSRERMKRIEEGIKELGSQILKEHPVENTQLQNEKLYLYYLQNGRDMYVDQELDINRLSDYDVDAIVPQSFLKDDSIDNKVLTRSDKNRGKSDNVPSEEVVKKMKNYWRQLLNAKLITQRKFDNLTKAERGGLSELDKAGFIKRQLVETRQITKHVAQILDSRMNTKYDENDKLIREVKVITLKSKLVSDFRKDFQFYKVREINNYHHAHDAYLNAVVGTALIKKYPKLESEFVYGDYKVYDVRKMIAKSEQEIGKATAKYFFYSNIMNFFKTEITLANGEIRKRPLIETNGETGEIVWDKGRDFATVRKVLSMPQVNIVKKTEVQTGGFSKESILPKRNSDKLIARKKDWDPKKYGGFDSPTVAYSVLVVAKVEKGKSKKLKSVKELLGITIMERSSFEKNPIDFLEAKGYKEVKKDLIIKLPKYSLFELENGRKRMLASAGELQKGNELALPSKYVNFLYLASHYEKLKGSPEDNEQKQLFVEQHKHYLDEIIEQISEFSKRVILADANLDKVLSAYNKHRDKPIREQAENIIHLFTLTNLGAPAAFKYFDTTIDRKRYTSTKEVLDATLIHQSITGLYETRIDLSQLGGD

SEQ ID NO: 5008 - DNA, 76 bp, synthetic construct
  source 1..76: mol_type = other DNA
gttttagagctagaaatagcaagttaaaataaggctagtccgttatcaacttgaaaaagtgggaccgagtcggtcc

SEQ ID NO: 5009 - protein, 30 aa, synthetic construct
MDSLLMNRRKFLYQFKNVRWAKGRRETYLC

SEQ ID NO: 5010 - protein, 28 aa, synthetic construct
PKKRKVEGADKRTADGSEFESPKKKRKV

SEQ ID NO: 5011 - protein, 22 aa, synthetic construct
RKSGKIAAIWKRPRKPKKKRKV

SEQ ID NO: 5012 - protein, 18 aa, synthetic construct
KRTADGSEFESPKKKRKV

SEQ ID NO: 5013 - protein, 17 aa, synthetic construct
KKTELQTTNAENKTKKL

SEQ ID NO: 5014 - protein, 19 aa, synthetic construct
KRGINDRNFWRGENGRKTR

SEQ ID NO: 5015 - protein, 16 aa, synthetic construct
KRPAATKKAGQAKKKK

SEQ ID NO: 5016 - protein, 29 aa, synthetic construct
PKKKRKVEGADKRTADGSEFESPKKKRKV

SEQ ID NO: 5017 - protein, 25 aa, synthetic construct
KRASSQALGTIPKRRSSSRFIKRKK

SEQ ID NO: 5018 - protein, 7 aa, synthetic construct
RKKRKKK

SEQ ID NO: 5019-5024 - skipped (6 entries)

SEQ ID NO: 5025 - protein, 4 aa, synthetic construct
SGGS

SEQ ID NO: 5026 - protein, 4 aa, synthetic construct
GGGS

SEQ ID NO: 5027 - protein, 5 aa, synthetic construct
GGGGS

SEQ ID NO: 5028 - protein, 5 aa, synthetic construct
EAAAK

SEQ ID NO: 5029 - DNA, 306 bp, synthetic construct
  source 1..306: mol_type = other DNA
tgcctgtcatacgaaaccgagatactgacagtagaatatggccttctgccaatcgggaagattgtggagaaacggatagaatgcacagtttactctgtcgataacaatggtaacatttatactcagccagttgcccagtggcacgaccggggagagcaggaagtattcgaatactgtctggaggatggaagtctcattagggccactaaggaccacaaatttatgacagtcgatggccagatgctgcctatagacgaaatctttgagcgagagttggacctcatgcgagttgacaaccttcctaat

SEQ ID NO: 5030 - protein, 102 aa, synthetic construct
CLSYETEILTVEYGLLPIGKIVEKRIECTVYSVDNNGNIYTQPVAQWHDRGEQEVFEYCLEDGSLIRATKDHKFMTVDGQMLPIDEIFERELDLMRVDNLPN

SEQ ID NO: 5031 - DNA, 108 bp, synthetic construct
  source 1..108: mol_type = other DNA
atgatcaagatagctacaaggaagtatcttggcaaacaaaacgtttatgatattggagtcgaaagagatcacaactttgctctgaagaacggattcatagcttctaat

SEQ ID NO: 5032 - protein, 36 aa, synthetic construct
MIKIATRKYLGKQNVYDIGVERDHNFALKNGFIASN

SEQ ID NO: 5033 - DNA, 303 bp, synthetic construct
  source 1..303: mol_type = other DNA
tgcctgtcttatgataccgagatacttaccgttgaatatggcttcttgcctattggaaagattgtcgaagagagaattgaatgcacagtatatactgtagacaagaatggtttcgtttacacacagcccattgctcaatggcacaatcgcggcgaacaagaagtatttgagtactgtctcgaggatggaagcatcatacgagcaactaaagatcataaattcatgaccactgacgggcagatgttgccaatagatgagatattcgagcggggcttggatctcaaacaagtggatggattgcca

SEQ ID NO: 5034 - protein, 101 aa, synthetic construct
CLSYDTEILTVEYGFLPIGKIVEERIECTVYTVDKNGFVYTQPIAQWHNRGEQEVFEYCLEDGSIIRATKDHKFMTTDGQMLPIDEIFERGLDLKQVDGLP

SEQ ID NO: 5035 - DNA, 159 bp, synthetic construct
  source 1..159: mol_type = other DNA
atgaagaggactgccgatggatcagagtttgaatctcccaagaagaagaggaaagtaaagataatatctcgaaaaagtcttggtacccaaaatgtctatgatattggagtggagaaagatcacaacttccttctcaagaacggtctcgtagccagcaac

SEQ ID NO: 5036 - protein, 53 aa, synthetic construct
MKRTADGSEFESPKKKRKVKIISRKSLGTQNVYDIGVEKDHNFLLKNGLVASN

SEQ ID NO: 5037-5101 - skipped (65 entries)

SEQ ID NO: 5102 - protein, 6 aa, synthetic construct
GGSGGS

SEQ ID NO: 5103 - protein, 9 aa, synthetic construct
GGSGGSGGS

SEQ ID NO: 5104 - protein, 12 aa, synthetic construct
GGSGGSGGSGGS

SEQ ID NO: 5105 - protein, 15 aa, synthetic construct
GGSGGSGGSGGSGGS

SEQ ID NO: 5106 - protein, 18 aa, synthetic construct
GGSGGSGGSGGSGGSGGS

SEQ ID NO: 5107 - protein, 5 aa, synthetic construct
GGGGS

SEQ ID NO: 5108 - protein, 10 aa, synthetic construct
GGGGSGGGGS

SEQ ID NO: 5109 - protein, 15 aa, synthetic construct
GGGGSGGGGSGGGGS

SEQ ID NO: 5110 - protein, 20 aa, synthetic construct
GGGGSGGGGSGGGGSGGGGS

SEQ ID NO: 5111 - protein, 25 aa, synthetic construct
GGGGSGGGGSGGGGSGGGGSGGGGS

SEQ ID NO: 5112 - protein, 30 aa, synthetic construct
GGGGSGGGGSGGGGSGGGGSGGGGSGGGGS

SEQ ID NO: 5113 - skipped

SEQ ID NO: 5114 - protein, 4 aa, synthetic construct
GGGG

SEQ ID NO: 5115 - protein, 5 aa, synthetic construct
GGGGG

SEQ ID NO: 5116 - protein, 6 aa, synthetic construct
GGGGGG

SEQ ID NO: 5117 - protein, 7 aa, synthetic construct
GGGGGGG

SEQ ID NO: 5118 - protein, 8 aa, synthetic construct
GGGGGGGG

SEQ ID NO: 5119 - skipped

SEQ ID NO: 5120 - protein, 6 aa, synthetic construct
GSSGSS

SEQ ID NO: 5121 - protein, 9 aa, synthetic construct
GSSGSSGSS

SEQ ID NO: 5122 - protein, 12 aa, synthetic construct
GSSGSSGSSGSS

SEQ ID NO: 5123 - protein, 15 aa, synthetic construct
GSSGSSGSSGSSGSS

SEQ ID NO: 5124 - protein, 18 aa, synthetic construct
GSSGSSGSSGSSGSSGSS

SEQ ID NO: 5125 - protein, 5 aa, synthetic construct
EAAAK

SEQ ID NO: 5126 - protein, 10 aa, synthetic construct
EAAAKEAAAK

SEQ ID NO: 5127 - protein, 15 aa, synthetic construct
EAAAKEAAAKEAAAK

SEQ ID NO: 5128 - protein, 20 aa, synthetic construct
EAAAKEAAAKEAAAKEAAAK

SEQ ID NO: 5129 - protein, 25 aa, synthetic construct
EAAAKEAAAKEAAAKEAAAKEAAAK

SEQ ID NO: 5130 - protein, 30 aa, synthetic construct
EAAAKEAAAKEAAAKEAAAKEAAAKEAAAK

SEQ ID NO: 5131 - skipped

SEQ ID NO: 5132 - protein, 5 aa, synthetic construct
PAPAP

SEQ ID NO: 5133 - protein, 7 aa, synthetic construct
PAPAPAP

SEQ ID NO: 5134 - protein, 9 aa, synthetic construct
PAPAPAPAP

SEQ ID NO: 5135 - protein, 11 aa, synthetic construct
PAPAPAPAPAP

SEQ ID NO: 5136 - protein, 13 aa, synthetic construct
PAPAPAPAPAPAP

SEQ ID NO: 5137 - protein, 6 aa, synthetic construct
GGSGGG

SEQ ID NO: 5138 - protein, 6 aa, synthetic construct
GGGGGS

SEQ ID NO: 5139 - protein, 6 aa, synthetic construct
GGSGSS

SEQ ID NO: 5140 - protein, 6 aa, synthetic construct
GSSGGS

SEQ ID NO: 5141 - protein, 8 aa, synthetic construct
GGSEAAAK

SEQ ID NO: 5142 - protein, 8 aa, synthetic construct
EAAAKGGS

SEQ ID NO: 5143 - protein, 6 aa, synthetic construct
GGSPAP

SEQ ID NO: 5144 - protein, 6 aa, synthetic construct
PAPGGS

SEQ ID NO: 5145 - protein, 6 aa, synthetic construct
GGGGSS

SEQ ID NO: 5146 - protein, 6 aa, synthetic construct
GSSGGG

SEQ ID NO: 5147 - protein, 8 aa, synthetic construct
GGGEAAAK

SEQ ID NO: 5148 - protein, 8 aa, synthetic construct
EAAAKGGG

SEQ ID NO: 5149 - protein, 6 aa, synthetic construct
GGGPAP

SEQ ID NO: 5150 - protein, 6 aa, synthetic construct
PAPGGG

SEQ ID NO: 5151 - protein, 8 aa, synthetic construct
GSSEAAAK

SEQ ID NO: 5152 - protein, 8 aa, synthetic construct
EAAAKGSS

SEQ ID NO: 5153 - protein, 6 aa, synthetic construct
GSSPAP

SEQ ID NO: 5154 - protein, 6 aa, synthetic construct
PAPGSS

SEQ ID NO: 5155 - protein, 8 aa, synthetic construct
EAAAKPAP

SEQ ID NO: 5156 - protein, 8 aa, synthetic construct
PAPEAAAK

SEQ ID NO: 5157 - protein, 9 aa, synthetic construct
GGSGGGGSS

SEQ ID NO: 5158 - protein, 9 aa, synthetic construct
GGSGSSGGG

SEQ ID NO: 5159 - protein, 9 aa, synthetic construct
GGGGGSGSS

SEQ ID NO: 5160 - protein, 9 aa, synthetic construct
GGGGSSGGS

SEQ ID NO: 5161 - protein, 9 aa, synthetic construct
GSSGGSGGG

SEQ ID NO: 5162 - protein, 9 aa, synthetic construct
GSSGGGGGS

SEQ ID NO: 5163 - protein, 11 aa, synthetic construct
GGSGGGEAAAK

SEQ ID NO: 5164 - protein, 11 aa, synthetic construct
GGSEAAAKGGG

SEQ ID NO: 5165 - protein, 11 aa, synthetic construct
GGGGGSEAAAK

SEQ ID NO: 5166 - protein, 11 aa, synthetic construct
GGGEAAAKGGS

SEQ ID NO: 5167 - protein, 11 aa, synthetic construct
EAAAKGGSGGG

SEQ ID NO: 5168 - protein, 11 aa, synthetic construct
EAAAKGGGGGS

SEQ ID NO: 5169 - protein, 9 aa, synthetic construct
GGSGGGPAP

SEQ ID NO: 5170 - protein, 9 aa, synthetic construct
GGSPAPGGG

SEQ ID NO: 5171 - protein, 9 aa, synthetic construct
GGGGGSPAP

SEQ ID NO: 5172 - protein, 9 aa, synthetic construct
GGGPAPGGS

SEQ ID NO: 5173 - protein, 9 aa, synthetic construct
PAPGGSGGG

SEQ ID NO: 5174 - protein, 9 aa, synthetic construct
PAPGGGGGS

SEQ ID NO: 5175 - protein, 11 aa, synthetic construct
GGSGSSEAAAK

SEQ ID NO: 5176 - protein, 11 aa, synthetic construct
GGSEAAAKGSS

SEQ ID NO: 5177 - protein, 11 aa, synthetic construct
GSSGGSEAAAK

SEQ ID NO: 5178 - protein, 11 aa, synthetic construct
GSSEAAAKGGS

SEQ ID NO: 5179 - protein, 11 aa, synthetic construct
EAAAKGGSGSS

SEQ ID NO: 5180 - protein, 11 aa, synthetic construct
EAAAKGSSGGS

SEQ ID NO: 5181 - protein, 9 aa, synthetic construct
GGSGSSPAP

SEQ ID NO: 5182 - protein, 9 aa, synthetic construct
GGSPAPGSS

SEQ ID NO: 5183 - protein, 9 aa, synthetic construct
GSSGGSPAP

SEQ ID NO: 5184 - protein, 9 aa, synthetic construct
GSSPAPGGS

SEQ ID NO: 5185 - protein, 9 aa, synthetic construct
PAPGGSGSS

SEQ ID NO: 5186 - protein, 9 aa, synthetic construct
PAPGSSGGS

SEQ ID NO: 5187 - protein, 11 aa, synthetic construct
GGSEAAAKPAP

SEQ ID NO: 5188 - protein, 11 aa, synthetic construct
GGSPAPEAAAK

SEQ ID NO: 5189 - protein, 11 aa, synthetic construct
EAAAKGGSPAP

SEQ ID NO: 5190 - protein, 11 aa, synthetic construct
EAAAKPAPGGS

SEQ ID NO: 5191 - protein, 11 aa, synthetic construct
PAPGGSEAAAK

SEQ ID NO: 5192 - protein, 11 aa, synthetic construct
PAPEAAAKGGS

SEQ ID NO: 5193 - protein, 11 aa, synthetic construct
GGGGSSEAAAK

SEQ ID NO: 5194 - protein, 11 aa, synthetic construct
GGGEAAAKGSS

SEQ ID NO: 5195 - protein, 11 aa, synthetic construct
GSSGGGEAAAK

SEQ ID NO: 5196 - protein, 11 aa, synthetic construct
GSSEAAAKGGG

SEQ ID NO: 5197 - protein, 11 aa, synthetic construct
EAAAKGGGGSS

SEQ ID NO: 5198 - protein, 11 aa, synthetic construct
EAAAKGSSGGG

SEQ ID NO: 5199 - protein, 9 aa, synthetic construct
GGGGSSPAP

SEQ ID NO: 5200 - protein, 9 aa, synthetic construct
GGGPAPGSS

SEQ ID NO: 5201 - protein, 9 aa, synthetic construct
GSSGGGPAP

SEQ ID NO: 5202 - protein, 9 aa, synthetic construct
GSSPAPGGG

SEQ ID NO: 5203 - protein, 9 aa, synthetic construct
PAPGGGGSS

SEQ ID NO: 5204 - protein, 9 aa, synthetic construct
PAPGSSGGG

SEQ ID NO: 5205 - protein, 11 aa, synthetic construct
GGGEAAAKPAP

SEQ ID NO: 5206 - protein, 11 aa, synthetic construct
GGGPAPEAAAK

SEQ ID NO: 5207 - protein, 11 aa, synthetic construct
EAAAKGGGPAP

SEQ ID NO: 5208 - protein, 11 aa, synthetic construct
EAAAKPAPGGG

SEQ ID NO: 5209 - protein, 11 aa, synthetic construct
PAPGGGEAAAK

SEQ ID NO: 5210 - protein, 11 aa, synthetic construct
PAPEAAAKGGG

SEQ ID NO: 5211 - protein, 11 aa, synthetic construct
GSSEAAAKPAP

SEQ ID NO: 5212 - protein, 11 aa, synthetic construct
GSSPAPEAAAK

SEQ ID NO: 5213 - protein, 11 aa, synthetic construct
EAAAKGSSPAP

SEQ ID NO: 5214 - protein, 11 aa, synthetic construct
EAAAKPAPGSS

SEQ ID NO: 5215 - protein, 11 aa, synthetic construct
PAPGSSEAAAK

SEQ ID NO: 5216 - protein, 11 aa, synthetic construct
PAPEAAAKGSS

SEQ ID NO: 5217 - protein, 46 aa, synthetic construct
AEAAAKEAAAKEAAAKEAAAKALEAEAAAKEAAAKEAAAKEAAAKA

SEQ ID NO: 5218 - protein, 15 aa, synthetic construct
GGGGSEAAAKGGGGS

SEQ ID NO: 5219 - protein, 15 aa, synthetic construct
EAAAKGGGGSEAAAK

SEQ ID NO: 5220 - protein, 16 aa, synthetic construct
SGSETPGTSESATPES

SEQ ID NO: 5221 - protein, 12 aa, synthetic construct
GSAGSAAGSGEF

SEQ ID NO: 5222 - protein, 33 aa, synthetic construct; identical to SEQ ID NO: 5006

SEQ ID NO: 5223 - protein, 30 aa, synthetic construct
AHFKISGEKRPSTDPGKKAKNPKKKKKKDP

SEQ ID NO: 5224 - protein, 12 aa, synthetic construct
AHRAKKMSKTHA

SEQ ID NO: 5225 - protein, 14 aa, synthetic construct
ASPEYVNLPINGNG

SEQ ID NO: 5226 - protein, 7 aa, synthetic construct
CTKRPRW

SEQ ID NO: 5227 - protein, 16 aa, synthetic construct
DKAKRVSRNKSEKKRR

SEQ ID NO: 5228 - protein, 15 aa, synthetic construct
EELRLKEELLKGIYA

SEQ ID NO: 5229 - protein, 16 aa, synthetic construct
EEQLRRRKNSRLNNTG

SEQ ID NO: 5230 - protein, 24 aa, synthetic construct
EVLKVIRTGKRKKKAWKRMVTKVC

SEQ ID NO: 5231 - protein, 15 aa, synthetic construct
HHHHHHHHHHHHQPH

SEQ ID NO: 5232 - protein, 17 aa, synthetic construct
HKKKHPDASVNFSEFSK

SEQ ID NO: 5233 - protein, 6 aa, synthetic construct
HKRTKK

SEQ ID NO: 5234 - protein, 29 aa, synthetic construct
IINGRKLKLKKSRRRSSQTSNNSFTSRRS

SEQ ID NO: 5235 - protein, 8 aa, synthetic construct
KAEQERRK

SEQ ID NO: 5236 - protein, 18 aa, synthetic construct
KEKRKRREELFIEQKKRK

SEQ ID NO: 5237 - protein, 14 aa, synthetic construct
KKGKDEWFSRGKKP

SEQ ID NO: 5238 - protein, 12 aa, synthetic construct
KKGPSVQKRKKT

SEQ ID NO: 5239 - protein, 16 aa, synthetic construct
KKKTVINDLLHYKKEK

SEQ ID NO: 5240 - protein, 17 aa, synthetic construct
KKNGGKGKNKPSAKIKK

SEQ ID NO: 5241 - protein, 13 aa, synthetic construct
KKPKWDDFKKKKK

SEQ ID NO: 5242 - protein, 6 aa, synthetic construct
KKRKKD

SEQ ID NO: 5243 - protein, 9 aa, synthetic construct
KKRRKRRRK

SEQ ID NO: 5244 - protein, 9 aa, synthetic construct
KKRRRRARK

SEQ ID NO: 5245 - protein, 7 aa, synthetic construct
KKSKRGR

SEQ ID NO: 5246 - protein, 8 aa, synthetic construct
KKSRKRGS

SEQ ID NO: 5247 - protein, 17 aa, synthetic construct
KKSTALSRELGKIMRRR

SEQ ID NO: 5248 - protein, 17 aa, synthetic construct
KKSYQDPEIIAHSRPRK

SEQ ID NO: 5249 - protein, 17 aa, synthetic construct
KKTGKNRKLKSKRVKTR

SEQ ID NO: 5250 - protein, 17 aa, synthetic construct
KKVSIAGQSGKLWRWKR

SEQ ID NO: 5251 - protein, 20 aa, synthetic construct
KKYENVVIKRSPRKRGRPRK

SEQ ID NO: 5252 - protein, 6 aa, synthetic construct
KNKKRK

SEQ ID NO: 5253 - protein, 6 aa, synthetic construct
KPKKKR

SEQ ID NO: 5254 - protein, 19 aa, synthetic construct
KRAMKDDSHGNSTSPKRRK

SEQ ID NO: 5255 - protein, 17 aa, synthetic construct
KRANSNLVAAYEKAKKK

SEQ ID NO: 5256 - protein, 22 aa, synthetic construct
KRASEDTTSGSPPKKSSAGPKR

SEQ ID NO: 5257 - protein, 16 aa, synthetic construct
KRFKRRWMVRKMKTKK

SEQ ID NO: 5258 - protein, 16 aa, synthetic construct
KRGLNSSFETSPKKVK

SEQ ID NO: 5259 - protein, 20 aa, synthetic construct
KRGNSSIGPNDLSKRKQRKK

SEQ ID NO: 5260 - protein, 23 aa, synthetic construct
KRIHSVSLSQSQIDPSKKVKRAK

SEQ ID NO: 5261 - protein, 15 aa, synthetic construct
KRKGKLKNKGSKRKK

SEQ ID NO: 5262 - protein, 13 aa, synthetic construct
KRRRRRRREKRKR

SEQ ID NO: 5263 - protein, 18 aa, synthetic construct
KRSNDRTYSPEEEKQRRA

SEQ ID NO: 5264 - protein, 21 aa, synthetic construct
KRTVATNGDASGAHRAKKMSK

SEQ ID NO: 5265 - protein, 20 aa, synthetic construct
KRVYNKGEDEQEHLPKGKKR

SEQ ID NO: 5266 - protein, 18 aa, synthetic construct
KSGKAPRRRAVSMDNSNK

SEQ ID NO: 5267 - protein, 19 aa, synthetic construct
KVNFLDMSLDDIIIYKELE

SEQ ID NO: 5268 - protein, 15 aa, synthetic construct
KVQHRIAKKTTRRRR

SEQ ID NO: 5269 - protein, 8 aa, synthetic construct
LSPSLSPL

SEQ ID NO: 5270 - protein, 30 aa, synthetic construct; identical to SEQ ID NO: 5009

SEQ ID NO: 5271 - protein, 52 aa, synthetic construct
MPQNEYIELHRKRYGYRLDYHEKKRKKESREAHERSKKAKKMIGLKAKLYHK

SEQ ID NO: 5272 - protein, 10 aa, synthetic construct
MVQLRPRASR

SEQ ID NO: 5273 - protein, 24 aa, synthetic construct
NNKLLAKRRKGGASPKDDPMDDIK

SEQ ID NO: 5274 - protein, 20 aa, synthetic construct
NYKRPMDGTYGPPAKRHEGE

SEQ ID NO: 5275 - protein, 19 aa, synthetic construct
PDTKRAKLDSSETTMVKKK

SEQ ID NO: 5276 - protein, 7 aa, synthetic construct
PEKRTKI

SEQ ID NO: 5277 - protein, 8 aa, synthetic construct
PGGRGKKK

SEQ ID NO: 5278 - protein, 18 aa, synthetic construct
PGKMDKGEHRQERRDRPY

SEQ ID NO: 5279 - protein, 11 aa, synthetic construct
PKKGDKYDKTD

SEQ ID NO: 5280 - protein, 7 aa, synthetic construct
PKKKSRK

SEQ ID NO: 5281 - protein, 7 aa, synthetic construct
PKKNKPE

SEQ ID NO: 5282 - protein, 7 aa, synthetic construct
PKKRAKV

SEQ ID NO: 5283 - protein, 9 aa, synthetic construct
PKPKKLKVE

SEQ ID NO: 5284 - protein, 7 aa, synthetic construct
PKRGRGR

SEQ ID NO: 5285 - protein, 9 aa, synthetic construct
PKRRLVDDA

SEQ ID NO: 5286 - protein, 7 aa, synthetic construct
PKRRRTY

SEQ ID NO: 5287 - protein, 6 aa, synthetic construct
PLFKRR

SEQ ID NO: 5288 - protein, 7 aa, synthetic construct
PLRKAKR

SEQ ID NO: 5289 - protein, 9 aa, synthetic construct
PPAKRKCIF

SEQ ID NO: 5290 - protein, 8 aa, synthetic construct
PPARRRRL

SEQ ID NO: 5291 - protein, 8 aa, synthetic construct
PPKKKRKV

SEQ ID NO: 5292 - protein, 10 aa, synthetic construct
PPNKRMKVKH

SEQ ID NO: 5293 - protein, 13 aa, synthetic construct
PPRIYPQLPSAPT

SEQ ID NO: 5294 - protein, 13 aa, synthetic construct
PQRSPFPKSSVKR

SEQ ID NO: 5295 - protein, 8 aa, synthetic construct
PRPRKVPR

SEQ ID NO: 5296 - protein, 9 aa, synthetic construct
PRRRVQRKR

SEQ ID NO: 5297 - protein, 7 aa, synthetic construct
PRRVRLK

SEQ ID NO: 5298 - protein, 7 aa, synthetic construct
PSRKRPR

SEQ ID NO: 5299 - protein, 8 aa, synthetic construct
PSSKKRKV

SEQ ID NO: 5300 - protein, 7 aa, synthetic construct
PTKKRVK

SEQ ID NO: 5301 - protein, 9 aa, synthetic construct
QRPGPYDRP

SEQ ID NO: 5302 - protein, 18 aa, synthetic construct
RGKGGKGLGKGGAKRHRK

SEQ ID NO: 5303 - protein, 24 aa, synthetic construct
RKAGKGGGGHKTTKKRSAKDEKVP

SEQ ID NO: 5304 - protein, 9 aa, synthetic construct
RKIKLKRAK

SEQ ID NO: 5305 - protein, 9 aa, synthetic construct
RKIKRKRAK

SEQ ID NO: 5306 - protein, 17 aa, synthetic construct
RKKEAPGPREELRSRGR

SEQ ID NO: 5307 - protein, 7 aa, synthetic construct
RKKRKGK

SEQ ID NO: 5308 - protein, 9 aa, synthetic construct
RKKRRQRRR

SEQ ID NO: 5309 - protein, 25 aa, synthetic construct
RKKSIPLSIKNLKRKHKRKKNKITR

SEQ ID NO: 5310 - protein, 20 aa, synthetic construct
RKLVKPKNTKMKTKLRTNPY

SEQ ID NO: 5311 - protein, 16 aa, synthetic construct
RKRLILSDKGQLDWKK

SEQ ID NO: 5312 - protein, 7 aa, synthetic construct
RKRLKSK

SEQ ID NO: 5313 - protein, 9 aa, synthetic construct
RKRRVRDNM

SEQ ID NO: 5314 - protein, 22 aa, synthetic construct
RKRSPKDKKEKDLDGAGKRRKT

SEQ ID NO: 5315 - protein, 22 aa, synthetic construct
RKRTPRVDGQTGENDMNKRRRK

SEQ ID NO: 5316 - protein, 10 aa, synthetic construct
RLPVRRRRRR

SEQ ID NO: 5317 - protein, 10 aa, synthetic construct
RLRFRKPKSK

SEQ ID NO: 5318 - protein, 6 aa, synthetic construct
RQQRKR

SEQ ID NO: 5319 - protein, 16 aa, synthetic construct
RRDLNSSFETSPKKVK

SEQ ID NO: 5320 - protein, 8 aa, synthetic construct
RRDRAKLR

SEQ ID NO: 5321 - protein, 8 aa, synthetic construct
RRGDGRRR

SEQ ID NO: 5322 - protein, 11 aa, synthetic construct
RRGRKRKAEKQ

SEQ ID NO: 5323 - protein, 6 aa, synthetic construct
RRKKRR

SEQ ID NO: 5324 - protein, 19 aa, synthetic construct
RRKRSKSEDMDSVESKRRR

SEQ ID NO: 5325 - protein, 6 aa, synthetic construct
RRKRSR

SEQ ID NO: 5326 - protein, 14 aa, synthetic construct
RRPKGKTLQKRKPK

SEQ ID NO: 5327 - protein, 18 aa, synthetic construct
RRRGFERFGPDNMGRKRK

SEQ ID NO: 5328 - protein, 15 aa, synthetic construct
RRRGKNKVAAQNCRK

SEQ ID NO: 5329 - protein, 6 aa, synthetic construct
RRRKRR

SEQ ID NO: 5330 - protein, 14 aa, synthetic construct
RRRQKQKGGASRRR

SEQ ID NO: 5331 - protein, 13 aa, synthetic construct
RRRREGPRARRRR

SEQ ID NO: 5332 - protein, 61 aa, synthetic construct
RRTIRLKLVYDKCDRSCKIQKKNRNKCQYCRFHKCLSVGMSHNAIRFGRMPRSEKAKLKAE

SEQ ID NO: 5333 - protein, 17 aa, synthetic construct
RRVPQRKEVSRCRKCRK

SEQ ID NO: 5334 - protein, 32 aa, synthetic construct
RVGGRRQAVECIEDLLNEPGQPLDLSCKRPRP

SEQ ID NO: 5335 - protein, 9 aa, synthetic construct
RVVKLRIAP

SEQ ID NO: 5336 - protein, 6 aa, synthetic construct
RVVRRR

SEQ ID NO: 5337 - protein, 12 aa, synthetic construct
SKRKTKISRKTR

SEQ ID NO: 5338 - protein, 16 aa, synthetic construct
SYVKTVPNRTRTYIKL

SEQ ID NO: 5339 - protein, 12 aa, synthetic construct
TGKNEAKKRKIA

SEQ ID NO: 5340 - protein, 30 aa, synthetic construct
TLSPASSPSSVSCPVIPASTDESPGSALNI

SEQ ID NO: 5341 - protein, 12 aa, synthetic construct
VSKKQRTGKKIH

SEQ ID NO: 5342 - protein, 9 aa, synthetic construct
SPKKKRKVE

SEQ ID NO: 5343 - protein, 19 aa, synthetic construct
KRTADGSEFESPKKKRKVE

SEQ ID NO: 5344 - protein, 9 aa, synthetic construct
PAAKRVKLD

SEQ ID NO: 5345 - protein, 7 aa, synthetic construct
PKKKRKV

SEQ ID NO: 5346 - protein, 30 aa, synthetic construct; identical to SEQ ID NO: 5009

SEQ ID NO: 5347 - protein, 11 aa, synthetic construct
SPKKKRKVEAS

SEQ ID NO: 5348 - protein, 16 aa, synthetic construct
MAPKKKRKVGIHRGVP

SEQ ID NO: 5349 - protein, 29 aa, synthetic construct
KRTADGSEFEKRTADGSEFESPKKKAKVE

SEQ ID NO: 5350 - protein, 10 aa, synthetic construct
KRTADGSEFE

SEQ ID NO: 5351 - protein, 19 aa, synthetic construct
KRTADGSEFESPKKKAKVE

SEQ ID NO: 5352-8000 - skipped (2649 entries)

SEQ ID NO: 8001 - protein, 673 aa, Reticuloendotheliosis virus
TAPLEEEYRLFLEAPIQNVTLLEQWKREIPKVWAEINPPGLASTQAPIHVQLLSTALPVRVRQYPITLEAKRSLRETIRKFRAAGILRPVHSPWNTPLLPVRKSGTSEYRMVQDLREVNKRVETIHPTVPNPYTLLSLLPPDRIWYSVLDLKDAFFCIPLAPESQLIFAFEWADAEEGESGQLTWTRLPQGFKNSPTLFDEALNRDLQGFRLDHPSVSLLQYVDDLLIAADTQAACLSATRDLLMTLAELGYRVSGKKAQLCQEEVTYLGFKIHKGSRSLSNSRTQAILQIPVPKTKRQVREFLGTIGYCRLWIPGFAELAQPLYAATRGGNDPLVWGEKEEEAFQSLKLALTQPPALALPSLDKPFQLFVEETSGAAKGVLTQALGPWKRPVAYLSKRLDPVAAGWPRCLRAIAAAALLTREASKLTFGQDIEITSSHNLESLLRSPPDKWLTNARITQYQVLLLDPPRVRFKQTAALNPATLLPETDDTLPIHHCLDTLDSLTSTRPDLTDQPLAQAEATLFTDGSSYIRDGKRYAGAAVVTLDSVIWAEPLPIGTSAQKAELIALTKALEWSKDKSVNIYTDSRYAFATLHVHGMIYRERGLLTAGGKAIKNAPEILALLTAVWLPKRVAVMHCKGHQKDDAPTSTGNRRADEVAREVAIRPLSTQATIS

SEQ ID NO: 8002 - protein, 673 aa, synthetic construct
TAPLEEEYRLFLEAPIQNVTLLEQWKREIPKVWAEINPPGLASTQAPIHVQLLSTALPVRVRQYPITLEAKRSLRETIRKFRAAGILRPVHSPWNTPLLPVRKSGTSEYRMVQDLREVNKRVETIHPTVPNPYTLLSLLPPDRIWYSVLDLKDAFFCIPLAPESQLIFAFEWADAEEGESGQLTWTRLPQGFKNSPTLFNEALNRDLQGFRLDHPSVSLLQYVDDLLIAADTQAACLSATRDLLMTLAELGYRVSGKKAQLCQEEVTYLGFKIHKGSRSLSNSRTQAILQIPVPKTKRQVREFLGTIGYCRLWIPGFAELAQPLYAATRPGNDPLVWGEKEEEAFQSLKLALTQPPALALPSLDKPFQLFVEETSGAAKGVLTQALGPWKRPVAYLSKRLDPVAAGWPRCLRAIAAAALLTREASKLTFGQDIEITSSHNLESLLRSPPDKWLTNARITQYQVLLLDPPRVRFKQTAALNPATLLPETDDTLPIHHCLDTLDSLTSTRPDLTDQPLAQAEATLFTDGSSYIRDGKRYAGAAVVTLDSVIWAEPLPIGTSAQKAELIALTKALEWSKDKSVNIYTDSRYAFATLHVHGMIYRERGWLTAGGKAIKNAPEILALLTAVWLPKRVAVMHCKGHQKDDAPTSTGNRRADEVAREVAIRPLSTQATIS

SEQ ID NO: 8003 - protein, 673 aa, synthetic construct
TAPLEEEYRLFLEAPIQNVTLLEQWKREIPKVWAEINPPGLASTQAPIHVQLLSTALPVRVRQYPITLEAKRSLRETIRKFRAAGILRPVHSPWNTPLLPVRKSGTSEYRMVQDLREVNKRVETIHPTVPNPYTLLSLLPPDRIWYSVLDLKDAFFCIPLAPESQLIFAFEWADAEEGESGQLTWTRLPQGFKNSPTLFNEALNRDLQGFRLDHPSVSLLQYVDDLLIAADTQAACLSATRDLLMTLAELGYRVSGKKAQLCQEEVTYLGFKIHKGSRSLSNSRTQAILQIPVPKTKRQVREFLGKIGYCRLFIPGFAELAQPLYAATRPGNDPLVWGEKEEEAFQSLKLALTQPPALALPSLDKPFQLFVEETSGAAKGVLTQALGPWKRPVAYLSKRLDPVAAGWPRCLRAIAAAALLTREASKLTFGQDIEITSSHNLESLLRSPPDKWLTNARITQYQVLLLDPPRVRFKQTAALNPATLLPETDDTLPIHHCLDTLDSLTSTRPDLTDQPLAQAEATLFTDGSSYIRDGKRYAGAAVVTLDSVIWAEPLPIGTSAQKAELIALTKALEWSKDKSVNIYTDSRYAFATLHVHGMIYRERGWLTAGGKAIKNAPEILALLTAVWLPKRVAVMHCKGHQKDDAPTSTGNRRADEVAREVAIRPLSTQATIS

SEQ ID NO: 8004 - protein, 677 aa, Baboon endogenous virus
TVSLQDEHRLFDIPVTTSLPDVWLQDFPQAWAETGGLGRAKCQAPIIIDLKPTAVPVSIKQYPMSLEAHMGIRQHIIKFLELGVLRPCRSPWNTPLLPVKKPGTQDYRPVQDLREINKRTVDIHPTVPNPYNLLSTLKPDYSWYTVLDLKDAFFCLPLAPQSQELFAFEWKDPERGISGQLTWTRLPQGFKNSPTLFDEALHRDLTDFRTQHPEVTLLQYVDDLLLAAPTKKACTQGTRHLLQELGEKGYRASAKKAQICQTKVTYLGYILSEGKRWLTPGRIETVARIPPPRNPREVREFLGTAGFCRLWIPGFAELAAPLYALTKESTPFTWQTEHQLAFEALKKALLSAPALGLPDTSKPFTLFLDERQGIAKGVLTQKLGPWKRPVAYLSKKLDPVAAGWPPCLRIMAATAMLVKDSAKLTLGQPLTVITPHTLEAIVRQPPDRWITNARLTHYQALLLDTDRVQFGPPVTLNPATLLPVPENQPSPHDCRQVLAETHGTREDLKDQELPDADHTWYTDGSSYLDSGTRRAGAAVVDGHNTIWAQSLPPGTSAQKAELIALTKALELSKGKKANIYTDSRYAFATAHTHGSIYERRGLLTSEGKEIKNKAEIIALLKALFLPQEVAIIHCPGHQKGQDPVAVGNRQADRVARQAAMAEVLTLATEPDNTSHIT

SEQ ID NO: 8005 - protein, 677 aa, synthetic construct
TVSLQDEHRLFDIPVTTSLPDVWLQDFPQAWAETGGLGRAKCQAPIIIDLKPTAVPVSIKQYPMSLEAHMGIRQHIIKFLELGVLRPCRSPWNTPLLPVKKPGTQDYRPVQDLREINKRTVDIHPTVPNPYNLLSTLKPDYSWYTVLDLKDAFFCLPLAPQSQELFAFEWKDPERGISGQLTWTRLPQGFKNSPTLFNEALHRDLTDFRTQHPEVTLLQYVDDLLLAAPTKKACTQGTRHLLQELGEKGYRASAKKAQICQTKVTYLGYILSEGKRWLTPGRIETVARIPPPRNPREVREFLGTAGFCRLWIPGFAELAAPLYALTKPSTPFTWQTEHQLAFEALKKALLSAPALGLPDTSKPFTLFLDERQGIAKGVLTQKLGPWKRPVAYLSKKLDPVAAGWPPCLRIMAATAMLVKDSAKLTLGQPLTVITPHTLEAIVRQPPDRWITNARLTHYQALLLDTDRVQFGPPVTLNPATLLPVPENQPSPHDCRQVLAETHGTREDLKDQELPDADHTWYTDGSSYLDSGTRRAGAAVVDGHNTIWAQSLPPGTSAQKAELIALTKALELSKGKKANIYTDSRYAFATAHTHGSIYERRGWLTSEGKEIKNKAEIIALLKALFLPQEVAIIHCPGHQKGQDPVAVGNRQADRVARQAAMAEVLTLATEPDNTSHIT

SEQ ID NO: 8006 - protein, 677 aa, synthetic construct
TVSLQDEHRLFDIPVTTSLPDVWLQDFPQAWAETGGLGRAKCQAPIIIDLKPTAVPVSIKQYPMSLEAHMGIRQHIIKFLELGVLRPCRSPWNTPLLPVKKPGTQDYRPVQDLREINKRTVDIHPTVPNPYNLLSTLKPDYSWYTVLDLKDAFFCLPLAPQSQELFAFEWKDPERGISGQLTWTRLPQGFKNSPTLFNEALHRDLTDFRTQHPEVTLLQYVDDLLLAAPTKKACTQGTRHLLQELGEKGYRASAKKAQICQTKVTYLGYILSEGKRWLTPGRIETVARIPPPRNPREVREFLGKAGFCRLFIPGFAELAAPLYALTKPSTPFTWQTEHQLAFEALKKALLSAPALGLPDTSKPFTLFLDERQGIAKGVLTQKLGPWKRPVAYLSKKLDPVAAGWPPCLRIMAATAMLVKDSAKLTLGQPLTVITPHTLEAIVRQPPDRWITNARLTHYQALLLDTDRVQFGPPVTLNPATLLPVPENQPSPHDCRQVLAETHGTREDLKDQELPDADHTWYTDGSSYLDSGTRRAGAAVVDGHNTIWAQSLPPGTSAQKAELIALTKALELSKGKKANIYTDSRYAFATAHTHGSIYERRGWLTSEGKEIKNKAEIIALLKALFLPQEVAIIHCPGHQKGQDPVAVGNRQADRVARQAAMAEVLTLATEPDNTSHIT

SEQ ID NO: 8007 - protein, 576 aa, Bovine leukemia virus
GVLDAPPSHIGLEHLPPPPEVPQFPLNLERLQALQDLVHRSLEAGYISPWDGPGNNPVFPVRKPNGAWRFVHDLRVTNALTKPIPALSPGPPDLTAIPTHLPHIICLDLKDAFFQIPVEDRFRSYFAFTLPTPGGLQPHRRFAWRVLPQGFINSPALFERALQEPLRQVSAAFSQSLLVSYMDDILYVSPTEEQRLQCYQTMAAHLRDLGFQVASEKTRQTPSPVPFLGQMVHERMVTYQSLPTLQISSPISLHQLQTVLGDLQWVSRGTPTTRRPLQLLYSSLKGIDDPRAIIHLSPEQQQGIAELRQALSHNARSRYNEQEPLLAYVHLTRAGSTLVLFQKGAQFPLAYFQTPLTDNQASPWGLLLLLGCQYLQAQALSSYAKTILKYYHNLPKTSLDNWIQSSEDPRVQELLQLWPQISSQGIQPPGPWKTLVTRAEVFLTPQFSPEPIPAALCLFSDGAARRGAYCLWKDHLLDFQAVPAPESAQKGELAGLLAGLAAAPPEPLNIWVDSKYLYSLLRTLVLGAWLQPDPVPSYALLYKSLLRHPAIFVGHVRSHSSASHPIASLNNYVDQL

SEQ ID NO: 8008 - protein, 576 aa, synthetic construct
GVLDAPPSHIGLEHLPPPPEVPQFPLNLERLQALQDLVHRSLEAGYISPWDGPGNNPVFPVRKPNGAWRFVHDLRVTNALTKPIPALSPGPPDLTAIPTHLPHIICLDLKDAFFQIPVEDRFRSYFAFTLPTPGGLQPHRRFAWRVLPQGFINSPALFQRALQEPLRQVSAAFSQSLLVSYMDDILYVSPTEEQRLQCYQTMAAHLRDLGFQVASEKTRQTPSPVPFLGQMVHERMVTYQSLPTLQISSPISLHQLQTVLGDLQWVSRGTPTTRRPLQLLYSSLKPIDDPRAIIHLSPEQQQGIAELRQALSHNARSRYNEQEPLLAYVHLTRAGSTLVLFQKGAQFPLAYFQTPLTDNQASPWGLLLLLGCQYLQAQALSSYAKTILKYYHNLPKTSLDNWIQSSEDPRVQELLQLWPQISSQGIQPPGPWKTLVTRAEVFLTPQFSPEPIPAALCLFSDGAARRGAYCLWKDHLLDFQAVPAPESAQKGELAGLLAGLAAAPPEPLNIWVDSKYLYSLLRTLVLGAWLQPDPVPSYALLYKSLLRHPAIFVGHVRSHSSASHPIASLNNYVDQL

SEQ ID NO: 8009 - protein, 576 aa, Bovine leukemia virus
GVLDTPPSHIGLEHLPPPPEVPQFPLNLERLQALQDLVHRSLEAGYISPWDGPGNNPVFPVRKPNGAWRFVHDLRATNALTKPIPALSPGPPDLTAIPTHPPHIICLDLKDAFFQIPVEDRFRFYLSFTLPSPGGLQPHRRFAWRVLPQGFINSPALFERALQEPLRQVSAAFSQSLLVSYMDDILYASPTEEQRSQCYQALAARLRDLGFQVASEKTSQTPSPVPFLGQMVHEQIVTYQSLPTLQISSPISLHQLQAVLGDLQWVSRGTPTTRRPLQLLYSSLKRHHDPRAIIQLSPEQLQGIAELRQALSHNARSRYNEQEPLLAYVHLTRAGSTLVLFQKGAQFPLAYFQTPLTDNQASPWGLLLLLGCQYLQTQALSSYAKPILKYYHNLPKTSLDNWIQSSEDPRVQELLQLWPQISSQGIQPPGPWKTLITRAEVFLTPQFSPDPIPAALCLFSDGATGRGAYCLWKDHLLDFQAVPAPESAQKGELAGLLAGLAAAPPEPVNIWVDSKYLYSLLRTLVLGAWLQPDPVPSYALLYKSLLRHPAIVVGHVRSHSSASHPIASLNNYVDQL

SEQ ID NO: 8010 - protein, 576 aa, synthetic construct
GVLDTPPSHIGLEHLPPPPEVPQFPLNLERLQALQDLVHRSLEAGYISPWDGPGNNPVFPVRKPNGAWRFVHDLRATNALTKPIPALSPGPPDLTAIPTHPPHIICLDLKDAFFQIPVEDRFRFYLSFTLPSPGGLQPHRRFAWRVLPQGFINSPALFNRALQEPLRQVSAAFSQSLLVSYMDDILYASPTEEQRSQCYQALAARLRDLGFQVASEKTSQTPSPVPFLGQMVHEQIVTYQSLPTLQISSPISLHQLQAVLGDLQWVSRGTPTTRRPLQLLYSSLKRHHDPRAIIQLSPEQLQGIAELRQALSHNARSRYNEQEPLLAYVHLTRAGSTLVLFQKGAQFPLAYFQTPLTDNQASPWGLLLLLGCQYLQTQALSSYAKPILKYYHNLPKTSLDNWIQSSEDPRVQELLQLWPQISSQGIQPPGPWKTLITRAEVFLTPQFSPDPIPAALCLFSDGATGRGAYCLWKDHLLDFQAVPAPESAQKGELAGLLAGLAAAPPEPVNIWVDSKYLYSLLRTWVLGAWLQPDPVPSYALLYKSLLRHPAIVVGHVRSHSSASHPIASLNNYVDQL

SEQ ID NO: 8011 - protein, 576 aa, synthetic construct
GVLDTPPSHIGLEHLPPPPEVPQFPLNLERLQALQDLVHRSLEAGYISPWDGPGNNPVFPVRKPNGAWRFVHDLRATNALTKPIPALSPGPPDLTAPPTHPPHIICLDLKDAFFQIPVEDRFRFYLSFTLPSPGGLQPHRRFAWRVLPQGFINSPALFQRALQEPLRQVSAAFSQSLLVSYMDDILYASPTEEQRSQCYQALAARLRDLGFQVASEKTSQTPSPVPFLGQMVHEQIVTYQSLPTLQISSPISLHQLQAVLGDLQWVSRGTPTTRRPLQLLYSSLKRHHDPRAIIQLSPEQLQGIAELRQALSHNARSRYNEQEPLLAYVHLTRAGSTLVLFQKGAQFPLAYFQTPLTDNQASPWGLLLLLGCQYLQTQALSSYAKPILKYYHNLPKTSLDNWIQSSEDPRVQELLQLWPQISSQGIQPPGPWKTLITRAEVFLTPQFSPDPIPAALCLFSDGATGRGAYCLWKDHLLDFQAVPAPESAQKGELAGLLAGLAAAPPEPVNIWVDSKYLYSLLRTWVLGAWLQPDPVPSYALLYKSLLRHPAIVVGHVRSHSSASHPIASLNNYVDQL

SEQ ID NO: 8012 - protein, 748 aa, Feline foamy virus
MDLLKPLTVERKGVKIKGYWNSQADITCVPKDLLQGEEPVRQQNVTTIHGTQEGDVYYVNLKIDGRRINTEVIGTTLDYAIITPGDVPWILKKPLELTIKLDLEEQQGTLLNNSILSKKGKEELKQLFEKYSALWQSWENQVGHRRIRPHKIATGTVKPTPQKQYHINPKAKPDIQIVINDLLKQGVLIQKESTMNTPVYPVPKPNGRWRMVLDYRAVNKVTPLIAVQNQHSYGILGSLFKGRYKTTIDLSNGFWAHPIVPEDYWITAFTWQGKQYCWTVLPQGFLNSPGLFTGDVVDLLQGIPNVEVYVDDVYISHDSEKEHLEYLDILFNRLKEAGYIISLKKSNIANSIVDFLGFQITNEGRGLTDTFKEKLENITAPTTLKQLQSILGLLNFARNFIPDFTELIAPLYALIPKSTKNYVPWQIEHSTTLETLITKLNGAEYLQGRKGDKTLIMKVNASYTTGYIRYYNEGEKKPISYVSIVFSKTELKFTELEKLLTTVHKGLLKALDLSMGQNIHVYSPIVSMQNIQKTPQTAKKALASRWLSWLSYLEDPRIRFFYDPQMPALKDLPAVDTGKDNKKHPSNFQHIFYTDGSAITSPTKEGHLNAGMGIVYFINKDGNLQKQQEWSISLGNHTAQFAEIAAFEFALKKCLPLGGNILVVTDSNYVAKAYNEELDVWASNGFVNNRKKPLKHISKWKSVADLKRLRPDVVVTHEPGHQKLDSSPHAYGNNLADQLATQASFKVH

SEQ ID NO: 8013 - protein, 748 aa, synthetic construct
MDLLKPLTVERKGVKIKGYWNSQADITCVPKDLLQGEEPVRQQNVTTIHGTQEGDVYYVNLKIDGRRINTEVIGTTLDYAIITPGDVPWILKKPLELTIKLDLEEQQGTLLNNSILSKKGKEELKQLFEKYSALWQSWENQVGHRRIRPHKIATGTVKPTPQKQYHINPKAKPDIQIVINDLLKQGVLIQKESTMNTPVYPVPKPNGRWRMVLDYRAVNKVTPLIAVQNQHSYGILGSLFKGRYKTTIDLSNGFWAHPIVPEDYWITAFTWQGKQYCWTVLPQGFLNSPGLFNGDVVDLLQGIPNVEVYVDDVYISHDSEKEHLEYLDILFNRLKEAGYIISLKKSNIANSIVDFLGFQITNEGRGLTDTFKEKLENITAPTTLKQLQSILGLLNFARNFIPDFTELIAPLYALIPKSPKNYVPWQIEHSTTLETLITKLNGAEYLQGRKGDKTLIMKVNASYTTGYIRYYNEGEKKPISYVSIVFSKTELKFTELEKLLTTVHKGLLKALDLSMGQNIHVYSPIVSMQNIQKTPQTAKKALASRWLSWLSYLEDPRIRFFYDPQMPALKDLPAVDTGKDNKKHPSNFQHIFYTDGSAITSPTKEGHLNAGMGIVYFINKDGNLQKQQEWSISLGNHTAQFAEIAAFEFALKKCLPLGGNILVVTDSNYVAKAYNEELDVWASNGFVNNRKKPLKHISKWKSVADLKRLRPDVVVTHEPGHQKLDSSPHAYGNNLADQLATQASFKVH

SEQ ID NO: 8014 - protein, 748 aa, synthetic construct
MDLLKPLTVERKGVKIKGYWNSQADITCVPKDLLQGEEPVRQQNVTTIHGTQEGDVYYVNLKIDGRRINTEVIGTTLDYAIITPGDVPWILKKPLELTIKLDLEEQQGTLLNNSILSKKGKEELKQLFEKYSALWQSWENQVGHRRIRPHKIATGTVKPTPQKQYHINPKAKPDIQIVINDLLKQGVLIQKESTMNTPVYPVPKPNGRWRMVLDYRAVNKVTPLIAVQNQHSYGILGSLFKGRYKTTIDLSNGFWAHPIVPEDYWITAFTWQGKQYCWTVLPQGFLNSPGLFNGDVVDLLQGIPNVEVYVDDVYISHDSEKEHLEYLDILFNRLKEAGYIISLKKSNIANSIVDFLGFQITNEGRGLTDTFKEKLENITAPTTLKQLQSILGKLNFARNFIPDFTELIAPLYALIPKSPKNYVPWQIEHSTTLETLITKLNGAEYLQGRKGDKTLIMKVNASYTTGYIRYYNEGEKKPISYVSIVFSKTELKFTELEKLLTTVHKGLLKALDLSMGQNIHVYSPIVSMQNIQKTPQTAKKALASRWLSWLSYLEDPRIRFFYDPQMPALKDLPAVDTGKDNKKHPSNFQHIFYTDGSAITSPTKEGHLNAGMGIVYFINKDGNLQKQQEWSISLGNHTAQFAEIAAFEFALKKCLPLGGNILVVTDSNYVAKAYNEELDVWASNGFVNNRKKPLKHISKWKSVADLKRLRPDVVVTHEPGHQKLDSSPHAYGNNLADQLATQASFKVH

SEQ ID NO: 8015 - protein, 662 aa, Feline foamy virus
VPWILKKPLELTIKLDLEEQQGTLLNNSILSKKGKEELKQLFEKYSALWQSWENQVGHRRIRPHKIATGTVKPTPQKQYHINPKAKPDIQIVINDLLKQGVLIQKESTMNTPVYPVPKPNGRWRMVLDYRAVNKVTPLIAVQNQHSYGILGSLFKGRYKTTIDLSNGFWAHPIVPEDYWITAFTWQGKQYCWTVLPQGFLNSPGLFTGDVVDLLQGIPNVEVYVDDVYISHDSEKEHLEYLDILFNRLKEAGYIISLKKSNIANSIVDFLGFQITNEGRGLTDTFKEKLENITAPTTLKQLQSILGLLNFARNFIPDFTELIAPLYALIPKSTKNYVPWQIEHSTTLETLITKLNGAEYLQGRKGDKTLIMKVNASYTTGYIRYYNEGEKKPISYVSIVFSKTELKFTELEKLLTTVHKGLLKALDLSMGQNIHVYSPIVSMQNIQKTPQTAKKALASRWLSWLSYLEDPRIRFFYDPQMPALKDLPAVDTGKDNKKHPSNFQHIFYTDGSAITSPTKEGHLNAGMGIVYFINKDGNLQKQQEWSISLGNHTAQFAEIAAFEFALKKCLPLGGNILVVTDSNYVAKAYNEELDVWASNGFVNNRKKPLKHISKWKSVADLKRLRPDVVVTHEPGHQKLDSSPHAYGNNLADQLATQASFKVH

SEQ ID NO: 8016 - protein, 662 aa, synthetic construct
VPWILKKPLELTIKLDLEEQQGTLLNNSILSKKGKEELKQLFEKYSALWQSWENQVGHRRIRPHKIATGTVKPTPQKQYHINPKAKPDIQIVINDLLKQGVLIQKESTMNTPVYPVPKPNGRWRMVLDYRAVNKVTPLIAVQNQHSYGILGSLFKGRYKTTIDLSNGFWAHPIVPEDYWITAFTWQGKQYCWTVLPQGFLNSPGLFNGDVVDLLQGIPNVEVYVDDVYISHDSEKEHLEYLDILFNRLKEAGYIISLKKSNIANSIVDFLGFQITNEGRGLTDTFKEKLENITAPTTLKQLQSILGLLNFARNFIPDFTELIAPLYALIPKSPKNYVPWQIEHSTTLETLITKLNGAEYLQGRKGDKTLIMKVNASYTTGYIRYYNEGEKKPISYVSIVFSKTELKFTELEKLLTTVHKGLLKALDLSMGQNIHVYSPIVSMQNIQKTPQTAKKALASRWLSWLSYLEDPRIRFFYDPQMPALKDLPAVDTGKDNKKHPSNFQHIFYTDGSAITSPTKEGHLNAGMGIVYFINKDGNLQKQQEWSISLGNHTAQFAEIAAFEFALKKCLPLGGNILVVTDSNYVAKAYNEELDVWASNGFVNNRKKPLKHISKWKSVADLKRLRPDVVVTHEPGHQKLDSSPHAYGNNLADQLATQASFKVH

SEQ ID NO: 8017 - protein, 662 aa, synthetic construct
VPWILKKPLELTIKLDLEEQQGTLLNNSILSKKGKEELKQLFEKYSALWQSWENQVGHRRIRPHKIATGTVKPTPQKQYHINPKAKPDIQIVINDLLKQGVLIQKESTMNTPVYPVPKPNGRWRMVLDYRAVNKVTPLIAVQNQHSYGILGSLFKGRYKTTIDLSNGFWAHPIVPEDYWITAFTWQGKQYCWTVLPQGFLNSPGLFNGDVVDLLQGIPNVEVYVDDVYISHDSEKEHLEYLDILFNRLKEAGYIISLKKSNIANSIVDFLGFQITNEGRGLTDTFKEKLENITAPTTLKQLQSILGKLNFARNFIPDFTELIAPLYALIPKSPKNYVPWQIEHSTTLETLITKLNGAEYLQGRKGDKTLIMKVNASYTTGYIRYYNEGEKKPISYVSIVFSKTELKFTELEKLLTTVHKGLLKALDLSMGQNIHVYSPIVSMQNIQKTPQTAKKALASRWLSWLSYLEDPRIRFFYDPQMPALKDLPAVDTGKDNKKHPSNFQHIFYTDGSAITSPTKEGHLNAGMGIVYFINKDGNLQKQQEWSISLGNHTAQFAEIAAFEFALKKCLPLGGNILVVTDSNYVAKAYNEELDVWASNGFVNNRKKPLKHISKWKSVADLKRLRPDVVVTHEPGHQKLDSSPHAYGNNLADQLATQASFKVH

SEQ ID NO: 8018 - protein, 670 aa, Feline leukemia virus
TLQLEEEYRLFEPESTQKQEMDIWLKNFPQAWAETGGMGTAHCQAPVLIQLKATATPISIRQYPMPHEAYQGIKPHIRRMLDQGILKPCQSPWNTPLLPVKKPGTEDYRPVQDLREVNKRVEDIHPTVPNPYNLLSTLPPSHPWYTVLDLKDAFFCLRLHSESQLLFAFEWRDPEIGLSGQLTWTRLPQGFKNSPTLFDEALHSDLADFRVRYPALVLLQYVDDLLLAAATRTECLEGTKALLETLGNKGYRASAKKAQICLQEVTYLGYSLKDGQRWLTKARKEAILSIPVPKNSRQVREFLGTAGYCRLWIPGFAELAAPLYPLTRPGTLFQWGTEQQLAFEDIKKALLSSPALGLPDITKPFELFIDENSGFAKGVLVQKLGPWKRPVAYLSKKLDTVASGWPPCLRMVAAIAILVKDAGKLTLGQPLTILTSHPVEALVRQPPNKWLSNARMTHYQAMLLDAERVHFGPTVSLNPATLLPLPSGGNHHDCLQILAETHGTRPDLTDQPLPDADLTWYTDGSSFIRNGEREAGAAVTTESEVIWAAPLPPGTSAQRAELIALTQALKMAEGKKLTVYTDSRYAFATTHVHGEIYRRRGLLTSEGKEIKNKNEILALLEALFLPKRLSIIHCPGHQKGDSPQAKGNRLADDTAKKAATETHSSLTVLP

SEQ ID NO: 8019 - protein, 670 aa, synthetic construct
TLQLEEEYRLFEPESTQKQEMDIWLKNFPQAWAETGGMGTAHCQAPVLIQLKATATPISIRQYPMPHEAYQGIKPHIRRMLDQGILKPCQSPWNTPLLPVKKPGTEDYRPVQDLREVNKRVEDIHPTVPNPYNLLSTLPPSHPWYTVLDLKDAFFCLRLHSESQLLFAFEWRDPEIGLSGQLTWTRLPQGFKNSPTLFNEALHSDLADFRVRYPALVLLQYVDDLLLAAATRTECLEGTKALLETLGNKGYRASAKKAQICLQEVTYLGYSLKDGQRWLTKARKEAILSIPVPKNSRQVREFLGTAGYCRLWIPGFAELAAPLYPLTRPGTLFQWGTEQQLAFEDIKKALLSSPALGLPDITKPFELFIDENSGFAKGVLVQKLGPWKRPVAYLSKKLDTVASGWPPCLRMVAAIAILVKDAGKLTLGQPLTILTSHPVEALVRQPPNKWLSNARMTHYQAMLLDAERVHFGPTVSLNPATLLPLPSGGNHHDCLQILAETHGTRPDLTDQPLPDADLTWYTDGSSFIRNGEREAGAAVTTESEVIWAAPLPPGTSAQRAELIALTQALKMAEGKKLTVYTDSRYAFATTHVHGEIYRRRGWLTSEGKEIKNKNEILALLEALFLPKRLSIIHCPGHQKGDSPQAKGNRLADDTAKKAATETHSSLTVLP

SEQ ID NO: 8020 - protein, 670 aa, synthetic construct
TLQLEEEYRLFEPESTQKQEMDIWLKNFPQAWAETGGMGTAHCQAPVLIQLKATATPISIRQYPMPHEAYQGIKPHIRRMLDQGILKPCQSPWNTPLLPVKKPGTEDYRPVQDLREVNKRVEDIHPTVPNPYNLLSTLPPSHPWYTVLDLKDAFFCLRLHSESQLLFAFEWRDPEIGLSGQLTWTRLPQGFKNSPTLFNEALHSDLADFRVRYPALVLLQYVDDLLLAAATRTECLEGTKALLETLGNKGYRASAKKAQICLQEVTYLGYSLKDGQRWLTKARKEAILSIPVPKNSRQVREFLGKAGYCRLFIPGFAELAAPLYPLTRPGTLFQWGTEQQLAFEDIKKALLSSPALGLPDITKPFELFIDENSGFAKGVLVQKLGPWKRPVAYLSKKLDTVASGWPPCLRMVAAIAILVKDAGKLTLGQPLTILTSHPVEALVRQPPNKWLSNARMTHYQAMLLDAERVHFGPTVSLNPATLLPLPSGGNHHDCLQILAETHGTRPDLTDQPLPDADLTWYTDGSSFIRNGEREAGAAVTTESEVIWAAPLPPGTSAQRAELIALTQALKMAEGKKLTVYTDSRYAFATTHVHGEIYRRRGWLTSEGKEIKNKNEILALLEALFLPKRLSIIHCPGHQKGDSPQAKGNRLADDTAKKAATETHSSLTVLP

SEQ ID NO: 8021 - protein, 751 aa, unidentified
MNPLQLLQPLPAEIKGTKLLAHWNSGATITCIPESFLEDEQPIKKTLIKTIHGEKQQNVYYVTFKVKGRKVEAEVIASPYEYILLSPTDVPWLTQQPLQLTILVPLQEYQEKILSKTALPEDQKQQLKTLFVKYDNLWQHWENQVGHRKIRPHNIATGDYPPRPQKQYPINPKAKPSIQIVIDDLLKQGVLTPQNSTMNTPVYPVPKPDGRWRMVLDYREVNKTIPLTAAQNQHSAGILATIVRQKYKTTLDLANGFWAHPITPESYWLTAFTWQGKQYCWTRLPQGFLNSPALFTADVVDLLKEIPNVQVYVDDIYLSHDDPKEHVQQLEKVFQILLQAGYVVSLKKSEIGQKTVEFLGFNITKEGRGLTDTFKTKLLNITPPKDLKQLQSILGLLNFARNFIPNFAELVQPLYNLIASAKGKYIEWSEENTKQLNMVIEALNTASNLEERLPEQRLVIKVNTSPSAGYVRYYNETGKKPIMYLNYVFSKAELKFSMLEKLLTTMHKALIKAMDLAMGQEILVYSPIVSMTKIQKTPLPERKALPIRWITWMTYLEDPRIQFHYDKTLPELKHIPDVYTSSQSPVKHPSQYEGVFYTDGSAIKSPDPTKSNNAGMGIVHATYKPEYQVLNQWSIPLGNHTAQMAEIAAVEFACKKALKIPGPVLVITDSFYVAESANKELPYWKSNGFVNNKKKPLKHISKWKSIAECLSMKPDITIQHEKGISLQIPVFILKGNALADKLATQGSYVVN

SEQ ID NO: 8022 - protein, 751 aa, synthetic construct
MNPLQLLQPLPAEIKGTKLLAHWNSGATITCIPESFLEDEQPIKKTLIKTIHGEKQQNVYYVTFKVKGRKVEAEVIASPYEYILLSPTDVPWLTQQPLQLTILVPLQEYQEKILSKTALPEDQKQQLKTLFVKYDNLWQHWENQVGHRKIRPHNIATGDYPPRPQKQYPINPKAKPSIQIVIDDLLKQGVLTPQNSTMNTPVYPVPKPDGRWRMVLDYREVNKTIPLTAAQNQHSAGILATIVRQKYKTTLDLANGFWAHPITPESYWLTAFTWQGKQYCWTRLPQGFLNSPALFNADVVDLLKEIPNVQVYVDDIYLSHDDPKEHVQQLEKVFQILLQAGYVVSLKKSEIGQKTVEFLGFNITKEGRGLTDTFKTKLLNITPPKDLKQLQSILGLLNFARNFIPNFAELVQPLYNLIAPAKGKYIEWSEENTKQLNMVIEALNTASNLEERLPEQRLVIKVNTSPSAGYVRYYNETGKKPIMYLNYVFSKAELKFSMLEKLLTTMHKALIKAMDLAMGQEILVYSPIVSMTKIQKTPLPERKALPIRWITWMTYLEDPRIQFHYDKTLPELKHIPDVYTSSQSPVKHPSQYEGVFYTDGSAIKSPDPTKSNNAGMGIVHATYKPEYQVLNQWSIPLGNHTAQMAEIAAVEFACKKALKIPGPVLVITDSFYVAESANKELPYWKSNGFVNNKKKPLKHISKWKSIAECLSMKPDITIQHEKGISLQIPVFILKGNALADKLATQGSYVVN

SEQ ID NO: 8023 - protein, 751 aa, synthetic construct
MNPLQLLQPLPAEIKGTKLLAHWNSGATITCIPESFLEDEQPIKKTLIKTIHGEKQQNVYYVTFKVKGRKVEAEVIASPYEYILLSPTDVPWLTQQPLQLTILVPLQEYQEKILSKTALPEDQKQQLKTLFVKYDNLWQHWENQVGHRKIRPHNIATGDYPPRPQKQYPINPKAKPSIQIVIDDLLKQGVLTPQNSTMNTPVYPVPKPDGRWRMVLDYREVNKTIPLTAAQNQHSAGILATIVRQKYKTTLDLANGFWAHPITPESYWLTAFTWQGKQYCWTRLPQGFLNSPALFNADVVDLLKEIPNVQVYVDDIYLSHDDPKEHVQQLEKVFQILLQAGYVVSLKKSEIGQKTVEFLGFNITKEGRGLTDTFKTKLLNITPPKDLKQLQSILGKLNFARNFIPNFAELVQPLYNLIAPAKGKYIEWSEENTKQLNMVIEALNTASNLEERLPEQRLVIKVNTSPSAGYVRYYNETGKKPIMYLNYVFSKAELKFSMLEKLLTTMHKALIKAMDLAMGQEILVYSPIVSMTKIQKTPLPERKALPIRWITWMTYLEDPRIQFHYDKTLPELKHIPDVYTSSQSPVKHPSQYEGVFYTDGSAIKSPDPTKSNNAGMGIVHATYKPEYQVLNQWSIPLGNHTAQMAEIAAVEFACKKALKIPGPVLVITDSFYVAESANKELPYWKSNGFVNNKKKPLKHISKWKSIAECLSMKPDITIQHEKGISLQIPVFILKGNALADKLATQGSYVVN

SEQ ID NO: 8024 - protein, 662 aa, unidentified
VPWLTQQPLQLTILVPLQEYQEKILSKTALPEDQKQQLKTLFVKYDNLWQHWENQVGHRKIRPHNIATGDYPPRPQKQYPINPKAKPSIQIVIDDLLKQGVLTPQNSTMNTPVYPVPKPDGRWRMVLDYREVNKTIPLTAAQNQHSAGILATIVRQKYKTTLDLANGFWAHPITPESYWLTAFTWQGKQYCWTRLPQGFLNSPALFTADVVDLLKEIPNVQVYVDDIYLSHDDPKEHVQQLEKVFQILLQAGYVVSLKKSEIGQKTVEFLGFNITKEGRGLTDTFKTKLLNITPPKDLKQLQSILGLLNFARNFIPNFAELVQPLYNLIASAKGKYIEWSEENTKQLNMVIEALNTASNLEERLPEQRLVIKVNTSPSAGYVRYYNETGKKPIMYLNYVFSKAELKFSMLEKLLTTMHKALIKAMDLAMGQEILVYSPIVSMTKIQKTPLPERKALPIRWITWMTYLEDPRIQFHYDKTLPELKHIPDVYTSSQSPVKHPSQYEGVFYTDGSAIKSPDPTKSNNAGMGIVHATYKPEYQVLNQWSIPLGNHTAQMAEIAAVEFACKKALKIPGPVLVITDSFYVAESANKELPYWKSNGFVNNKKKPLKHISKWKSIAECLSMKPDITIQHEKGISLQIPVFILKGNALADKLATQGSYVVN

SEQ ID NO: 8025 - protein, 662 aa, synthetic construct
VPWLTQQPLQLTILVPLQEYQEKILSKTALPEDQKQQLKTLFVKYDNLWQHWENQVGHRKIRPHNIATGDYPPRPQKQYPINPKAKPSIQIVIDDLLKQGVLTPQNSTMNTPVYPVPKPDGRWRMVLDYREVNKTIPLTAAQNQHSAGILATIVRQKYKTTLDLANGFWAHPITPESYWLTAFTWQGKQYCWTRLPQGFLNSPALFNADVVDLLKEIPNVQVYVDDIYLSHDDPKEHVQQLEKVFQILLQAGYVVSLKKSEIGQKTVEFLGFNITKEGRGLTDTFKTKLLNITPPKDLKQLQSILGLLNFARNFIPNFAELVQPLYNLIAPAKGKYIEWSEENTKQLNMVIEALNTASNLEERLPEQRLVIKVNTSPSAGYVRYYNETGKKPIMYLNYVFSKAELKFSMLEKLLTTMHKALIKAMDLAMGQEILVYSPIVSMTKIQKTPLPERKALPIRWITWMTYLEDPRIQFHYDKTLPELKHIPDVYTSSQSPVKHPSQYEGVFYTDGSAIKSPDPTKSNNAGMGIVHATYKPEYQVLNQWSIPLGNHTAQMAEIAAVEFACKKALKIPGPVLVITDSFYVAESANKELPYWKSNGFVNNKKKPLKHISKWKSIAECLSMKPDITIQHEKGISLQIPVFILKGNALADKLATQGSYVVN

SEQ ID NO: 8026 - protein, 662 aa, synthetic construct
VPWLTQQPLQLTILVPLQEYQEKILSKTALPEDQKQQLKTLFVKYDNLWQHWENQVGHRKIRPHNIATGDYPPRPQKQYPINPKAKPSIQIVIDDLLKQGVLTPQNSTMNTPVYPVPKPDGRWRMVLDYREVNKTIPLTAAQNQHSAGILATIVRQKYKTTLDLANGFWAHPITPESYWLTAFTWQGKQYCWTRLPQGFLNSPALFNADVVDLLKEIPNVQVYVDDIYLSHDDPKEHVQQLEKVFQILLQAGYVVSLKKSEIGQKTVEFLGFNITKEGRGLTDTFKTKLLNITPPKDLKQLQSILGKLNFARNFIPNFAELVQPLYNLIAPAKGKYIEWSEENTKQLNMVIEALNTASNLEERLPEQRLVIKVNTSPSAGYVRYYNETGKKPIMYLNYVFSKAELKFSMLEKLLTTMHKALIKAMDLAMGQEILVYSPIVSMTKIQKTPLPERKALPIRWITWMTYLEDPRIQFHYDKTLPELKHIPDVYTSSQSPVKHPSQYEGVFYTDGSAIKSPDPTKSNNAGMGIVHATYKPEYQVLNQWSIPLGNHTAQMAEIAAVEFACKKALKIPGPVLVITDSFYVAESANKELPYWKSNGFVNNKKKPLKHISKWKSIAECLSMKPDITIQHEKGISLQIPVFILKGNALADKLATQGSYVVN

SEQ ID NO: 8027 - protein, 669 aa, Gibbon ape leukemia virus
VLNLEEEYRLHEKPVPSSIDPSWLQLFPTVWAERAGMGLANQVPPVVVELRSGASPVAVRQYPMSKEAREGIRPHIQKFLDLGVLVPCRSPWNTPLLPVKKPGTNDYRPVQDLREINKRVQDIHPTVPNPYNLLSSLPPSYTWYSVLDLKDAFFCLRLHPNSQPLFAFEWKDPEKGNTGQLTWTRLPQGFKNSPTLFDEALHRDLAPFRALNPQVVLLQYVDDLLVAAPTYEDCKKGTQKLLQELSKLGYRVSAKKAQLCQREVTYLGYLLKEGKRWLTPARKATVMKIPVPTTPRQVREFLGTAGFCRLWIPGFASLAAPLYPLTKESIPFIWTEEHQQAFDHIKKALLSAPALALPDLTKPFTLYIDERAGVARGVLTQTLGPWRRPVAYLSKKLDPVASGWPTCLKAVAAVALLLKDADKLTLGQNVTVIASHSLESIVRQPPDRWMTNARMTHYQSLLLNERVSFAPPAVLNPATLLPVESEATPVHRCSEILAEETGTRRDLEDQPLPGVPTWYTDGSSFITEGKRRAGAPIVDGKRTVWASSLPEGTSAQKAELVALTQALRLAEGKNINIYTDSRYAFATAHIHGAIYKQRGLLTSAGKDIKNKEEILALLEAIHLPRRVAIIHCPGHQRGSNPVATGNRRADEAAKQAALSTRVLAGTTKP

SEQ ID NO: 8028 - protein, 669 aa, synthetic construct
VLNLEEEYRLHEKPVPSSIDPSWLQLFPTVWAERAGMGLANQVPPVVVELRSGASPVAVRQYPMSKEAREGIRPHIQKFLDLGVLVPCRSPWNTPLLPVKKPGTNDYRPVQDLREINKRVQDIHPTVPNPYNLLSSLPPSYTWYSVLDLKDAFFCLRLHPNSQPLFAFEWKDPEKGNTGQLTWTRLPQGFKNSPTLFNEALHRDLAPFRALNPQVVLLQYVDDLLVAAPTYEDCKKGTQKLLQELSKLGYRVSAKKAQLCQREVTYLGYLLKEGKRWLTPARKATVMKIPVPTTPRQVREFLGTAGFCRLWIPGFASLAAPLYPLTKPSIPFIWTEEHQQAFDHIKKALLSAPALALPDLTKPFTLYIDERAGVARGVLTQTLGPWRRPVAYLSKKLDPVASGWPTCLKAVAAVALLLKDADKLTLGQNVTVIASHSLESIVRQPPDRWMTNARMTHYQSLLLNERVSFAPPAVLNPATLLPVESEATPVHRCSEILAEETGTRRDLEDQPLPGVPTWYTDGSSFITEGKRRAGAPIVDGKRTVWASSLPEGTSAQKAELVALTQALRLAEGKNINIYTDSRYAFATAHIHGAIYKQRGWLTSAGKDIKNKEEILALLEAIHLPRRVAIIHCPGHQRGSNPVATGNRRADEAAKQAALSTRVLAGTTKP

SEQ ID NO: 8029 - protein, 669 aa, synthetic construct
VLNLEEEYRLHEKPVPSSIDPSWLQLFPTVWAERAGMGLANQVPPVVVELRSGASPVAVRQYPMSKEAREGIRPHIQKFLDLGVLVPCRSPWNTPLLPVKKPGTNDYRPVQDLREINKRVQDIHPTVPNPYNLLSSLPPSYTWYSVLDLKDAFFCLRLHPNSQPLFAFEWKDPEKGNTGQLTWTRLPQGFKNSPTLFNEALHRDLAPFRALNPQVVLLQYVDDLLVAAPTYEDCKKGTQKLLQELSKLGYRVSAKKAQLCQREVTYLGYLLKEGKRWLTPARKATVMKIPVPTTPRQVREFLGKAGFCRLFIPGFASLAAPLYPLTKPSIPFIWTEEHQQAFDHIKKALLSAPALALPDLTKPFTLYIDERAGVARGVLTQTLGPWRRPVAYLSKKLDPVASGWPTCLKAVAAVALLLKDADKLTLGQNVTVIASHSLESIVRQPPDRWMTNARMTHYQSLLLNERVSFAPPAVLNPATLLPVESEATPVHRCSEILAEETGTRRDLEDQPLPGVPTWYTDGSSFITEGKRRAGAPIVDGKRTVWASSLPEGTSAQKAELVALTQALRLAEGKNINIYTDSRYAFATAHIHGAIYKQRGWLTSAGKDIKNKEEILALLEAIHLPRRVAIIHCPGHQRGSNPVATGNRRADEAAKQAALSTRVLAGTTKP

SEQ ID NO: 8030 - protein, 588 aa, unidentified
AVLGLEHLPRPPQISQFPLNPERLQALQHLVRKALEAGHIEPYTGPGNNPVFPVKKANGTWRFIHDLRATNSLTIDLSSSSPGPPDLSSLPTTLAHLQTIDLRDAFFQIPLPKQFQPYFAFTVPQQCNYGPGTRYAWKVLPQGFKNSPTLFEMQLAHILQPIRQAFPQCTILQYMDDILLASPSHEDLLLLSEATMASLISHGLPVSENKTQQTPGTIKFLGQIISPNHLTYDAVPTVPIRSRWALPELQALLGEIQWVSKGTPTLRQPLHSLYCALQRHTDPRDQIYLNPSQVQSLVQLRQALSQNCRSRLVQTLPLLGAIMLTLTGTTTVVFQSKEQWPLVWLHAPLPHTSQCPWGQLLASAVLLLDKYTLQSYGLLCQTIHHNISTQTFNQFIQTSDHPSVPILLHHSHRFKNLGAQTGELWNTFLKTAAPLAPVKALMPVFTLSPVIINTAPCLFSDGSTSRAAYILWDKQILSQRSFPLPPPHKSAQRAELLGLLHGLSSARSWRCLNIFLDSKYLYHYLRTLALGTFQGRSSQAPFQALLPRLLSRKVVYLHHVRSHTNLPDPISRLNALTDALLITPVLQL

SEQ ID NO: 8031 - protein, 588 aa, synthetic construct
AVLGLEHLPRPPQISQFPLNPERLQALQHLVRKALEAGHIEPYTGPGNNPVFPVKKANGTWRFIHDLRATNSLTIDLSSSSPGPPDLSSLPTTLAHLQTIDLRDAFFQIPLPKQFQPYFAFTVPQQCNYGPGTRYAWKVLPQGFKNSPTLFQMQLAHILQPIRQAFPQCTILQYMDDILLASPSHEDLLLLSEATMASLISHGLPVSENKTQQTPGTIKFLGQIISPNHLTYDAVPTVPIRSRWALPELQALLGEIQWVSKGTPTLRQPLHSLYCALQPHTDPRDQIYLNPSQVQSLVQLRQALSQNCRSRLVQTLPLLGAIMLTLTGTTTVVFQSKEQWPLVWLHAPLPHTSQCPWGQLLASAVLLLDKYTLQSYGLLCQTIHHNISTQTFNQFIQTSDHPSVPILLHHSHRFKNLGAQTGELWNTFLKTAAPLAPVKALMPVFTLSPVIINTAPCLFSDGSTSRAAYILWDKQILSQRSFPLPPPHKSAQRAELLGLLHGLSSARSWRCLNIFLDSKYLYHYLRTLALGTFQGRSSQAPFQALLPRLLSRKVVYLHHVRSHTNLPDPISRLNALTDALLITPVLQL

SEQ ID NO: 8032 - protein, 588 aa, synthetic construct
AVLGLEHLPRPPQISQFPLNPERLQALQHLVRKALEAGHIEPYTGPGNNPVFPVKKANGTWRFIHDLRATNSLTIDLSSSSPGPPDLSSPPTTLAHLQTIDLRDAFFQIPLPKQFQPYFAFTVPQQCNYGPGTRYAWKVLPQGFKNSPTLFQMQLAHILQPIRQAFPQCTILQYMDDILLASPSHEDLLLLSEATMASLISHGLPVSENKTQQTPGTIKFLGQIISPNHLTYDAVPTVPIRSRWALPELQALLGEIQWVSKGTPTLRQPLHSLYCALQPHTDPRDQIYLNPSQVQSLVQLRQALSQNCRSRLVQTLPLLGAIMLTLTGTTTVVFQSKEQWPLVWLHAPLPHTSQCPWGQLLASAVLLLDKYTLQSYGLLCQTIHHNISTQTFNQFIQTSDHPSVPILLHHSHRFKNLGAQTGELWNTFLKTAAPLAPVKALMPVFTLSPVIINTAPCLFSDGSTSRAAYILWDKQILSQRSFPLPPPHKSAQRAELLGLLHGLSSARSWRCLNIFLDSKYLYHYLRTLALGTFQGRSSQAPFQALLPRLLSRKVVYLHHVRSHTNLPDPISRLNALTDALLITPVLQL

SEQ ID NO: 8033 - protein, 588 aa, unidentified
AVLGLEHLPRPPEISQFPLNPERLQALQHLVRKALEAGHIEPYTGPGNNPVFPVKKANGTWRFIHDLRATNSLTIDLSSSSPGPPDLSSLPTTLAHLQTIDLKDAFFQIPLPKQFQPYFAFTVPQQCNYGPGTRYAWRVLPQGFKNSPTLFEMQLAHILQPIRQAFPQCTILQYMDDILLASPSHADLQLLSEATMASLISHGLPVSENKTQQTPGTIKFLGQIISPNHLTYDAVPKVPIRSRWALPELQALLGEIQWVSKGTPTLRQPLHSLYCALQRHTDPRDQIYLNPSQVQSLVQLRQALSQNCRSRLVQTLPLLGAIMLTLTGTTTVVFQSKQQWPLVWLHAPLPHTSQCPWGQLLASAVLLLDKYTLQSYGLLCQTIHHNISTQTFNQFIQTSDHPSVPILLHHSHRFKNLGAQTGELWNTFLKTTAPLAPVKALMPVFTLSPVIINTAPCLFSDGSTSQAAYILWDKHILSQRSFPLPPPHKSAQRAELLGLLHGLSSARSWRCLNIFLDSKYLYHYLRTLALGTFQGRSSQAPFQALLPRLLSRKVVYLHHVRSHTNLPDPISRLNALTDALLITPVLQL

SEQ ID NO: 8034 - protein, 588 aa, synthetic construct
AVLGLEHLPRPPEISQFPLNPERLQALQHLVRKALEAGHIEPYTGPGNNPVFPVKKANGTWRFIHDLRATNSLTIDLSSSSPGPPDLSSLPTTLAHLQTIDLKDAFFQIPLPKQFQPYFAFTVPQQCNYGPGTRYAWRVLPQGFKNSPTLFQMQLAHILQPIRQAFPQCTILQYMDDILLASPSHADLQLLSEATMASLISHGLPVSENKTQQTPGTIKFLGQIISPNHLTYDAVPKVPIRSRWALPELQALLGEIQWVSKGTPTLRQPLHSLYCALQPHTDPRDQIYLNPSQVQSLVQLRQALSQNCRSRLVQTLPLLGAIMLTLTGTTTVVFQSKQQWPLVWLHAPLPHTSQCPWGQLLASAVLLLDKYTLQSYGLLCQTIHHNISTQTFNQFIQTSDHPSVPILLHHSHRFKNLGAQTGELWNTFLKTTAPLAPVKALMPVFTLSPVIINTAPCLFSDGSTSQAAYILWDKHILSQRSFPLPPPHKSAQRAELLGLLHGLSSARSWRCLNIFLDSKYLYHYLRTLALGTFQGRSSQAPFQALLPRLLSRKVVYLHHVRSHTNLPDPISRLNALTDALLITPVLQL

SEQ ID NO: 8035 - protein, 583 aa, unidentified
GLEHLPRPPEISQFPLNPERLQALQHLVRKALEAGHIEPYTGPGNNPVFPVKKANGTWRFIHDLRATNSLTVDLSSSSPGPPDLSSLPTTLAHLQTIDLKDAFFQIPLPKQFQPYFAFTVPQQCNYGPGTRYAWKVLPQGFKNSPTLFEMQLASILQPIRQAFPQCVILQYMDDILLASPSPEDLQQLSEATMASLISHGLPVSQDKTQQTPGTIKFLGQIISPNHITYDAVPTVPIRSRWALPELQALLGEIQWVSKGTPTLRQPLHSLYCALQGHTDPRDQIYLNPSQVQSLMQLQQALSQNCRSRLAQTLPLLGAIMLTLTGTTTVVFQSKQQWPLVWLHAPLPHTSQCPWGQLLASAVLLLDKYTLQSYGLLCQTIHHNISIQTFNQFIQTSDHPSVPILLHHSHRFKNLGAQTGELWNTFLKTAAPLAPVKALTPVFTLSPIIINTAPCLFSDGSTSQAAYILWDKHILSQRSFPLPPPHKSAQQAELLGLLHGLSSARSWHCLNIFLDSKYLYHYLRTLALGTFQGKSSQAPFQALLPRLLAHKVIYLHHVRSHTNLPDPISKLNALTDALLITPIL

SEQ ID NO: 8036 - protein, 583 aa, synthetic construct
GLEHLPRPPEISQFPLNPERLQALQHLVRKALEAGHIEPYTGPGNNPVFPVKKANGTWRFIHDLRATNSLTVDLSSSSPGPPDLSSLPTTLAHLQTIDLKDAFFQIPLPKQFQPYFAFTVPQQCNYGPGTRYAWKVLPQGFKNSPTLFQMQLASILQPIRQAFPQCVILQYMDDILLASPSPEDLQQLSEATMASLISHGLPVSQDKTQQTPGTIKFLGQIISPNHITYDAVPTVPIRSRWALPELQALLGEIQWVSKGTPTLRQPLHSLYCALQGHTDPRDQIYLNPSQVQSLMQLQQALSQNCRSRLAQTLPLLGAIMLTLTGTTTVVFQSKQQWPLVWLHAPLPHTSQCPWGQLLASAVLLLDKYTLQSYGLLCQTIHHNISIQTFNQFIQTSDHPSVPILLHHSHRFKNLGAQTGELWNTFLKTAAPLAPVKALTPVFTLSPIIINTAPCLFSDGSTSQAAYILWDKHILSQRSFPLPPPHKSAQQAELLGLLHGLSSARSWHCLNIFLDSKYLYHYLRTLAWGTFQGKSSQAPFQALLPRLLAHKVIYLHHVRSHTNLPDPISKLNALTDALLITPIL

SEQ ID NO: 8037 - protein, 583 aa, synthetic construct
GLEHLPRPPEISQFPLNPERLQALQHLVRKALEAGHIEPYTGPGNNPVFPVKKANGTWRFIHDLRATNSLTVDLSSSSPGPPDLSSPPTTLAHLQTIDLKDAFFQIPLPKQFQPYFAFTVPQQCNYGPGTRYAWKVLPQGFKNSPTLFQMQLASILQPIRQAFPQCVILQYMDDILLASPSPEDLQQLSEATMASLISHGLPVSQDKTQQTPGTIKFLGQIISPNHITYDAVPTVPIRSRWALPELQALLGEIQWVSKGTPTLRQPLHSLYCALQGHTDPRDQIYLNPSQVQSLMQLQQALSQNCRSRLAQTLPLLGAIMLTLTGTTTVVFQSKQQWPLVWLHAPLPHTSQCPWGQLLASAVLLLDKYTLQSYGLLCQTIHHNISIQTFNQFIQTSDHPSVPILLHHSHRFKNLGAQTGELWNTFLKTAAPLAPVKALTPVFTLSPIIINTAPCLFSDGSTSQAAYILWDKHILSQRSFPLPPPHKSAQQAELLGLLHGLSSARSWHCLNIFLDSKYLYHYLRTLAWGTFQGKSSQAPFQALLPRLLAHKVIYLHHVRSHTNLPDPISKLNALTDALLITPIL

SEQ ID NO: 8038 - protein, 584 aa, unidentified
GLEHLPPPPEVSQFPLNPERLQALTDLVSRALEAKHIEPYQGPGNNPIFPVKKPNGKWRFIHDLRATNSVTRDLASPSPGPPDLTSLPQGLPHLRTIDLTDAFFQIPLPTIFQPYFAFTLPQPNNYGPGTRYSWRVLPQGFKNSPTLFEQQLSHILTPVRKTFPNSLIIQYMDDILLASPAPGELAALTDKVTNALTKEGLPLSPEKTQATPGPIHFLGQVISQDCITYETLPSINVKSTWSLAELQSMLGELQWVSKGTPVLRSSLHQLYLALRGHRDPRDTIKLTSIQVQALRTIQKALTLNCRSRLVNQLPILALIMLRPTGTTAVLFQTKQKWPLVWLHTPHPATSLRPWGQLLANAVIILDKYSLQHYGQVCKSFHHNISNQALTYYLHTSDQSSVAILLQHSHRFHNLGAQPSGPWRSLLQMPQIFQNIDVLRPPFTISPVVINHAPCLFSDGSASKAAFIIWDRQVIHQQVLSLPSTCSAQAGELFGLLAGLQKSQPWVALNIFLDSKFLIGHLRRMALGAFPGPSTQCELHTQLLPLLQGKTVYVHHVRSHTLLQDPISRLNEATDALMLAPLLPL

SEQ ID NO: 8039 - protein, 584 aa, synthetic construct
GLEHLPPPPEVSQFPLNPERLQALTDLVSRALEAKHIEPYQGPGNNPIFPVKKPNGKWRFIHDLRATNSVTRDLASPSPGPPDLTSLPQGLPHLRTIDLTDAFFQIPLPTIFQPYFAFTLPQPNNYGPGTRYSWRVLPQGFKNSPTLFQQQLSHILTPVRKTFPNSLIIQYMDDILLASPAPGELAALTDKVTNALTKEGLPLSPEKTQATPGPIHFLGQVISQDCITYETLPSINVKSTWSLAELQSMLGELQWVSKGTPVLRSSLHQLYLALRGHRDPRDTIKLTSIQVQALRTIQKALTLNCRSRLVNQLPILALIMLRPTGTTAVLFQTKQKWPLVWLHTPHPATSLRPWGQLLANAVIILDKYSLQHYGQVCKSFHHNISNQALTYYLHTSDQSSVAILLQHSHRFHNLGAQPSGPWRSLLQMPQIFQNIDVLRPPFTISPVVINHAPCLFSDGSASKAAFIIWDRQVIHQQVLSLPSTCSAQAGELFGLLAGLQKSQPWVALNIFLDSKFLIGHLRRMAWGAFPGPSTQCELHTQLLPLLQGKTVYVHHVRSHTLLQDPISRLNEATDALMLAPLLPL

SEQ ID NO: 8040 - protein, 584 aa, synthetic construct
GLEHLPPPPEVSQFPLNPERLQALTDLVSRALEAKHIEPYQGPGNNPIFPVKKPNGKWRFIHDLRATNSVTRDLASPSPGPPDLTSPPQGLPHLRTIDLTDAFFQIPLPTIFQPYFAFTLPQPNNYGPGTRYSWRVLPQGFKNSPTLFQQQLSHILTPVRKTFPNSLIIQYMDDILLASPAPGELAALTDKVTNALTKEGLPLSPEKTQATPGPIHFLGQVISQDCITYETLPSINVKSTWSLAELQSMLGELQWVSKGTPVLRSSLHQLYLALRGHRDPRDTIKLTSIQVQALRTIQKALTLNCRSRLVNQLPILALIMLRPTGTTAVLFQTKQKWPLVWLHTPHPATSLRPWGQLLANAVIILDKYSLQHYGQVCKSFHHNISNQALTYYLHTSDQSSVAILLQHSHRFHNLGAQPSGPWRSLLQMPQIFQNIDVLRPPFTISPVVINHAPCLFSDGSASKAAFIIWDRQVIHQQVLSLPSTCSAQAGELFGLLAGLQKSQPWVALNIFLDSKFLIGHLRRMAWGAFPGPSTQCELHTQLLPLLQGKTVYVHHVRSHTLLQDPISRLNEATDALMLAPLLPL

SEQ ID NO: 8041 - protein, 584 aa, unidentified
GLEHLPPPPEVSQFPLNPERLQALTDLVSRALEAKHIEPYQGPGNNPIFPVKKPNGKWRFIHDLRATNSLTRDLASPSPGPPDLTSLPQDLPHLRTIDLTDAFFQIPLPAVFQPYFAFTLPQPNNHGPGTRYSWRVLPQGFKNSPTLFEQQLSHILAPVRKAFPNSLIIQYMDDILLASPALRELTALTDKVTNALTKEGLPMSLEKTQATPGSIHFLGQVISPDCITYETLPSIHVKSIWSLAELQSMLGELQWVSKGTPVLRSSLHQLYLALRGHRDPRDTIELTSTQVQALKTIQKALALNCRSRLVSQLPILALIILRPTGTTAVLFQTKQKWPLVWLHTPHPATSLRPWGQLLANAIITLDKYSLQHYGQICKSFHHNISNQALTYYLHTSDQSSVAILLQHSHRFHNLGAQPSGPWRSLLQVPQIFQNIDVLRPPFIISPVVIDHAPCLFSDGATSKAAFILWDKQVIHQQVLPLPSTCSAQAGELFGLLAGLQKSKPWPALNIFLDSKFLIGHLRRMALGAFLGPSTQCDLHARLFPLLQGKTVYVHHVRSHTLLQDPISRLNEATDALMLAPLLPL

SEQ ID NO: 8042 - protein, 584 aa, synthetic construct
GLEHLPPPPEVSQFPLNPERLQALTDLVSRALEAKHIEPYQGPGNNPIFPVKKPNGKWRFIHDLRATNSLTRDLASPSPGPPDLTSLPQDLPHLRTIDLTDAFFQIPLPAVFQPYFAFTLPQPNNHGPGTRYSWRVLPQGFKNSPTLFQQQLSHILAPVRKAFPNSLIIQYMDDILLASPALRELTALTDKVTNALTKEGLPMSLEKTQATPGSIHFLGQVISPDCITYETLPSIHVKSIWSLAELQSMLGELQWVSKGTPVLRSSLHQLYLALRGHRDPRDTIELTSTQVQALKTIQKALALNCRSRLVSQLPILALIILRPTGTTAVLFQTKQKWPLVWLHTPHPATSLRPWGQLLANAIITLDKYSLQHYGQICKSFHHNISNQALTYYLHTSDQSSVAILLQHSHRFHNLGAQPSGPWRSLLQVPQIFQNIDVLRPPFIISPVVIDHAPCLFSDGATSKAAFILWDKQVIHQQVLPLPSTCSAQAGELFGLLAGLQKSKPWPALNIFLDSKFLIGHLRRMAWGAFLGPSTQCDLHARLFPLLQGKTVYVHHVRSHTLLQDPISRLNEATDALMLAPLLPL

SEQ ID NO: 8043 - protein, 584 aa, synthetic construct
GLEHLPPPPEVSQFPLNPERLQALTDLVSRALEAKHIEPYQGPGNNPIFPVKKPNGKWRFIHDLRATNSLTRDLASPSPGPPDLTSPPQDLPHLRTIDLTDAFFQIPLPAVFQPYFAFTLPQPNNHGPGTRYSWRVLPQGFKNSPTLFQQQLSHILAPVRKAFPNSLIIQYMDDILLASPALRELTALTDKVTNALTKEGLPMSLEKTQATPGSIHFLGQVISPDCITYETLPSIHVKSIWSLAELQSMLGELQWVSKGTPVLRSSLHQLYLALRGHRDPRDTIELTSTQVQALKTIQKALALNCRSRLVSQLPILALIILRPTGTTAVLFQTKQKWPLVWLHTPHPATSLRPWGQLLANAIITLDKYSLQHYGQICKSFHHNISNQALTYYLHTSDQSSVAILLQHSHRFHNLGAQPSGPWRSLLQVPQIFQNIDVLRPPFIISPVVIDHAPCLFSDGATSKAAFILWDKQVIHQQVLPLPSTCSAQAGELFGLLAGLQKSKPWPALNIFLDSKFLIGHLRRMAWGAFLGPSTQCDLHARLFPLLQGKTVYVHHVRSHTLLQDPISRLNEATDALMLAPLLPL

SEQ ID NO: 8044 - protein, 584 aa, synthetic construct
HLPPPPQVDQFPLNLPERLQALNDLVSKALEAGHIEPYSGPGNNPVFPVKKPNGKWRFIHDLRATNAITTTLTSPSPGPPDLTSLPTALPHLQTIDLTDAFFQIPLPKQYQPYFAFTIPQPCNYGPGTRYAWTVLPQGFKNSPTLFQQQLAAVLNPMRKMFPTSTIVQYMDDILLASPTNEELQQLSQLTLQALTTHGLPISQEKTQQTPGQIRFLGQVISPNHITYESTPTIPIKSQWTLTELQVILGEIQWVSKGTPILRKHLQSLYSALHPYRDPRACITLTPQQLHALHAIQQALQHNCRGRLNPALPLLGLISLSTSGTTSVIFQPKQNWPLAWLHTPHPPTSLCPWGHLLACTILTLDKYTLQHYGQLCQSFHHNMSKQALCDFLRNSPHPSVGILIHHMGRFHNLGSQPSGPWKTLLHLPTLLQEPRLLRPIFTLSPVVLDTAPCLFSDGSPQKAAYVLWDQTILQQDITPLPSHETHSAQKGELLALICGLRAAKPWPSLNIFLDSKYLIKYLHSLAIGAFLGTSAHQTLQAALPPLLQGKTIYLHHVRSHTNLPDPISTFNEYTDSLILAPLVPL

SEQ ID NO: 8045 - protein, 581 aa, Jaagsiekte sheep retrovirus
PLGTSDSPVTHADPIDWKSEEPVWVDQWPLTQEKLSAAQQLVQEQLRLGHIEPSTSAWNSPIFVIKKKSGKWRLLQDLRKVNETMMHMGALQPGLPTPSAIPDKSYIIVIDLKDCFYTIPLAPQDCKRFAFSLPSVNFKEPMQRYQWRVLPQGMTNSPTLCQKFVATAIAPVRQRFPQLYLVHYMDDILLAHTDEHLLYQAFSILKQHLSLNGLVIADEKIQTHFPYNYLGFSLYPRVYNTQLVKLQTDHLKTLNDFQKLLGDINWIRPYLKLPTYTLQPLFDILKGDSDPASPRTLSLEGRTALQSIEEAIRQQQITYCDYQRSWGLYILPTPRAPTGVLYQDKPLRWIYLSATPTKHLLPYYELVAKIIAKGRHEAIQYFGMEPPFICVPYALEQQDWLFQFSDNWSIAFANYPGQITHHYPSDKLLQFASSHAFIFPKIVRRQPIPEATLIFTDGSSNGTAALIINHQTYYAQTSFSSAQVVELFAVHQALLTVPTSFNLFTDSSYVVGALQMIETVPIIGTTSPEVLNLFTLIQQVLHCRQHPCFFGHIRAHSTLPGALVQGNHTADVLTKQVFFQS

SEQ ID NO: 8046 - protein, 581 aa, synthetic construct
PLGTSDSPVTHADPIDWKSEEPVWVDQWPLTQEKLSAAQQLVQEQLRLGHIEPSTSAWNSPIFVIKKKSGKWRLLQDLRKVNETMMHMGALQPGLPTPSPIPDKSYIIVIDLKDCFYTIPLAPQDCKRFAFSLPSVNFKEPMQRYQWRVLPQGMTNSPTLCQKFVATAIAPVRQRFPQLYLVHYMDDILLAHTDEHLLYQAFSILKQHLSLNGLVIADEKIQTHFPYNYLGFSLYPRVYNTQLVKLQTDHLKTLNDFQKLLGDINWIRPYLKLPTYTLQPLFDILKGDSDPASPRTLSLEGRTALQSIEEAIRQQQITYCDYQRSWGLYILPTPRAPTGVLYQDKPLRWIYLSATPTKHLLPYYELVAKIIAKGRHEAIQYFGMEPPFICVPYALEQQDWLFQFSDNWSIAFANYPGQITHHYPSDKLLQFASSHAFIFPKIVRRQPIPEATLIFTDGSSNGTAALIINHQTYYAQTSFSSAQVVELFAVHQALLTVPTSFNLFTDSSYVVGALQMIETVPIIGTTSPEVLNLFTLIQQVLHCRQHPCFFGHIRAHSTLPGALVQGNHTADVLTKQVFFQS

SEQ ID NO: 8047 - protein, 793 aa, Koala retrovirus
TLGDQGSRGSDPLPEPRVTLTVEGIPTEFLVNTGAEHSVLTKPMGKMGSKRTVVAGATGSKVYPWTTKRLLKIGQKQVTHSFLVIPECPAPLLGRDLLTKLKAQIQFSTEGPQVTWEDRPAMCLVLNLEEEYRLHEKPVPPSIDPSWLQLFPMVWAEKAGMGLANQVPPVVVELKSDASPVAVRQYPMSKEAREGIRPHIQRFLDLGILVPCQSPWNTPLLPVKKPGTNDYRPVQDLREVNKRVQDIHPTVPNPYNLLSSLPPSHTWYSVLDLKDAFFCLKLHPNSQPLFAFEWRDPEKGNTGQLTWTRLPQGFKNSPTLFDEALHRDLASFRALNPQVVMLQYVDDLLVAAPTYRDCKEGTRRLLQELSKLGYRVSAKKAQLCREEVTYLGYLLKGGKRWLTPARKATVMKIPTPTTPRQVREFLGTAGFCRLWIPGFASLAAPLYPLTREKVPFTWTEAHQEAFGRIKEALLSAPALALPDLTKPFALYVDEKEGVARGVLTQTLGPWRRPVAYLSKKLDPVASGWPTCLKAIAAVALLLKDADKLTLGQNVLVIAPHNLESIVRQPPDRWMTNARMTHYQSLLLNERVSFAPPAILNPATLLPVESDDTPIHICSEILAEETGTRPDLRDQPLPGVPAWYTDGSSFIMDGRRQAGAAIVDNKRTVWASNLPEGTSAQKAELIALTQALRLAEGKSINIYTDSRYAFATAHVHGAIYKQRGLLTSAGKDIKNKEEILALLEAIHLPKRVAIIHCPGHQRGTDPVATGNRKADEAAKQAAQSTRILTETTKN

SEQ ID NO: 8048 - protein, 793 aa, synthetic construct
TLGDQGSRGSDPLPEPRVTLTVEGIPTEFLVNTGAEHSVLTKPMGKMGSKRTVVAGATGSKVYPWTTKRLLKIGQKQVTHSFLVIPECPAPLLGRDLLTKLKAQIQFSTEGPQVTWEDRPAMCLVLNLEEEYRLHEKPVPPSIDPSWLQLFPMVWAEKAGMGLANQVPPVVVELKSDASPVAVRQYPMSKEAREGIRPHIQRFLDLGILVPCQSPWNTPLLPVKKPGTNDYRPVQDLREVNKRVQDIHPTVPNPYNLLSSLPPSHTWYSVLDLKDAFFCLKLHPNSQPLFAFEWRDPEKGNTGQLTWTRLPQGFKNSPTLFNEALHRDLASFRALNPQVVMLQYVDDLLVAAPTYRDCKEGTRRLLQELSKLGYRVSAKKAQLCREEVTYLGYLLKGGKRWLTPARKATVMKIPTPTTPRQVREFLGTAGFCRLWIPGFASLAAPLYPLTRPKVPFTWTEAHQEAFGRIKEALLSAPALALPDLTKPFALYVDEKEGVARGVLTQTLGPWRRPVAYLSKKLDPVASGWPTCLKAIAAVALLLKDADKLTLGQNVLVIAPHNLESIVRQPPDRWMTNARMTHYQSLLLNERVSFAPPAILNPATLLPVESDDTPIHICSEILAEETGTRPDLRDQPLPGVPAWYTDGSSFIMDGRRQAGAAIVDNKRTVWASNLPEGTSAQKAELIALTQALRLAEGKSINIYTDSRYAFATAHVHGAIYKQRGWLTSAGKDIKNKEEILALLEAIHLPKRVAIIHCPGHQRGTDPVATGNRKADEAAKQAAQSTRILTETTKN

SEQ ID NO: 8049 - protein, 793 aa, synthetic construct
TLGDQGSRGSDPLPEPRVTLTVEGIPTEFLVNTGAEHSVLTKPMGKMGSKRTVVAGATGSKVYPWTTKRLLKIGQKQVTHSFLVIPECPAPLLGRDLLTKLKAQIQFSTEGPQVTWEDRPAMCLVLNLEEEYRLHEKPVPPSIDPSWLQLFPMVWAEKAGMGLANQVPPVVVELKSDASPVAVRQYPMSKEAREGIRPHIQRFLDLGILVPCQSPWNTPLLPVKKPGTNDYRPVQDLREVNKRVQDIHPTVPNPYNLLSSLPPSHTWYSVLDLKDAFFCLKLHPNSQPLFAFEWRDPEKGNTGQLTWTRLPQGFKNSPTLFNEALHRDLASFRALNPQVVMLQYVDDLLVAAPTYRDCKEGTRRLLQELSKLGYRVSAKKAQLCREEVTYLGYLLKGGKRWLTPARKATVMKIPTPTTPRQVREFLGKAGFCRLFIPGFASLAAPLYPLTRPKVPFTWTEAHQEAFGRIKEALLSAPALALPDLTKPFALYVDEKEGVARGVLTQTLGPWRRPVAYLSKKLDPVASGWPTCLKAIAAVALLLKDADKLTLGQNVLVIAPHNLESIVRQPPDRWMTNARMTHYQSLLLNERVSFAPPAILNPATLLPVESDDTPIHICSEILAEETGTRPDLRDQPLPGVPAWYTDGSSFIMDGRRQAGAAIVDNKRTVWASNLPEGTSAQKAELIALTQALRLAEGKSINIYTDSRYAFATAHVHGAIYKQRGWLTSAGKDIKNKEEILALLEAIHLPKRVAIIHCPGHQRGTDPVATGNRKADEAAKQAAQSTRILTETTKN

SEQ ID NO: 8050 - protein, 702 aa, Koala retrovirus
LLGRDLLTKLKAQIQFSTEGPQVTWEDRPAMCLVLNLEEEYRLHEKPVPPSIDPSWLQLFPMVWAEKAGMGLANQVPPVVVELKSDASPVAVRQYPMSKEAREGIRPHIQRFLDLGILVPCQSPWNTPLLPVKKPGTNDYRPVQDLREVNKRVQDIHPTVPNPYNLLSSLPPSHTWYSVLDLKDAFFCLKLHPNSQPLFAFEWRDPEKGNTGQLTWTRLPQGFKNSPTLFDEALHRDLASFRALNPQVVMLQYVDDLLVAAPTYRDCKEGTRRLLQELSKLGYRVSAKKAQLCREEVTYLGYLLKGGKRWLTPARKATVMKIPTPTTPRQVREFLGTAGFCRLWIPGFASLAAPLYPLTREKVPFTWTEAHQEAFGRIKEALLSAPALALPDLTKPFALYVDEKEGVARGVLTQTLGPWRRPVAYLSKKLDPVASGWPTCLKAIAAVALLLKDADKLTLGQNVLVIAPHNLESIVRQPPDRWMTNARMTHYQSLLLNERVSFAPPAILNPATLLPVESDDTPIHICSEILAEETGTRPDLRDQPLPGVPAWYTDGSSFIMDGRRQAGAAIVDNKRTVWASNLPEGTSAQKAELIALTQALRLAEGKSINIYTDSRYAFATAHVHGAIYKQRGLLTSAGKDIKNKEEILALLEAIHLPKRVAIIHCPGHQRGTDPVATGNRKADEAAKQAAQSTRILTETTKN

SEQ ID NO: 8051 - protein, 702 aa, synthetic construct
LLGRDLLTKLKAQIQFSTEGPQVTWEDRPAMCLVLNLEEEYRLHEKPVPPSIDPSWLQLFPMVWAEKAGMGLANQVPPVVVELKSDASPVAVRQYPMSKEAREGIRPHIQRFLDLGILVPCQSPWNTPLLPVKKPGTNDYRPVQDLREVNKRVQDIHPTVPNPYNLLSSLPPSHTWYSVLDLKDAFFCLKLHPNSQPLFAFEWRDPEKGNTGQLTWTRLPQGFKNSPTLFNEALHRDLASFRALNPQVVMLQYVDDLLVAAPTYRDCKEGTRRLLQELSKLGYRVSAKKAQLCREEVTYLGYLLKGGKRWLTPARKATVMKIPTPTTPRQVREFLGTAGFCRLWIPGFASLAAPLYPLTRPKVPFTWTEAHQEAFGRIKEALLSAPALALPDLTKPFALYVDEKEGVARGVLTQTLGPWRRPVAYLSKKLDPVASGWPTCLKAIAAVALLLKDADKLTLGQNVLVIAPHNLESIVRQPPDRWMTNARMTHYQSLLLNERVSFAPPAILNPATLLPVESDDTPIHICSEILAEETGTRPDLRDQPLPGVPAWYTDGSSFIMDGRRQAGAAIVDNKRTVWASNLPEGTSAQKAELIALTQALRLAEGKSINIYTDSRYAFATAHVHGAIYKQRGWLTSAGKDIKNKEEILALLEAIHLPKRVAIIHCPGHQRGTDPVATGNRKADEAAKQAAQSTRILTETTKN

SEQ ID NO: 8052 - protein, 702 aa, synthetic construct
LLGRDLLTKLKAQIQFSTEGPQVTWEDRPAMCLVLNLEEEYRLHEKPVPPSIDPSWLQLFPMVWAEKAGMGLANQVPPVVVELKSDASPVAVRQYPMSKEAREGIRPHIQRFLDLGILVPCQSPWNTPLLPVKKPGTNDYRPVQDLREVNKRVQDIHPTVPNPYNLLSSLPPSHTWYSVLDLKDAFFCLKLHPNSQPLFAFEWRDPEKGNTGQLTWTRLPQGFKNSPTLFNEALHRDLASFRALNPQVVMLQYVDDLLVAAPTYRDCKEGTRRLLQELSKLGYRVSAKKAQLCREEVTYLGYLLKGGKRWLTPARKATVMKIPTPTTPRQVREFLGKAGFCRLFIPGFASLAAPLYPLTRPKVPFTWTEAHQEAFGRIKEALLSAPALALPDLTKPFALYVDEKEGVARGVLTQTLGPWRRPVAYLSKKLDPVASGWPTCLKAIAAVALLLKDADKLTLGQNVLVIAPHNLESIVRQPPDRWMTNARMTHYQSLLLNERVSFAPPAILNPATLLPVESDDTPIHICSEILAEETGTRPDLRDQPLPGVPAWYTDGSSFIMDGRRQAGAAIVDNKRTVWASNLPEGTSAQKAELIALTQALRLAEGKSINIYTDSRYAFATAHVHGAIYKQRGWLTSAGKDIKNKEEILALLEAIHLPKRVAIIHCPGHQRGTDPVATGNRKADEAAKQAAQSTRILTETTKN

SEQ ID NO: 8053 - protein, 671 aa, unidentified
TLNLEDEYRLYETSAEPEVSPGSTWLSDFPQAWAETGGMGLAVRQAPLIIPLKATSTPVSIKQYPMSQEAKLGIKPHIQRLLDQGILVPCQSPWNTPLLPVKKPGTNDYRPVQDLREVNKRVEDIHPTVPNPYNLLSGLPPSHRWYTVLDLKDAFFCLRLHPTSQPLFAFEWRDPGMGISGQLTWTRLPQGFKNSPTLFDEALHRDLADFRIQHPDLILLQYVDDILLAATSELDCQQGTRALLLTLGNLGYRASAKKAQLCQKQVKYLGYLLKEGQRWLTEARKETVMGQPTPKTPRQLREFLGTAGFCRLWIPGFAEMAAPLYPLTKTGTLFNWGPDQQKAYQEIKQALLTAPALGLPDLTKPFELFVDEKQGYAKGVLTQKLGPWRRPVAYLSKKLDPVAAGWPPCLRMVAAIAVLRKDAGKLTMGQPLVILAPHAVEALVKQPPDRWLSNARMTHYQAMLLDTDRVQFGPVVALNPATLLPLPEEGAPHDCLEILAETHGTRPDLTDQPIPDADHTWYTDGSSFLQEGQRKAGAAVTTETEVIWARALPAGTSAQRAELIALTQALKMAEGKRLNVYTDSRYAFATAHIHGEIYRRRGLLTSEGREIKNKSEILALLKALFLPKRLSIIHCLGHQKGDSAEARGNRLADQAAREAAIKTPPDTSTLL

SEQ ID NO: 8054 - protein, 671 aa, synthetic construct
TLNLEDEYRLYETSAEPEVSPGSTWLSDFPQAWAETGGMGLAVRQAPLIIPLKATSTPVSIKQYPMSQEAKLGIKPHIQRLLDQGILVPCQSPWNTPLLPVKKPGTNDYRPVQDLREVNKRVEDIHPTVPNPYNLLSGLPPSHRWYTVLDLKDAFFCLRLHPTSQPLFAFEWRDPGMGISGQLTWTRLPQGFKNSPTLFNEALHRDLADFRIQHPDLILLQYVDDILLAATSELDCQQGTRALLLTLGNLGYRASAKKAQLCQKQVKYLGYLLKEGQRWLTEARKETVMGQPTPKTPRQLREFLGTAGFCRLWIPGFAEMAAPLYPLTKPGTLFNWGPDQQKAYQEIKQALLTAPALGLPDLTKPFELFVDEKQGYAKGVLTQKLGPWRRPVAYLSKKLDPVAAGWPPCLRMVAAIAVLRKDAGKLTMGQPLVILAPHAVEALVKQPPDRWLSNARMTHYQAMLLDTDRVQFGPVVALNPATLLPLPEEGAPHDCLEILAETHGTRPDLTDQPIPDADHTWYTDGSSFLQEGQRKAGAAVTTETEVIWARALPAGTSAQRAELIALTQALKMAEGKRLNVYTDSRYAFATAHIHGEIYRRRGWLTSEGREIKNKSEILALLKALFLPKRLSIIHCLGHQKGDSAEARGNRLADQAAREAAIKTPPDTSTLL

SEQ ID NO: 8055 - protein, 671 aa, synthetic construct
TLNLEDEYRLYETSAEPEVSPGSTWLSDFPQAWAETGGMGLAVRQAPLIIPLKATSTPVSIKQYPMSQEAKLGIKPHIQRLLDQGILVPCQSPWNTPLLPVKKPGTNDYRPVQDLREVNKRVEDIHPTVPNPYNLLSGLPPSHRWYTVLDLKDAFFCLRLHPTSQPLFAFEWRDPGMGISGQLTWTRLPQGFKNSPTLFNEALHRDLADFRIQHPDLILLQYVDDILLAATSELDCQQGTRALLLTLGNLGYRASAKKAQLCQKQVKYLGYLLKEGQRWLTEARKETVMGQPTPKTPRQLREFLGKAGFCRLFIPGFAEMAAPLYPLTKPGTLFNWGPDQQKAYQEIKQALLTAPALGLPDLTKPFELFVDEKQGYAKGVLTQKLGPWRRPVAYLSKKLDPVAAGWPPCLRMVAAIAVLRKDAGKLTMGQPLVILAPHAVEALVKQPPDRWLSNARMTHYQAMLLDTDRVQFGPVVALNPATLLPLPEEGAPHDCLEILAETHGTRPDLTDQPIPDADHTWYTDGSSFLQEGQRKAGAAVTTETEVIWARALPAGTSAQRAELIALTQALKMAEGKRLNVYTDSRYAFATAHIHGEIYRRRGWLTSEGREIKNKSEILALLKALFLPKRLSIIHCLGHQKGDSAEARGNRLADQAAREAAIKTPPDTSTLL

SEQ ID NO: 8056 - protein, 671 aa, Murine leukemia virus
TLGIEDEYRLHETSTEPDVSLGSTWLSDFPQAWAETGGMGLAVRQAPLIIPLKATSTPVSIQQYPMSHEARLGIKPHIQRLLDQGILVPCQSPWNTPLLPVKKPGTNDYRPVQDLREVNKRVEDIHPTVPNPYNLLSGLPPSHQWYTVLDLKDAFFCLRLHPTSQPLFAFEWRDPGMGISGQLTWTRLPQGFKNSPTLFDEALHRDLADFRIQHPDLILLQYVDDILLAATSELDCQQGTRALLQTLGDLGYRASAKKAQICQKQVKYLGYLLREGQRWLTEARKETVMGQPVPKTPRQLREFLGTAGFCRLWIPGFAEMAAPLYPLTKTGTLFSWGPDQQKAYQEIKQALLTAPALGLPDLTKPFELFVDEKQGYAKGVLTQKLGPWRRPVAYLSKKLDPVAAGWPPCLRMVAAIAVLTKDAGKLTMGQPLVILAPHAVEALVKQPPDRWLSNARMTHYQAMLLDTDRVQFGPVVALNPATLLPLPEEGAPHDCLEILAETHGTRPDLTDQPIPDADHTWYTDGSSFLQEGQRKAGAAVTTETEVIWAGALPAGTSAQRAELIALTQALKMAEGKRLNVYTDSRYAFATAHIHGEIYRRRGLLTSEGREIKNKSEILALLKALFLPKRLSIIHCLGHQKGDSAEARGNRLADQAAREAAIKTPPDTSTLL

SEQ ID NO: 8057 - protein, 671 aa, Murine leukemia virus; identical to SEQ ID NO: 8056

SEQ ID NO: 8058 - protein, 671 aa, synthetic construct
TLGIEDEYRLHETSTEPDVSLGSTWLSDFPQAWAETGGMGLAVRQAPLIIPLKATSTPVSIQQYPMSHEARLGIKPHIQRLLDQGILVPCQSPWNTPLLPVKKPGTNDYRPVQDLREVNKRVEDIHPTVPNPYNLLSGLPPSHQWYTVLDLKDAFFCLRLHPTSQPLFAFEWRDPGMGISGQLTWTRLPQGFKNSPTLFNEALHRDLADFRIQHPDLILLQYVDDILLAATSELDCQQGTRALLQTLGDLGYRASAKKAQICQKQVKYLGYLLREGQRWLTEARKETVMGQPVPKTPRQLREFLGTAGFCRLWIPGFAEMAAPLYPLTKPGTLFSWGPDQQKAYQEIKQALLTAPALGLPDLTKPFELFVDEKQGYAKGVLTQKLGPWRRPVAYLSKKLDPVAAGWPPCLRMVAAIAVLTKDAGKLTMGQPLVILAPHAVEALVKQPPDRWLSNARMTHYQAMLLDTDRVQFGPVVALNPATLLPLPEEGAPHDCLEILAETHGTRPDLTDQPIPDADHTWYTDGSSFLQEGQRKAGAAVTTETEVIWAGALPAGTSAQRAELIALTQALKMAEGKRLNVYTDSRYAFATAHIHGEIYRRRGWLTSEGREIKNKSEILALLKALFLPKRLSIIHCLGHQKGDSAEARGNRLADQAAREAAIKTPPDTSTLL

SEQ ID NO: 8059 - protein, 671 aa, synthetic construct; identical to SEQ ID NO: 8058

SEQ ID NO: 8060 - protein, 671 aa, synthetic construct
LGIEDEYRLHETSTEPDVSLGSTWLSDFPQAWAETGGMGLAVRQAPLIIPLKATSTPVSIQQYPMSHEARLGIKPHIQRLLDQGILVPCQSPWNTPLLPVKKPGTNDYRPVQDLREVNKRVEDIHPTVPNPYNLLSGLPPSHQWYTVLDLKDAFFCLRLHPTSQPLFAFEWRDPGMGISGQLTWTRLPQGFKNSPTLFNEALHRDLADFRIQHPDLILLQYVDDILLAATSELDCQQGTRALLQTLGDLGYRASAKKAQICQKQVKYLGYLLREGQRWLTEARKETVMGQPVPKTPRQLREFLGKAGFCRLFIPGFAEMAAPLYPLTKPGTLFSWGPDQQKAYQEIKQALLTAPALGLPDLTKPFELFVDEKQGYAKGVLTQKLGPWRRPVAYLSKKLDPVAAGWPPCLRMVAAIAVLTKDAGKLTMGQPLVILAPHAVEALVKQPPDRWLSNARMTHYQAMLLDTDRVQFGPVVALNPATLLPLPEEGAPHDCLEILAETHGTRPDLTDQPIPDADHTWYTDGSSFLQEGQRKAGAAVTTETEVIWAGALPAGTSAQRAELIALTQALKMAEGKRLNVYTDSRYAFATAHIHGEIYRRRGWLTSEGREIKNKSEILALLKALFLPKRLSIIHCLGHQKGDSAEARGNRLADQAAREAAIKTPPDTSTLLI

SEQ ID NO: 8061 - protein, 671 aa, synthetic construct; identical to SEQ ID NO: 8060

SEQ ID NO: 8062 - protein, 671 aa, unidentified
TLNIEDEYRLHETSKEPDVSLGSTWLSDFPQAWAETGGMGLAVRQAPLIIPLKATSTPVSIKQYPMSQEARLGIKPHIQRLLDQGILVPCQSPWNTPLLPVKKPGTNDYRPVQDLREVNKRVEDIHPTVPNPYNLLSGLPPSHQWYTVLDLKDAFFCLRLHPTSQPLFAFEWRDPEMGISGQLTWTRLPQGFKNSPTLFDEALHRDLAGFRIQHPDLILLQYVDDLLLAATSELDCQQGTRALLQTLGDLGYRASAKKAQICQKQVKYLGYLLKEGQRWLTEARKETVMGQPIPKTPRQLREFLGTAGFCRLWIPGFAEMAAPLYPLTKTGTLFNWGPDQQKAFQEIKQALLTAPALGLPDLTKPFELFVDEKQGYAKGVLTQKLGPWRRPVAYLSKKLDPVAAGWPPCLRMVAAIAVLTKDAGKLTMGQPLVILAPHAVEALVKQPPDRWLSNARMTHYQALLLDTDRVQFGPVVALNPATLLPLPEEGLQHDCLDILAEAHGTRSDLMDQPLPDADHTWYTDGSSFLQEGQRKAGAAVTTETEVIWARALPAGTSAQRAELIALTQALKMAEGKKLNVYTDSRYAFATAHIHGEIYRRRGLLTSEGKEIKNKDEILALLKALFLPKRLSIIHCPGHQKGNSAEARGNRMADQAAREVATRETPETSTLL

SEQ ID NO: 8063 - protein, 671 aa, synthetic construct
TLNIEDEYRLHETSKEPDVSLGSTWLSDFPQAWAETGGMGLAVRQAPLIIPLKATSTPVSIKQYPMSQEARLGIKPHIQRLLDQGILVPCQSPWNTPLLPVKKPGTNDYRPVQDLREVNKRVEDIHPTVPNPYNLLSGLPPSHQWYTVLDLKDAFFCLRLHPTSQPLFAFEWRDPEMGISGQLTWTRLPQGFKNSPTLFNEALHRDLAGFRIQHPDLILLQYVDDLLLAATSELDCQQGTRALLQTLGDLGYRASAKKAQICQKQVKYLGYLLKEGQRWLTEARKETVMGQPIPKTPRQLREFLGTAGFCRLWIPGFAEMAAPLYPLTKPGTLFNWGPDQQKAFQEIKQALLTAPALGLPDLTKPFELFVDEKQGYAKGVLTQKLGPWRRPVAYLSKKLDPVAAGWPPCLRMVAAIAVLTKDAGKLTMGQPLVILAPHAVEALVKQPPDRWLSNARMTHYQALLLDTDRVQFGPVVALNPATLLPLPEEGLQHDCLDILAEAHGTRSDLMDQPLPDADHTWYTDGSSFLQEGQRKAGAAVTTETEVIWARALPAGTSAQRAELIALTQALKMAEGKKLNVYTDSRYAFATAHIHGEIYRRRGWLTSEGKEIKNKDEILALLKALFLPKRLSIIHCPGHQKGNSAEARGNRMADQAAREVATRETPETSTLL

SEQ ID NO: 8064 - protein, 671 aa, synthetic construct
TLNIEDEYRLHETSKEPDVSLGSTWLSDFPQAWAETGGMGLAVRQAPLIIPLKATSTPVSIKQYPMSQEARLGIKPHIQRLLDQGILVPCQSPWNTPLLPVKKPGTNDYRPVQDLREVNKRVEDIHPTVPNPYNLLSGLPPSHQWYTVLDLKDAFFCLRLHPTSQPLFAFEWRDPEMGISGQLTWTRLPQGFKNSPTLFNEALHRDLAGFRIQHPDLILLQYVDDLLLAATSELDCQQGTRALLQTLGDLGYRASAKKAQICQKQVKYLGYLLKEGQRWLTEARKETVMGQPIPKTPRQLREFLGKAGFCRLFIPGFAEMAAPLYPLTKPGTLFNWGPDQQKAFQEIKQALLTAPALGLPDLTKPFELFVDEKQGYAKGVLTQKLGPWRRPVAYLSKKLDPVAAGWPPCLRMVAAIAVLTKDAGKLTMGQPLVILAPHAVEALVKQPPDRWLSNARMTHYQALLLDTDRVQFGPVVALNPATLLPLPEEGLQHDCLDILAEAHGTRSDLMDQPLPDADHTWYTDGSSFLQEGQRKAGAAVTTETEVIWARALPAGTSAQRAELIALTQALKMAEGKKLNVYTDSRYAFATAHIHGEIYRRRGWLTSEGKEIKNKDEILALLKALFLPKRLSIIHCPGHQKGNSAEARGNRMADQAAREVATRETPETSTLL

SEQ ID NO: 8065 - protein, 671 aa, unidentified
TLNIEDEYRLHETSKGPDVPLGSTWLSDFPQAWAETGGMGLAFRQAPLIISLKATSTPVSIKQYPMSQEARLGIKPHIQRLLDQGILVPCQSPWNTPLLPVKKPGTNDYRPVQDLREVNKRVEDIHPTVPNPYNLLSGLPPSHQWYTVLDLKDAFFCLRLHPTSQSLFAFEWKDPEMGISGQLTWTRLPQGFKNSPTLFDEALHRDLADFRIQHPDLILLQYVDDLLLAATSELDCQQGTRALLQTLGDLGYRASAKKAQICQKQVKYLGYLLKEGQRWLTEARKETVMGQPTPKTPRQLREFLGTAGLCRLWIPGFAEMAAPLYPLTKTGTLFKWGPDQQKAYQEIKQALLTAPALGLPDLTKPFELFVDEKQGYAKGVLTQKLGPWRRPVAYLSKKLDPVAAGWPPCLRMVAAIAVLTKDVGKLTMGQPLVILAPHAVEALVKQPPDRWLSNARMTHYQALLLDTDRVQFGPIVALNPATLLPLPEEGLQHDCLDILAEAHGTRPDLTDQPLPDADHTWYTDGSSFLQEGQRRAGAAVTTETEVIWAKALPAGTSAQRAELIALTQALKMAAGKKLNVYTDSRYAFATAHIHGEIYRRRGLLTSEGKEIKNKDEILALLKALFLPKRLSIIHCPGHQKGNHAEARGNRMADQAAREVATRETPETSTLL

SEQ ID NO: 8066 - protein, 671 aa, synthetic construct
TLNIEDEYRLHETSKGPDVPLGSTWLSDFPQAWAETGGMGLAFRQAPLIISLKATSTPVSIKQYPMSQEARLGIKPHIQRLLDQGILVPCQSPWNTPLLPVKKPGTNDYRPVQDLREVNKRVEDIHPTVPNPYNLLSGLPPSHQWYTVLDLKDAFFCLRLHPTSQSLFAFEWKDPEMGISGQLTWTRLPQGFKNSPTLFNEALHRDLADFRIQHPDLILLQYVDDLLLAATSELDCQQGTRALLQTLGDLGYRASAKKAQICQKQVKYLGYLLKEGQRWLTEARKETVMGQPTPKTPRQLREFLGTAGLCRLWIPGFAEMAAPLYPLTKPGTLFKWGPDQQKAYQEIKQALLTAPALGLPDLTKPFELFVDEKQGYAKGVLTQKLGPWRRPVAYLSKKLDPVAAGWPPCLRMVAAIAVLTKDVGKLTMGQPLVILAPHAVEALVKQPPDRWLSNARMTHYQALLLDTDRVQFGPIVALNPATLLPLPEEGLQHDCLDILAEAHGTRPDLTDQPLPDADHTWYTDGSSFLQEGQRRAGAAVTTETEVIWAKALPAGTSAQRAELIALTQALKMAAGKKLNVYTDSRYAFATAHIHGEIYRRRGWLTSEGKEIKNKDEILALLKALFLPKRLSIIHCPGHQKGNHAEARGNRMADQAAREVATRETPETSTLL

SEQ ID NO: 8067 - protein, 671 aa, synthetic construct
TLNIEDEYRLHETSKGPDVPLGSTWLSDFPQAWAETGGMGLAFRQAPLIISLKATSTPVSIKQYPMSQEARLGIKPHIQRLLDQGILVPCQSPWNTPLLPVKKPGTNDYRPVQDLREVNKRVEDIHPTVPNPYNLLSGLPPSHQWYTVLDLKDAFFCLRLHPTSQSLFAFEWKDPEMGISGQLTWTRLPQGFKNSPTLFNEALHRDLADFRIQHPDLILLQYVDDLLLAATSELDCQQGTRALLQTLGDLGYRASAKKAQICQKQVKYLGYLLKEGQRWLTEARKETVMGQPTPKTPRQLREFLGKAGLCRLFIPGFAEMAAPLYPLTKPGTLFKWGPDQQKAYQEIKQALLTAPALGLPDLTKPFELFVDEKQGYAKGVLTQKLGPWRRPVAYLSKKLDPVAAGWPPCLRMVAAIAVLTKDVGKLTMGQPLVILAPHAVEALVKQPPDRWLSNARMTHYQALLLDTDRVQFGPIVALNPATLLPLPEEGLQHDCLDILAEAHGTRPDLTDQPLPDADHTWYTDGSSFLQEGQRRAGAAVTTETEVIWAKALPAGTSAQRAELIALTQALKMAAGKKLNVYTDSRYAFATAHIHGEIYRRRGWLTSEGKEIKNKDEILALLKALFLPKRLSIIHCPGHQKGNHAEARGNRMADQAAREVATRETPETSTLL

SEQ ID NO: 8068 - protein, 671 aa, synthetic construct
TLNIEDEYRLHETSKGPDVPLGSTWLSDFPQAWAETGGMGLAVRQAPLIIPLKATSTPVSIKQYPMSQEARLGIKPHIQRLLDQGILVPCQSPWNTPLLPVKKPGTNDYRPVQDLREVNKRVEDIHPTVPNPYNLLSGLPPSHQWYTVLDLKDAFFCLRLHPTSQSLFAFEWRDPEMGISGQLTWTRLPQGFKNSPTLFNEALHRDLADFRIQHPDLILLQYVDDLLLAATSELDCQQGTRALLQTLGDLGYRASAKKAQICQKQVKYLGYLLKEGQRWLTEARKETVMGQPTPKTPRQLREFLGTAGFCRLWIPGFAEMAAPLYPLTKPGTLFEWGPDQQKAYQEIKQALLTAPALGLPDLTKPFELFVDEKQGYAKGVLTQKLGPWRRPVAYLSKKLDPVAAGWPPCLRMVAAIAVLTKDAGKLTMGQPLVILAPHAVEALVKQPPDRWLSNARMTHYQALLLDTDRVQFGPIVALNPATLLPLPEEGLQHDCLDILAEAHGTRPDLTDQPLPDADHTWYTDGSSFLQEGQRKAGAAVTTETEVVWAKALPAGTSAQRAELIALTQALKMAEGKKLNVYTDSRYAFATAHIHGEIYRRRGWLTSEGKEIKNKDEILALLKALFLPKRLSIIHCPGHQKGNRAEARGNRMADQAAREVATRETPETSTLL

SEQ ID NO: 8069 - protein, 671 aa, synthetic construct
TLNIEDEYRLHETSKGPDVPLGSTWLSDFPQAWAETGGMGLAVRQAPLIIPLKATSTPVSIKQYPMSQEARLGIKPHIQRLLDQGILVPCQSPWNTPLLPVKKPGTNDYRPVQDLREVNKRVEDIHPTVPNPYNLLSGLPPSHQWYTVLDLKDAFFCLRLHPTSQSLFAFEWRDPEMGISGQLTWTRLPQGFKNSPTLFNEALHRDLADFRIQHPDLILLQYVDDLLLAATSELDCQQGTRALLQTLGDLGYRASAKKAQICQKQVKYLGYLLKEGQRWLTEARKETVMGQPTPKTPRQLREFLGKAGFCRLFIPGFAEMAAPLYPLTKPGTLFEWGPDQQKAYQEIKQALLTAPALGLPDLTKPFELFVDEKQGYAKGVLTQKLGPWRRPVAYLSKKLDPVAAGWPPCLRMVAAIAVLTKDAGKLTMGQPLVILAPHAVEALVKQPPDRWLSNARMTHYQALLLDTDRVQFGPIVALNPATLLPLPEEGLQHDCLDILAEAHGTRPDLTDQPLPDADHTWYTDGSSFLQEGQRKAGAAVTTETEVVWAKALPAGTSAQRAELIALTQALKMAEGKKLNVYTDSRYAFATAHIHGEIYRRRGWLTSEGKEIKNKDEILALLKALFLPKRLSIIHCPGHQKGNRAEARGNRMADQAAREVATRETPETSTLL

SEQ ID NO: 8070 - protein, 671 aa, Murine leukemia virus; identical to SEQ ID NO: 5003

SEQ ID NO: 8071 - protein, 671 aa, Murine leukemia virus; identical to SEQ ID NO: 5003

SEQ ID NO: 8072 - protein, 671 aa, synthetic construct
TLNIEDEHRLHETSKEPDVSLGSTWLSDFPQAWAETGGMGLAVRQAPLIIPLKATSTPVSIKQYPMSQEARLGIKPHIQRLLDQGILVPCQSPWNTPLLPVKKPGTNDYRPVQDLREVNKRVEDIHPTVPNPYNLLSGLPPSHQWYTVLDLKDAFFCLRLHPTSQPLFAFEWRDPEMGISGQLTWTRLPQGFKNSPTLFNEALHRDLADFRIQHPDLILLQYVDDLLLAATSELDCQQGTRALLQTLGNLGYRASAKKAQICQKQVKYLGYLLKEGQRWLTEARKETVMGQPTPKTPRQLREFLGTAGFCRLWIPGFAEMAAPLYPLTKPGTLFNWGPDQQKAYQEIKQALLTAPALGLPDLTKPFELFVDEKQGYAKGVLTQKLGPWRRPVAYLSKKLDPVAAGWPPCLRMVAAIAVLTKDAGKLTMGQPLVILAPHAVEALVKQPPDRWLSNARMTHYQALLLDTDRVQFGPVVALNPATLLPLPEEGLQHNCLDILAEAHGTRPDLTDQPLPDADHTWYTDGSSLLQEGQRKAGAAVTTETEVIWAKALPAGTSAQRAELIALTQALKMAEGKKLNVYTDSRYAFATAHIHGEIYRRRGWLTSEGKEIKNKDEILALLKALFLPKRLSIIHCPGHQKGHSAEARGNRMADQAARKAAITETPDTSTLL

SEQ ID NO: 8073 - protein, 671 aa, synthetic construct; identical to SEQ ID NO: 8072

SEQ ID NO: 8074 - protein, 671 aa, synthetic construct
TLNIEDEHRLHETSKEPDVSLGSTWLSDFPQAWAETGGMGLAVRQAPLIIPLKATSTPVSIKQYPMSQEARLGIKPHIQRLLDQGILVPCQSPWNTPLLPVKKPGTNDYRPVQDLREVNKRVEDIHPTVPNPYNLLSGLPPSHQWYTVLDLKDAFFCLRLHPTSQPLFAFEWRDPEMGISGQLTWTRLPQGFKNSPTLFNEALHRDLADFRIQHPDLILLQYVDDLLLAATSELDCQQGTRALLQTLGNLGYRASAKKAQICQKQVKYLGYLLKEGQRWLTEARKETVMGQPTPKTPRQLREFLGKAGFCRLFIPGFAEMAAPLYPLTKPGTLFNWGPDQQKAYQEIKQALLTAPALGLPDLTKPFELFVDEKQGYAKGVLTQKLGPWRRPVAYLSKKLDPVAAGWPPCLRMVAAIAVLTKDAGKLTMGQPLVILAPHAVEALVKQPPDRWLSNARMTHYQALLLDTDRVQFGPVVALNPATLLPLPEEGLQHNCLDILAEAHGTRPDLTDQPLPDADHTWYTDGSSLLQEGQRKAGAAVTTETEVIWAKALPAGTSAQRAELIALTQALKMAEGKKLNVYTDSRYAFATAHIHGEIYRRRGWLTSEGKEIKNKDEILALLKALFLPKRLSIIHCPGHQKGHSAEARGNRMADQAARKAAITETPDTSTLL

SEQ ID NO: 8075 - protein, 671 aa, synthetic construct; identical to SEQ ID NO: 8074

SEQ ID NO: 8076 - protein, 691 aa, synthetic construct
TLNIEDEYRLHETSKEPDVSLGSTWLSDFPQAWAETGGMGLAVRQAPLIIPLKATSTPVSIKQYPMSQEARLGIKPHIQRLLDQGILVPCQSPWNTPLLPVKKPGTNDYRPVQDLREVNKRVEDIHPTVPNPYNLLSGLPPSHQWYTVLDLKDAFFCLRLHPTSQPLFAFEWRDPEMGISGQLTWTRLPQGFKNSPTLFNEALHRDLADFRIQHPDLILLQYVDDLLLAATSELDCQQGTRALLQTLGNLGYRASAKKAQICQKQVKYLGYLLKEGQRWLTEARKETVMGQPTPKTPRQLREFLGKAGFCRLFIPGFAEMAAPLYPLTKPGTLFNWGPDQQKAYQEIKQALLTAPALGLPDLTKPFELFVDEKQGYAKGVLTQKLGPWRRPVAYLSKKLDPVAAGWPPCLRMVAAIAVLTKDAGKLTMGQPLVILAPHAVEALVKQPPDRWLSNARMTHYQALLLDTDRVQFGPVVALNPATLLPLPEEGLQHNCLDILAEAHGTRPDLTDQPLPDADHTWYTDGSSLLQEGQRKAGAAVTTETEVIWAKALPAGTSAQRAELIALTQALKMAEGKKLNVYTDSRYAFATAHIHGEIYRRRGWLTSEGKEIKNKDEILALLKALFLPKRLSIIHCPGHQKGHSAEARGNRMADQAARKAAITETPDTSTLLIENSSPSGGSKRTADGSEFE

SEQ ID NO: 8077 - protein, 691 aa, synthetic construct; identical to SEQ ID NO: 8076

SEQ ID NO: 8078 - protein, 671 aa, unidentified
TLNIEDEYRLHEISTEPDVSPGSTWLSDFPQAWAETGGMGLAVRQAPLIIPLKATSTPVSIKQYPMSQEAKLGIKPHIQRLLDQGILVPCQSPWNTPLLPVKKPGTNDYRPVQGLREVNKRVEDIHPTVPNPYNLLSGLPTSHRWYTVLDLKDAFFCLRLHPTSQPLFASEWRDPGMGISGQLTWTRLPQGFKNSPTLFDEALHRGLADFRIQHPDLILLQYVDDLLLAATSELDCQQGTRALLKTLGNLGYRASAKKAQICQKQVKYLGYLLREGQRWLTEARKETVMGQPTPKTPRQLREFLGTAGFCRLWIPRFAEMAAPLYPLTKTGTLFNWGPDQQKAYHEIKQALLTAPALGLPDLTKPFELFVDEKQGYAKGVLTQKLGPWRRPVAYLSKKLDPVAAGWPPCLRMVAAIAVLTKDAGKLTMGQPLVILAPHAVEALVKQPPDRWLSNARMTHYQAMLLDTDRVQFGPVVALNPATLLPLPEEGAPHDCLEILAETHGTEPDLTDQPIPDADHTWYTDGSSFLQEGQRKAGAAVTTETEVIWARALPAGTSAQRAELIALTQALKMAEGKRLNVYTDSRYAFATAHIHGEIYKRRGLLTSEGREIKNKSEILALLKALFLPKRLSIIHCLGHQKGDSAEARGNRLADQAAREAAIKTPPDTSTLL

SEQ ID NO: 8079 - protein, 671 aa, synthetic construct
TLNIEDEYRLHEISTEPDVSPGSTWLSDFPQAWAETGGMGLAVRQAPLIIPLKATSTPVSIKQYPMSQEAKLGIKPHIQRLLDQGILVPCQSPWNTPLLPVKKPGTNDYRPVQGLREVNKRVEDIHPTVPNPYNLLSGLPTSHRWYTVLDLKDAFFCLRLHPTSQPLFASEWRDPGMGISGQLTWTRLPQGFKNSPTLFNEALHRGLADFRIQHPDLILLQYVDDLLLAATSELDCQQGTRALLKTLGNLGYRASAKKAQICQKQVKYLGYLLREGQRWLTEARKETVMGQPTPKTPRQLREFLGTAGFCRLWIPRFAEMAAPLYPLTKPGTLFNWGPDQQKAYHEIKQALLTAPALGLPDLTKPFELFVDEKQGYAKGVLTQKLGPWRRPVAYLSKKLDPVAAGWPPCLRMVAAIAVLTKDAGKLTMGQPLVILAPHAVEALVKQPPDRWLSNARMTHYQAMLLDTDRVQFGPVVALNPATLLPLPEEGAPHDCLEILAETHGTEPDLTDQPIPDADHTWYTDGSSFLQEGQRKAGAAVTTETEVIWARALPAGTSAQRAELIALTQALKMAEGKRLNVYTDSRYAFATAHIHGEIYKRRGWLTSEGREIKNKSEILALLKALFLPKRLSIIHCLGHQKGDSAEARGNRLADQAAREAAIKTPPDTSTLL

SEQ ID NO: 8080 - protein, 691 aa, Mouse mammary tumor virus
WVQEISDSRPMLHIYLNGRRFLGLLNTGADKTCIAGRDWPANWPIHQTESSLQGLGMACGVARSSQPLRWQHEDKSGIIHPFVIPTLPFTLWGRDIMKDIKVRLMTDSPDDSQDLMIGAIESNLFADQISWKSDQPVWLNQWPLKQEKLQALQQLVTEQLQLGHLEESNSPWNTPVFVIKKKSGKWRLLQDLRAVNATMHDMGALQPGLPSPVAVPKGWEIIIIDLQDCFFNIKLHPEDCKRFAFSVPSPNFKRPYQRFQWKVLPQGMKNSPTLCQKFVDKAILTVRDKYQDSYIVHYMDDILLAHPSRSIVDEILTSMIQALNKHGLVVSTEKIQKYDNLKYLGTHIQGDSVSYQKLQIRTDKLRTLNDFQKLLGNINWIRPFLKLTTGELKPLFEILNGDSNPISTRKLTPEACKALQLMNERLSTARVKRLDLSQPWSLCILKTEYTPTACLWQDGVVEWIHLPHISPKVITPYDIFCTQLIIKGRHRSKELFSKDPDYIVVPYTKVQFDLLLQEKEDWPISLLGFLGEVHFHLPKDPLLTFTLQTAIIFPHMTSTTPLEKGIVIFTDGSANGRSVTYIQGREPIIKENTQNTAQQAEIVAVITAFEEVSQPFNLYTDSKYVTGLFPEIETATLSPRTKIYTELKHLQRLIHKRQEKFYIGHIRGHTGLPGPLAQGNAYADSLTRILT

SEQ ID NO: 8081 - protein, 691 aa, Mouse mammary tumor virus; identical to SEQ ID NO: 8080

SEQ ID NO: 8082 - protein, 691 aa, synthetic construct
WVQEISDSRPMLHIYLNGRRFLGLLNTGADKTCIAGRDWPANWPIHQTESSLQGLGMACGVARSSQPLRWQHEDKSGIIHPFVIPTLPFTLWGRDIMKDIKVRLMTDSPDDSQDLMIGAIESNLFADQISWKSDQPVWLNQWPLKQEKLQALQQLVTEQLQLGHLEESNSPWNTPVFVIKKKSGKWRLLQDLRAVNATMHDMGALQPGLPSPVAVPKGWEIIIIDLQDCFFNIKLHPEDCKRFAFSVPSPNFKRPYQRFQWKVLPQGMKNSPTLCQKFVDKAILTVRDKYQDSYIVHYMDDILLAHPSRSIVDEILTSMIQALNKHGLVVSTEKIQKYDNLKYLGTHIQGDSVSYQKLQIRTDKLRTLNDFQKLLGNINWIRPFLKLTTGELKPLFEILNPDSNPISTRKLTPEACKALQLMNERLSTARVKRLDLSQPWSLCILKTEYTPTACLWQDGVVEWIHLPHISPKVITPYDIFCTQLIIKGRHRSKELFSKDPDYIVVPYTKVQFDLLLQEKEDWPISLLGFLGEVHFHLPKDPLLTFTLQTAIIFPHMTSTTPLEKGIVIFTDGSANGRSVTYIQGREPIIKENTQNTAQQAEIVAVITAFEEVSQPFNLYTDSKYVTGLFPEIETATLSPRTKIYTELKHLQRLIHKRQEKFYIGHIRGHTGLPGPLAQGNAYADSLTRILT

SEQ ID NO: 8083 - protein, 691 aa, synthetic construct
VQEISDSRPMLHIYLNGRRFLGLLDTGADKTCIAGRDWPANWPIHQTESSLQGLGMACGVARSSQPLRWQHEDKSGIIHPFVIPTLPFTLWGRDIMKDIKVRLMTDSPDDSQDLMIGAIESNLFADQISWKSDQPVWLNQWPLKQEKLQALQQLVTEQLQLGHLEESNSPWNTPVFVIKKKSGKWRLLQDLRAVNATMHDMGALQPGLPSPVAVPKGWEIIIIDLQDCFFNIKLHPEDCKRFAFSVPSPNFKRPYQRFQWKVLPQGMKNSPTLCQKFVDKAILTVRDKYQDSYIVHYMDDILLAHPSRSIVDEILTSMIQALNKHGLVVSTEKIQKYDNLKYLGTHIQGDSVSYQKLQIRTDKLRTLNDFQKLLGNINWIRPFLKLTTGELKPLFEILNPDSNPISTRKLTPEACKALQLMNERLSTARVKRLDLSQPWSLCILKTEYTPTACLWQDGVVEWIHLPHISPKVITPYDIFCTQLIIKGRHRSKELFSKDPDYIVVPYTKVQFDLLLQEKEDWPISLLGFLGEVHFHLPKDPLLTFTLQTAIIFPHMTSTTPLEKGIVIFTDGSANGRSVTYIQGREPIIKENTQNTAQQAEIVAVITAFEEVSQPFNLYTDSKYVTGLFPEIETATLSPRTKIYTELKHLQRLIHKRQEKFYIGHIRGHTGLPGPLAQGNAYADSLTRILTA

SEQ ID NO: 8084 - protein, 691 aa, synthetic construct; identical to SEQ ID NO: 8083

SEQ ID NO: 8085 - protein, 691 aa, synthetic construct
WVQEISDSRPMLHIYLNGRRFLGLLNTGADKTCIAGRDWPANWPIHQTESSLQGLGMACGVARSSQPLRWQHEDKSGIIHPFVIPTLPFTLWGRDIMKDIKVRLMTDSPDDSQDLMIGAIESNLFADQISWKSDQPVWLNQWPLKQEKLQALQQLVTEQLQLGHLEESNSPWNTPVFVIKKKSGKWRLLQDLRAVNATMHDMGALQPGLPSPVAPPKGWEIIIIDLQDCFFNIKLHPEDCKRFAFSVPSPNFKRPYQRFQWKVLPQGMKNSPTLCQKFVDKAILTVRDKYQDSYIVHYMDDILLAHPSRSIVDEILTSMIQALNKHGLVVSTEKIQKYDNLKYLGTHIQGDSVSYQKLQIRTDKLRTLNDFQKLLGNINWIRPFLKLTTGELKPLFEILNPDSNPISTRKLTPEACKALQLMNERLSTARVKRLDLSQPWSLCILKTEYTPTACLWQDGVVEWIHLPHISPKVITPYDIFCTQLIIKGRHRSKELFSKDPDYIVVPYTKVQFDLLLQEKEDWPISLLGFLGEVHFHLPKDPLLTFTLQTAIIFPHMTSTTPLEKGIVIFTDGSANGRSVTYIQGREPIIKENTQNTAQQAEIVAVITAFEEVSQPFNLYTDSKYVTGLFPEIETATLSPRTKIYTELKHLQRLIHKRQEKFYIGHIRGHTGLPGPLAQGNAYADSLTRILT

SEQ ID NO: 8086 - protein, 691 aa, synthetic construct; identical to SEQ ID NO: 8085

SEQ ID NO: 8087 - protein, 691 aa, synthetic construct
VQEISDSRPMLHIYLNGRRFLGLLDTGADKTCIAGRDWPANWPIHQTESSLQGLGMACGVARSSQPLRWQHEDKSGIIHPFVIPTLPFTLWGRDIMKDIKVRLMTDSPDDSQDLMIGAIESNLFADQISWKSDQPVWLNQWPLKQEKLQALQQLVTEQLQLGHLEESNSPWNTPVFVIKKKSGKWRLLQDLRAVNATMHDMGALQPGLPSPPAVPKGWEIIIIDLQDCFFNIKLHPEDCKRFAFSVPSPNFKRPYQRFQWKVLPQGMKNSPTLCQKFVDKAILTVRDKYQDSYIVHYMDDILLAHPSRSIVDEILTSMIQALNKHGLVVSTEKIQKYDNLKYLGTHIQGDSVSYQKLQIRTDKLRTLNDFQKLLGNINWIRPFLKLTTGELKPLFEILNPDSNPISTRKLTPEACKALQLMNERLSTARVKRLDLSQPWSLCILKTEYTPTACLWQDGVVEWIHLPHISPKVITPYDIFCTQLIIKGRHRSKELFSKDPDYIVVPYTKVQFDLLLQEKEDWPISLLGFLGEVHFHLPKDPLLTFTLQTAIIFPHMTSTTPLEKGIVIFTDGSANGRSVTYIQGREPIIKENTQNTAQQAEIVAVITAFEEVSQPFNLYTDSKYVTGLFPEIETATLSPRTKIYTELKHLQRLIHKRQEKFYIGHIRGHTGLPGPLAQGNAYADSLTRILTA

SEQ ID NO: 8088 - protein, 691 aa, synthetic construct; identical to SEQ ID NO: 8087

SEQ ID NO: 8089 - protein, 691 aa, Mouse mammary tumor virus
VQEISDSRPMLHIYLNGRRFLGLLDTGADKTCIAGRDWPANWPIHQTESSLQGLGMACGVARSSQPLRWQHEDKSGIIHPFVIPTLPFTLWGRDIMKDIKVRLMTDSPDDSQDLMIGAIESNLFADQISWKSDQPVWLNQWPLKQEKLQALQQLVTEQLQLGHLEESNSPWNTPVFVIKKKSGKWRLLQDLRAVNATMHDMGALQPGLPSPVAVPKGWEIIIIDLQDCFFNIKLHPEDCKRFAFSVPSPNFKRPYQRFQWKVLPQGMKNSPTLCQKFVDKAILTVRDKYQDSYIVHYMDDILLAHPSRSIVDEILTSMIQALNKHGLVVSTEKIQKYDNLKYLGTHIQGDSVSYQKLQIRTDKLRTLNDFQKLLGNINWIRPFLKLTTGELKPLFEILNGDSNPISTRKLTPEACKALQLMNERLSTARVKRLDLSQPWSLCILKTEYTPTACLWQDGVVEWIHLPHISPKVITPYDIFCTQLIIKGRHRSKELFSKDPDYIVVPYTKVQFDLLLQEKEDWPISLLGFLGEVHFHLPKDPLLTFTLQTAIIFPHMTSTTPLEKGIVIFTDGSANGRSVTYIQGREPIIKENTQNTAQQAEIVAVITAFEEVSQPFNLYTDSKYVTGLFPEIETATLSPRTKIYTELKHLQRLIHKRQEKFYIGHIRGHTGLPGPLAQGNAYADSLTRILTA

SEQ ID NO: 8090 - protein, 691 aa, Mouse mammary tumor virus; identical to SEQ ID NO: 8089

SEQ ID NO: 8091 - protein, 599 aa, Mouse mammary tumor virus
GRDIMKDIKVRLMTDSPDDSQDLMIGAIESNLFADQISWKSDQPVWLNQWPLKQEKLQALQQLVTEQLQLGHLEESNSPWNTPVFVIKKKSGKWRLLQDLRAVNATMHDMGALQPGLPSPVAVPKGWEIIIIDLQDCFFNIKLHPEDCKRFAFSVPSPNFKRPYQRFQWKVLPQGMKNSPTLCQKFVDKAILTVRDKYQDSYIVHYMDDILLAHPSRSIVDEILTSMIQALNKHGLVVSTEKIQKYDNLKYLGTHIQGDSVSYQKLQIRTDKLRTLNDFQKLLGNINWIRPFLKLTTGELKPLFEILNGDSNPISTRKLTPEACKALQLMNERLSTARVKRLDLSQPWSLCILKTEYTPTACLWQDGVVEWIHLPHISPKVITPYDIFCTQLIIKGRHRSKELFSKDPDYIVVPYTKVQFDLLLQEKEDWPISLLGFLGEVHFHLPKDPLLTFTLQTAIIFPHMTSTTPLEKGIVIFTDGSANGRSVTYIQGREPIIKENTQNTAQQAEIVAVITAFEEVSQPFNLYTDSKYVTGLFPEIETATLSPRTKIYTELKHLQRLIHKRQEKFYIGHIRGHTGLPGPLAQGNAYADSLTRILT

SEQ ID NO: 8092 - protein, 599 aa, Mouse mammary tumor virus; identical to SEQ ID NO: 8091

SEQ ID NO: 8093 - protein, 599 aa, synthetic construct
GRDIMKDIKVRLMTDSPDDSQDLMIGAIESNLFADQISWKSDQPVWLNQWPLKQEKLQALQQLVTEQLQLGHLEESNSPWNTPVFVIKKKSGKWRLLQDLRAVNATMHDMGALQPGLPSPVAVPKGWEIIIIDLQDCFFNIKLHPEDCKRFAFSVPSPNFKRPYQRFQWKVLPQGMKNSPTLCQKFVDKAILTVRDKYQDSYIVHYMDDILLAHPSRSIVDEILTSMIQALNKHGLVVSTEKIQKYDNLKYLGTHIQGDSVSYQKLQIRTDKLRTLNDFQKLLGNINWIRPFLKLTTGELKPLFEILNPDSNPISTRKLTPEACKALQLMNERLSTARVKRLDLSQPWSLCILKTEYTPTACLWQDGVVEWIHLPHISPKVITPYDIFCTQLIIKGRHRSKELFSKDPDYIVVPYTKVQFDLLLQEKEDWPISLLGFLGEVHFHLPKDPLLTFTLQTAIIFPHMTSTTPLEKGIVIFTDGSANGRSVTYIQGREPIIKENTQNTAQQAEIVAVITAFEEVSQPFNLYTDSKYVTGLFPEIETATLSPRTKIYTELKHLQRLIHKRQEKFYIGHIRGHTGLPGPLAQGNAYADSLTRILT

SEQ ID NO: 8094 - protein, 599 aa, synthetic construct; identical to SEQ ID NO: 8093

SEQ ID NO: 8095 - protein, 599 aa, synthetic construct
GRDIMKDIKVRLMTDSPDDSQDLMIGAIESNLFADQISWKSDQPVWLNQWPLKQEKLQALQQLVTEQLQLGHLEESNSPWNTPVFVIKKKSGKWRLLQDLRAVNATMHDMGALQPGLPSPVAPPKGWEIIIIDLQDCFFNIKLHPEDCKRFAFSVPSPNFKRPYQRFQWKVLPQGMKNSPTLCQKFVDKAILTVRDKYQDSYIVHYMDDILLAHPSRSIVDEILTSMIQALNKHGLVVSTEKIQKYDNLKYLGTHIQGDSVSYQKLQIRTDKLRTLNDFQKLLGNINWIRPFLKLTTGELKPLFEILNPDSNPISTRKLTPEACKALQLMNERLSTARVKRLDLSQPWSLCILKTEYTPTACLWQDGVVEWIHLPHISPKVITPYDIFCTQLIIKGRHRSKELFSKDPDYIVVPYTKVQFDLLLQEKEDWPISLLGFLGEVHFHLPKDPLLTFTLQTAIIFPHMTSTTPLEKGIVIFTDGSANGRSVTYIQGREPIIKENTQNTAQQAEIVAVITAFEEVSQPFNLYTDSKYVTGLFPEIETATLSPRTKIYTELKHLQRLIHKRQEKFYIGHIRGHTGLPGPLAQGNAYADSLTRILT

SEQ ID NO: 8096 - protein, 599 aa, synthetic construct; identical to SEQ ID NO: 8095

SEQ ID NO: 8097 - protein, 585 aa, Mason-Pfizer monkey virus
LTAAIDILAPQQCAEPITWKSDEPVWVDQWPLTNDKLAAAQQLVQEQLEAGHITESSSPWNTPIFVIKKKSGKWRLLQDLRAVNATMVLMGALQPGLPSPVAIPQGYLKIIIDLKDCFFSIPLHPSDQKRFAFSLPSTNFKEPMQRFQWKVLPQGMANSPTLCQKYVATAIHKVRHAWKQMYIIHYMDDILIAGKDGQQVLQCFDQLKQELTAAGLHIAPEKVQLQDPYTYLGFELNGPKITNQKAVIRKDKLQTLNDFQKLLGDINWLRPYLKLTTGDLKPLFDTLKGDSDPNSHRSLSKEALASLEKVETAIAEQFVTHINYSLPLIFLIFNTALTPTGLFWQDNPIMWIHLPASPKKVLLPYYDAIADLIILGRDHSKKYFGIEPSTIIQPYSKSQIDWLMQNTEMWPIACASFVGILDNHYPPNKLIQFCKLHTFVFPQIISKTPLNNALLVFTDGSSTGMAAYTLTDTTIKFQTNLNSAQLVELQALIAVLSAFPNQPLNIYTDSAYLAHSIPLLETVAQIKHISETAKLFLQCQQLIYNRSIPFYIGHVRAHSGLPGPIAQGNQRADLATKIVASNINT

SEQ ID NO: 8098 - protein, 585 aa, synthetic construct
LTAAIDILAPQQCAEPITWKSDEPVWVDQWPLTNDKLAAAQQLVQEQLEAGHITESSSPWNTPIFVIKKKSGKWRLLQDLRAVNATMVLMGALQPGLPSPVAPPQGYLKIIIDLKDCFFSIPLHPSDQKRFAFSLPSTNFKEPMQRFQWKVLPQGMANSPTLCQKYVATAIHKVRHAWKQMYIIHYMDDILIAGKDGQQVLQCFDQLKQELTAAGLHIAPEKVQLQDPYTYLGFELNGPKITNQKAVIRKDKLQTLNDFQKLLGDINWLRPYLKLTTGDLKPLFDTLKPDSDPNSHRSLSKEALASLEKVETAIAEQFVTHINYSLPLIFLIFNTALTPTGLFWQDNPIMWIHLPASPKKVLLPYYDAIADLIILGRDHSKKYFGIEPSTIIQPYSKSQIDWLMQNTEMWPIACASFVGILDNHYPPNKLIQFCKLHTFVFPQIISKTPLNNALLVFTDGSSTGMAAYTLTDTTIKFQTNLNSAQLVELQALIAVLSAFPNQPLNIYTDSAYLAHSIPLLETVAQIKHISETAKLFLQCQQLIYNRSIPFYIGHVRAHSGLPGPIAQGNQRADLATKIVASNINT

SEQ ID NO: 8099 - protein, 665 aa, unidentified
TLQLDDEYRLYSPLVKPDQNIQFWLEQFPQAWAETAGMGLAKQVPPQVIQLKASATPVSVRQYPLSKEAQEGIRPHVQRLIQQGILVPVQSPWNTPLLPVRKPGTNDYRPVQDLREVNKRVQDIHPTVPNPYNLLCALPPQRSWYTVLDLKDAFFCLRLHPTSQPLFAFEWRDPGTGRTGQLTWTRLPQGFKNSPTIFDEALHRDLANFRIQHPQVTLLQYVDDLLLAGATKQDCLEGTKALLLELSDLGYRASAKKAQICRREVTYLGYSLRDGQRWLTEARKKTVVQIPAPTTAKQVREFLGTAGFCRLWIPGFATLAAPLYPLTKEKGEFSWAPEHQKAFDAIKKALLSAPALALPDVTKPFTLYVDERKGVARGVLTQTLGPWRRPVAYLSKKLDPVASGWPVCLKAIAAVAILVKDADKLTLGQNITVIAPHALENIVRQPPDRWMTNARMTHYQSLLLTERVTFAPPAALNPATLLPEETDEPVTHDCHQLLIEETGVRKDLTDIPLTGEVLTWFTDGSSYVVEGKRMAGAAVVDGTRTIWASSLPEGTSAQKAELMALTQALRLAEGKSINIYTDSRYAFATAHVHGAIYKQRGLLTSAGREIKNKEEILSLLEALHLPKRLAIIHCPGHQKAKDPISRGNQMADRVAKQAAQGVNLL

SEQ ID NO: 8100 - protein, 665 aa, unidentified; identical to SEQ ID NO: 8099

SEQ ID NO: 8101 - protein, 665 aa, synthetic construct
TLQLDDEYRLYSPLVKPDQNIQFWLEQFPQAWAETAGMGLAKQVPPQVIQLKASATPVSVRQYPLSKEAQEGIRPHVQRLIQQGILVPVQSPWNTPLLPVRKPGTNDYRPVQDLREVNKRVQDIHPTVPNPYNLLCALPPQRSWYTVLDLKDAFFCLRLHPTSQPLFAFEWRDPGTGRTGQLTWTRLPQGFKNSPTIFNEALHRDLANFRIQHPQVTLLQYVDDLLLAGATKQDCLEGTKALLLELSDLGYRASAKKAQICRREVTYLGYSLRDGQRWLTEARKKTVVQIPAPTTAKQVREFLGTAGFCRLWIPGFATLAAPLYPLTKPKGEFSWAPEHQKAFDAIKKALLSAPALALPDVTKPFTLYVDERKGVARGVLTQTLGPWRRPVAYLSKKLDPVASGWPVCLKAIAAVAILVKDADKLTLGQNITVIAPHALENIVRQPPDRWMTNARMTHYQSLLLTERVTFAPPAALNPATLLPEETDEPVTHDCHQLLIEETGVRKDLTDIPLTGEVLTWFTDGSSYVVEGKRMAGAAVVDGTRTIWASSLPEGTSAQKAELMALTQALRLAEGKSINIYTDSRYAFATAHVHGAIYKQRGWLTSAGREIKNKEEILSLLEALHLPKRLAIIHCPGHQKAKDPISRGNQMADRVAKQAAQGVNLL

SEQ ID NO: 8102 - protein, 665 aa, synthetic construct; identical to SEQ ID NO: 8101

SEQ ID NO: 8103 - protein, 663 aa, synthetic construct
LDDEYRLYSPLVKPDQNIQFWLEQFPQAWAETAGMGLAKQVPPQVIQLKASATPVSVRQYPLSKEAQEGIRPHVQRLIQQGILVPVQSPWNTPLLPVRKPGTNDYRPVQDLREVNKRVQDIHPTVPNPYNLLCALPPQRSWYTVLDLKDAFFCLRLHPTSQPLFAFEWRDPGTGRTGQLTWTRLPQGFKNSPTIFNEALHRDLANFRIQHPQVTLLQYVDDLLLAGATKQDCLEGTKALLLELSDLGYRASAKKAQICRREVTYLGYSLRDGQRWLTEARKKTVVQIPAPTTAKQVREFLGKAGFCRLFIPGFATLAAPLYPLTKPKGEFSWAPEHQKAFDAIKKALLSAPALALPDVTKPFTLYVDERKGVARGVLTQTLGPWRRPVAYLSKKLDPVASGWPVCLKAIAAVAILVKDADKLTLGQNITVIAPHALENIVRQPPDRWMTNARMTHYQSLLLTERVTFAPPAALNPATLLPEETDEPVTHDCHQLLIEETGVRKDLTDIPLTGEVLTWFTDGSSYVVEGKRMAGAAVVDGTRTIWASSLPEGTSAQKAELMALTQALRLAEGKSINIYTDSRYAFATAHVHGAIYKQRGWLTSAGREIKNKEEILSLLEALHLPKRLAIIHCPGHQKAKDPISRGNQMADRVAKQAAQGVNLLP

SEQ ID NO: 8104 - protein, 663 aa, synthetic construct; identical to SEQ ID NO: 8103

SEQ ID NO: 8105 - protein, 751 aa, Macaque simian foamy virus
MDPLQLLQPLEAEIKGTKLKAHWNSGATITCVPEAFLEDERPIQTMLIKTIHGEKQQDVYYLTFKVQGRKVEAEVLASPYDYILLNPSDVPWLMKKPLQLTVLVPLHEYQERLLQQTALPKEQKELLQKLFLKYDALWQHWENQVGHRRIKPHNIATGTLAPRPQKQYPINPKAKPSIQIVIDDLLKQGVLIQQNSTMNTPVYPVPKPDGKWRMVLDYREVNKTIPLIAAQNQHSAGILSSIYRGKYKTTLDLTNGFWAHPITPESYWLTAFTWQGKQYCWTRLPQGFLNSPALFTADVVDLLKEIPNVQAYVDDIYISHDDPQEHLEQLEKIFSILLNAGYVVSLKKSEIAQREVEFLGFNITKEGRGLTDTFKQKLLNITPPKDLKQLQSILGLLNFARNFIPNYSELVKPLYTIVANANGKFISWTEDNSNQLQHIISVLNQADNLEERNPETRLIIKVNSSPSAGYIRYYNEGSKRPIMYVNYIFSKAEAKFTQTEKLLTTMHKGLIKAMDLAMGQEILVYSPIVSMTKIQRTPLPERKALPVRWITWMTYLEDPRIQFHYDKSLPELQQIPNVTEDVIAKTKHPSEFAMVFYTDGSAIKHPDVNKSHSAGMGIAQVQFIPEYKIVHQWSIPLGDHTAQLAEIAAVEFACKKALKISGPVLIVTDSFYVAESANKELPYWKSNGFLNNKKKPLRHVSKWKSIAECLQLKPDIIIMHEKGHQQPMTTLHTEGNNLADKLATQGSYVVH

SEQ ID NO: 8106 - protein, 751 aa, synthetic construct
MDPLQLLQPLEAEIKGTKLKAHWNSGATITCVPEAFLEDERPIQTMLIKTIHGEKQQDVYYLTFKVQGRKVEAEVLASPYDYILLNPSDVPWLMKKPLQLTVLVPLHEYQERLLQQTALPKEQKELLQKLFLKYDALWQHWENQVGHRRIKPHNIATGTLAPRPQKQYPINPKAKPSIQIVIDDLLKQGVLIQQNSTMNTPVYPVPKPDGKWRMVLDYREVNKTIPLIAAQNQHSAGILSSIYRGKYKTTLDLTNGFWAHPITPESYWLTAFTWQGKQYCWTRLPQGFLNSPALFNADVVDLLKEIPNVQAYVDDIYISHDDPQEHLEQLEKIFSILLNAGYVVSLKKSEIAQREVEFLGFNITKEGRGLTDTFKQKLLNITPPKDLKQLQSILGLLNFARNFIPNYSELVKPLYTIVAPANGKFISWTEDNSNQLQHIISVLNQADNLEERNPETRLIIKVNSSPSAGYIRYYNEGSKRPIMYVNYIFSKAEAKFTQTEKLLTTMHKGLIKAMDLAMGQEILVYSPIVSMTKIQRTPLPERKALPVRWITWMTYLEDPRIQFHYDKSLPELQQIPNVTEDVIAKTKHPSEFAMVFYTDGSAIKHPDVNKSHSAGMGIAQVQFIPEYKIVHQWSIPLGDHTAQLAEIAAVEFACKKALKISGPVLIVTDSFYVAESANKELPYWKSNGFLNNKKKPLRHVSKWKSIAECLQLKPDIIIMHEKGHQQPMTTLHTEGNNLADKLATQGSYVVH

SEQ ID NO: 8107 - protein, 751 aa, synthetic construct
MDPLQLLQPLEAEIKGTKLKAHWNSGATITCVPEAFLEDERPIQTMLIKTIHGEKQQDVYYLTFKVQGRKVEAEVLASPYDYILLNPSDVPWLMKKPLQLTVLVPLHEYQERLLQQTALPKEQKELLQKLFLKYDALWQHWENQVGHRRIKPHNIATGTLAPRPQKQYPINPKAKPSIQIVIDDLLKQGVLIQQNSTMNTPVYPVPKPDGKWRMVLDYREVNKTIPLIAAQNQHSAGILSSIYRGKYKTTLDLTNGFWAHPITPESYWLTAFTWQGKQYCWTRLPQGFLNSPALFNADVVDLLKEIPNVQAYVDDIYISHDDPQEHLEQLEKIFSILLNAGYVVSLKKSEIAQREVEFLGFNITKEGRGLTDTFKQKLLNITPPKDLKQLQSILGKLNFARNFIPNYSELVKPLYTIVAPANGKFISWTEDNSNQLQHIISVLNQADNLEERNPETRLIIKVNSSPSAGYIRYYNEGSKRPIMYVNYIFSKAEAKFTQTEKLLTTMHKGLIKAMDLAMGQEILVYSPIVSMTKIQRTPLPERKALPVRWITWMTYLEDPRIQFHYDKSLPELQQIPNVTEDVIAKTKHPSEFAMVFYTDGSAIKHPDVNKSHSAGMGIAQVQFIPEYKIVHQWSIPLGDHTAQLAEIAAVEFACKKALKISGPVLIVTDSFYVAESANKELPYWKSNGFLNNKKKPLRHVSKWKSIAECLQLKPDIIIMHEKGHQQPMTTLHTEGNNLADKLATQGSYVVH

SEQ ID NO: 8108 - protein, 662 aa, Macaque simian foamy virus
VPWLMKKPLQLTVLVPLHEYQERLLQQTALPKEQKELLQKLFLKYDALWQHWENQVGHRRIKPHNIATGTLAPRPQKQYPINPKAKPSIQIVIDDLLKQGVLIQQNSTMNTPVYPVPKPDGKWRMVLDYREVNKTIPLIAAQNQHSAGILSSIYRGKYKTTLDLTNGFWAHPITPESYWLTAFTWQGKQYCWTRLPQGFLNSPALFTADVVDLLKEIPNVQAYVDDIYISHDDPQEHLEQLEKIFSILLNAGYVVSLKKSEIAQREVEFLGFNITKEGRGLTDTFKQKLLNITPPKDLKQLQSILGLLNFARNFIPNYSELVKPLYTIVANANGKFISWTEDNSNQLQHIISVLNQADNLEERNPETRLIIKVNSSPSAGYIRYYNEGSKRPIMYVNYIFSKAEAKFTQTEKLLTTMHKGLIKAMDLAMGQEILVYSPIVSMTKIQRTPLPERKALPVRWITWMTYLEDPRIQFHYDKSLPELQQIPNVTEDVIAKTKHPSEFAMVFYTDGSAIKHPDVNKSHSAGMGIAQVQFIPEYKIVHQWSIPLGDHTAQLAEIAAVEFACKKALKISGPVLIVTDSFYVAESANKELPYWKSNGFLNNKKKPLRHVSKWKSIAECLQLKPDIIIMHEKGHQQPMTTLHTEGNNLADKLATQGSYVVH

SEQ ID NO: 8109 - protein, 662 aa, synthetic construct
VPWLMKKPLQLTVLVPLHEYQERLLQQTALPKEQKELLQKLFLKYDALWQHWENQVGHRRIKPHNIATGTLAPRPQKQYPINPKAKPSIQIVIDDLLKQGVLIQQNSTMNTPVYPVPKPDGKWRMVLDYREVNKTIPLIAAQNQHSAGILSSIYRGKYKTTLDLTNGFWAHPITPESYWLTAFTWQGKQYCWTRLPQGFLNSPALFNADVVDLLKEIPNVQAYVDDIYISHDDPQEHLEQLEKIFSILLNAGYVVSLKKSEIAQREVEFLGFNITKEGRGLTDTFKQKLLNITPPKDLKQLQSILGLLNFARNFIPNYSELVKPLYTIVAPANGKFISWTEDNSNQLQHIISVLNQADNLEERNPETRLIIKVNSSPSAGYIRYYNEGSKRPIMYVNYIFSKAEAKFTQTEKLLTTMHKGLIKAMDLAMGQEILVYSPIVSMTKIQRTPLPERKALPVRWITWMTYLEDPRIQFHYDKSLPELQQIPNVTEDVIAKTKHPSEFAMVFYTDGSAIKHPDVNKSHSAGMGIAQVQFIPEYKIVHQWSIPLGDHTAQLAEIAAVEFACKKALKISGPVLIVTDSFYVAESANKELPYWKSNGFLNNKKKPLRHVSKWKSIAECLQLKPDIIIMHEKGHQQPMTTLHTEGNNLADKLATQGSYVVH

SEQ ID NO: 8110 - protein, 662 aa, synthetic construct
VPWLMKKPLQLTVLVPLHEYQERLLQQTALPKEQKELLQKLFLKYDALWQHWENQVGHRRIKPHNIATGTLAPRPQKQYPINPKAKPSIQIVIDDLLKQGVLIQQNSTMNTPVYPVPKPDGKWRMVLDYREVNKTIPLIAAQNQHSAGILSSIYRGKYKTTLDLTNGFWAHPITPESYWLTAFTWQGKQYCWTRLPQGFLNSPALFNADVVDLLKEIPNVQAYVDDIYISHDDPQEHLEQLEKIFSILLNAGYVVSLKKSEIAQREVEFLGFNITKEGRGLTDTFKQKLLNITPPKDLKQLQSILGKLNFARNFIPNYSELVKPLYTIVAPANGKFISWTEDNSNQLQHIISVLNQADNLEERNPETRLIIKVNSSPSAGYIRYYNEGSKRPIMYVNYIFSKAEAKFTQTEKLLTTMHKGLIKAMDLAMGQEILVYSPIVSMTKIQRTPLPERKALPVRWITWMTYLEDPRIQFHYDKSLPELQQIPNVTEDVIAKTKHPSEFAMVFYTDGSAIKHPDVNKSHSAGMGIAQVQFIPEYKIVHQWSIPLGDHTAQLAEIAAVEFACKKALKISGPVLIVTDSFYVAESANKELPYWKSNGFLNNKKKPLRHVSKWKSIAECLQLKPDIIIMHEKGHQQPMTTLHTEGNNLADKLATQGSYVVH

SEQ ID NO: 8111 - protein, 751 aa, unidentified
MDPLQLLQPLEAEIKGTKLKAHWNSGATITCVPQAFLEEEVPIKNIWIKTIHGEKEQPVYYLTFKIQGRKVEAEVISSPYDYILVSPSDIPWLMKKPLQLTTLVPLQEYEERLLKQTMLTGSYKEKLQSLFLKYDALWQHWENQVGHRRIKPHHIATGTVNPRPQKQYPINPKAKASIQTVINDLLKQGVLIQQNSIMNTPVYPVPKPDGKWRMVLDYREVNKTIPLIAAQNQHSAGILSSIFRGKYKTTLDLSNGFWAHSITPESYWLTAFTWLGQQYCWTRLPQGFLNSPALFTADVVDLLKEVPNVQVYVDDIYISHDDPREHLEQLEKVFSLLLNAGYVVSLKKSEIAQHEVEFLGFNITKEGRGLTETFKQKLLNITPPRDLKQLQSILGLLNFARNFIPNFSELVKPLYNIIATANGKYITWTTDNSQQLQNIISMLNSAENLEERNPEVRLIMKVNTSPSAGYIRFYNEFAKRPIMYLNYVYTKAEVKFTNTEKLLTTIHKGLIKALDLGMGQEILVYSPIVSMTKIQKTPLPERKALPIRWITWMSYLEDPRIQFHYDKTLPELQQVPTVTDDIIAKIKHPSEFSMVFYTDGSAIKHPNVNKSHNAGMGIAQVQFKPEFTVINTWSIPLGDHTAQLAEVAAVEFACKKALKIDGPVLIVTDSFYVAESVNKELPYWQSNGFFNNKKKPLKHVSKWKSIADCIQLKPDIIIIHEKGHQPTASTFHTEGNNLADKLATQGSYVVN

SEQ ID NO: 8112 - protein, 751 aa, synthetic construct
MDPLQLLQPLEAEIKGTKLKAHWNSGATITCVPQAFLEEEVPIKNIWIKTIHGEKEQPVYYLTFKIQGRKVEAEVISSPYDYILVSPSDIPWLMKKPLQLTTLVPLQEYEERLLKQTMLTGSYKEKLQSLFLKYDALWQHWENQVGHRRIKPHHIATGTVNPRPQKQYPINPKAKASIQTVINDLLKQGVLIQQNSIMNTPVYPVPKPDGKWRMVLDYREVNKTIPLIAAQNQHSAGILSSIFRGKYKTTLDLSNGFWAHSITPESYWLTAFTWLGQQYCWTRLPQGFLNSPALFNADVVDLLKEVPNVQVYVDDIYISHDDPREHLEQLEKVFSLLLNAGYVVSLKKSEIAQHEVEFLGFNITKEGRGLTETFKQKLLNITPPRDLKQLQSILGLLNFARNFIPNFSELVKPLYNIIATAPGKYITWTTDNSQQLQNIISMLNSAENLEERNPEVRLIMKVNTSPSAGYIRFYNEFAKRPIMYLNYVYTKAEVKFTNTEKLLTTIHKGLIKALDLGMGQEILVYSPIVSMTKIQKTPLPERKALPIRWITWMSYLEDPRIQFHYDKTLPELQQVPTVTDDIIAKIKHPSEFSMVFYTDGSAIKHPNVNKSHNAGMGIAQVQFKPEFTVINTWSIPLGDHTAQLAEVAAVEFACKKALKIDGPVLIVTDSFYVAESVNKELPYWQSNGFFNNKKKPLKHVSKWKSIADCIQLKPDIIIIHEKGHQPTASTFHTEGNNLADKLATQGSYVVN

SEQ ID NO: 8113 - protein, 751 aa, synthetic construct
MDPLQLLQPLEAEIKGTKLKAHWNSGATITCVPQAFLEEEVPIKNIWIKTIHGEKEQPVYYLTFKIQGRKVEAEVISSPYDYILVSPSDIPWLMKKPLQLTTLVPLQEYEERLLKQTMLTGSYKEKLQSLFLKYDALWQHWENQVGHRRIKPHHIATGTVNPRPQKQYPINPKAKASIQTVINDLLKQGVLIQQNSIMNTPVYPVPKPDGKWRMVLDYREVNKTIPLIAAQNQHSAGILSSIFRGKYKTTLDLSNGFWAHSITPESYWLTAFTWLGQQYCWTRLPQGFLNSPALFNADVVDLLKEVPNVQVYVDDIYISHDDPREHLEQLEKVFSLLLNAGYVVSLKKSEIAQHEVEFLGFNITKEGRGLTETFKQKLLNITPPRDLKQLQSILGKLNFARNFIPNFSELVKPLYNIIATAPGKYITWTTDNSQQLQNIISMLNSAENLEERNPEVRLIMKVNTSPSAGYIRFYNEFAKRPIMYLNYVYTKAEVKFTNTEKLLTTIHKGLIKALDLGMGQEILVYSPIVSMTKIQKTPLPERKALPIRWITWMSYLEDPRIQFHYDKTLPELQQVPTVTDDIIAKIKHPSEFSMVFYTDGSAIKHPNVNKSHNAGMGIAQVQFKPEFTVINTWSIPLGDHTAQLAEVAAVEFACKKALKIDGPVLIVTDSFYVAESVNKELPYWQSNGFFNNKKKPLKHVSKWKSIADCIQLKPDIIIIHEKGHQPTASTFHTEGNNLADKLATQGSYVVN

SEQ ID NO: 8114 - protein, 662 aa, unidentified
IPWLMKKPLQLTTLVPLQEYEERLLKQTMLTGSYKEKLQSLFLKYDALWQHWENQVGHRRIKPHHIATGTVNPRPQKQYPINPKAKASIQTVINDLLKQGVLIQQNSIMNTPVYPVPKPDGKWRMVLDYREVNKTIPLIAAQNQHSAGILSSIFRGKYKTTLDLSNGFWAHSITPESYWLTAFTWLGQQYCWTRLPQGFLNSPALFTADVVDLLKEVPNVQVYVDDIYISHDDPREHLEQLEKVFSLLLNAGYVVSLKKSEIAQHEVEFLGFNITKEGRGLTETFKQKLLNITPPRDLKQLQSILGLLNFARNFIPNFSELVKPLYNIIATANGKYITWTTDNSQQLQNIISMLNSAENLEERNPEVRLIMKVNTSPSAGYIRFYNEFAKRPIMYLNYVYTKAEVKFTNTEKLLTTIHKGLIKALDLGMGQEILVYSPIVSMTKIQKTPLPERKALPIRWITWMSYLEDPRIQFHYDKTLPELQQVPTVTDDIIAKIKHPSEFSMVFYTDGSAIKHPNVNKSHNAGMGIAQVQFKPEFTVINTWSIPLGDHTAQLAEVAAVEFACKKALKIDGPVLIVTDSFYVAESVNKELPYWQSNGFFNNKKKPLKHVSKWKSIADCIQLKPDIIIIHEKGHQPTASTFHTEGNNLADKLATQGSYVVN

SEQ ID NO: 8115 - protein, 662 aa, synthetic construct
IPWLMKKPLQLTTLVPLQEYEERLLKQTMLTGSYKEKLQSLFLKYDALWQHWENQVGHRRIKPHHIATGTVNPRPQKQYPINPKAKASIQTVINDLLKQGVLIQQNSIMNTPVYPVPKPDGKWRMVLDYREVNKTIPLIAAQNQHSAGILSSIFRGKYKTTLDLSNGFWAHSITPESYWLTAFTWLGQQYCWTRLPQGFLNSPALFNADVVDLLKEVPNVQVYVDDIYISHDDPREHLEQLEKVFSLLLNAGYVVSLKKSEIAQHEVEFLGFNITKEGRGLTETFKQKLLNITPPRDLKQLQSILGLLNFARNFIPNFSELVKPLYNIIATAPGKYITWTTDNSQQLQNIISMLNSAENLEERNPEVRLIMKVNTSPSAGYIRFYNEFAKRPIMYLNYVYTKAEVKFTNTEKLLTTIHKGLIKALDLGMGQEILVYSPIVSMTKIQKTPLPERKALPIRWITWMSYLEDPRIQFHYDKTLPELQQVPTVTDDIIAKIKHPSEFSMVFYTDGSAIKHPNVNKSHNAGMGIAQVQFKPEFTVINTWSIPLGDHTAQLAEVAAVEFACKKALKIDGPVLIVTDSFYVAESVNKELPYWQSNGFFNNKKKPLKHVSKWKSIADCIQLKPDIIIIHEKGHQPTASTFHTEGNNLADKLATQGSYVVN

SEQ ID NO: 8116 - protein, 662 aa, synthetic construct
IPWLMKKPLQLTTLVPLQEYEERLLKQTMLTGSYKEKLQSLFLKYDALWQHWENQVGHRRIKPHHIATGTVNPRPQKQYPINPKAKASIQTVINDLLKQGVLIQQNSIMNTPVYPVPKPDGKWRMVLDYREVNKTIPLIAAQNQHSAGILSSIFRGKYKTTLDLSNGFWAHSITPESYWLTAFTWLGQQYCWTRLPQGFLNSPALFNADVVDLLKEVPNVQVYVDDIYISHDDPREHLEQLEKVFSLLLNAGYVVSLKKSEIAQHEVEFLGFNITKEGRGLTETFKQKLLNITPPRDLKQLQSILGKLNFARNFIPNFSELVKPLYNIIATAPGKYITWTTDNSQQLQNIISMLNSAENLEERNPEVRLIMKVNTSPSAGYIRFYNEFAKRPIMYLNYVYTKAEVKFTNTEKLLTTIHKGLIKALDLGMGQEILVYSPIVSMTKIQKTPLPERKALPIRWITWMSYLEDPRIQFHYDKTLPELQQVPTVTDDIIAKIKHPSEFSMVFYTDGSAIKHPNVNKSHNAGMGIAQVQFKPEFTVINTWSIPLGDHTAQLAEVAAVEFACKKALKIDGPVLIVTDSFYVAESVNKELPYWQSNGFFNNKKKPLKHVSKWKSIADCIQLKPDIIIIHEKGHQPTASTFHTEGNNLADKLATQGSYVVN

SEQ ID NO: 8117 - protein, 751 aa, Simian foamy virus
MNPLQLLQPLPAEVKGTKLLAHWNSGATITCIPESFLEDEQPIKQTLIKTIHGEKQQNVYYLTFKVKGRKVEAEVIASPYEYILLSPTDVPWLTQQPLQLTILVPLQEYQDRILNKTALPEEQKQQLKALFTKYDNLWQHWENQVGHRKIRPHNIATGDYPPRPQKQYPINPKAKPSIQIVIDDLLKQGVLTPQNSTMNTPVYPVPKPDGRWRMVLDYREVNKTIPLTAAQNQHSAGILATIVRQKYKTTLDLANGFWAHPITPDSYWLTAFTWQGKQYCWTRLPQGFLNSPALFTADAVDLLKEVPNVQVYVDDIYLSHDNPHEHIQQLEKVFQILLQAGYVVSLKKSEIGQRTVEFLGFNITKEGRGLTDTFKTKLLNVTPPKDLKQLQSILGLLNFARNFIPNFAELVQTLYNLIASSKGKYIEWTEDNTKQLNKVIEALNTASNLEERLPDQRLVIKVNTSPSAGYVRYYNESGKKPIMYLNYVFSKAELKFSMLEKLLTTMHKALIKAMDLAMGQEILVYSPIVSMTKIQKTPLPERKALPIRWITWMTYLEDPRIQFHYDKTLPELKHIPDVYTSSIPPLKHPSQYEGVFCTDGSAIKSPDPTKSNNAGMGIVHAIYNPEYKILNQWSIPLGHHTAQMAEIAAVEFACKKALKVPGPVLVITDSFYVAESANKELPYWKSNGFVNNKKEPLKHISKWKSIAECLSIKPDITIQHEKGHQPINTSIHTEGNALADKLATQGSYVVN

SEQ ID NO: 8118 - protein, 751 aa, synthetic construct
MNPLQLLQPLPAEVKGTKLLAHWNSGATITCIPESFLEDEQPIKQTLIKTIHGEKQQNVYYLTFKVKGRKVEAEVIASPYEYILLSPTDVPWLTQQPLQLTILVPLQEYQDRILNKTALPEEQKQQLKALFTKYDNLWQHWENQVGHRKIRPHNIATGDYPPRPQKQYPINPKAKPSIQIVIDDLLKQGVLTPQNSTMNTPVYPVPKPDGRWRMVLDYREVNKTIPLTAAQNQHSAGILATIVRQKYKTTLDLANGFWAHPITPDSYWLTAFTWQGKQYCWTRLPQGFLNSPALFNADAVDLLKEVPNVQVYVDDIYLSHDNPHEHIQQLEKVFQILLQAGYVVSLKKSEIGQRTVEFLGFNITKEGRGLTDTFKTKLLNVTPPKDLKQLQSILGLLNFARNFIPNFAELVQTLYNLIASSPGKYIEWTEDNTKQLNKVIEALNTASNLEERLPDQRLVIKVNTSPSAGYVRYYNESGKKPIMYLNYVFSKAELKFSMLEKLLTTMHKALIKAMDLAMGQEILVYSPIVSMTKIQKTPLPERKALPIRWITWMTYLEDPRIQFHYDKTLPELKHIPDVYTSSIPPLKHPSQYEGVFCTDGSAIKSPDPTKSNNAGMGIVHAIYNPEYKILNQWSIPLGHHTAQMAEIAAVEFACKKALKVPGPVLVITDSFYVAESANKELPYWKSNGFVNNKKEPLKHISKWKSIAECLSIKPDITIQHEKGHQPINTSIHTEGNALADKLATQGSYVVN

SEQ ID NO: 8119 - protein, 751 aa, synthetic construct
MNPLQLLQPLPAEVKGTKLLAHWNSGATITCIPESFLEDEQPIKQTLIKTIHGEKQQNVYYLTFKVKGRKVEAEVIASPYEYILLSPTDVPWLTQQPLQLTILVPLQEYQDRILNKTALPEEQKQQLKALFTKYDNLWQHWENQVGHRKIRPHNIATGDYPPRPQKQYPINPKAKPSIQIVIDDLLKQGVLTPQNSTMNTPVYPVPKPDGRWRMVLDYREVNKTIPLTAAQNQHSAGILATIVRQKYKTTLDLANGFWAHPITPDSYWLTAFTWQGKQYCWTRLPQGFLNSPALFNADAVDLLKEVPNVQVYVDDIYLSHDNPHEHIQQLEKVFQILLQAGYVVSLKKSEIGQRTVEFLGFNITKEGRGLTDTFKTKLLNVTPPKDLKQLQSILGKLNFARNFIPNFAELVQTLYNLIASSPGKYIEWTEDNTKQLNKVIEALNTASNLEERLPDQRLVIKVNTSPSAGYVRYYNESGKKPIMYLNYVFSKAELKFSMLEKLLTTMHKALIKAMDLAMGQEILVYSPIVSMTKIQKTPLPERKALPIRWITWMTYLEDPRIQFHYDKTLPELKHIPDVYTSSIPPLKHPSQYEGVFCTDGSAIKSPDPTKSNNAGMGIVHAIYNPEYKILNQWSIPLGHHTAQMAEIAAVEFACKKALKVPGPVLVITDSFYVAESANKELPYWKSNGFVNNKKEPLKHISKWKSIAECLSIKPDITIQHEKGHQPINTSIHTEGNALADKLATQGSYVVN

SEQ ID NO: 8120 - protein, 662 aa, Simian foamy virus
VPWLTQQPLQLTILVPLQEYQDRILNKTALPEEQKQQLKALFTKYDNLWQHWENQVGHRKIRPHNIATGDYPPRPQKQYPINPKAKPSIQIVIDDLLKQGVLTPQNSTMNTPVYPVPKPDGRWRMVLDYREVNKTIPLTAAQNQHSAGILATIVRQKYKTTLDLANGFWAHPITPDSYWLTAFTWQGKQYCWTRLPQGFLNSPALFTADAVDLLKEVPNVQVYVDDIYLSHDNPHEHIQQLEKVFQILLQAGYVVSLKKSEIGQRTVEFLGFNITKEGRGLTDTFKTKLLNVTPPKDLKQLQSILGLLNFARNFIPNFAELVQTLYNLIASSKGKYIEWTEDNTKQLNKVIEALNTASNLEERLPDQRLVIKVNTSPSAGYVRYYNESGKKPIMYLNYVFSKAELKFSMLEKLLTTMHKALIKAMDLAMGQEILVYSPIVSMTKIQKTPLPERKALPIRWITWMTYLEDPRIQFHYDKTLPELKHIPDVYTSSIPPLKHPSQYEGVFCTDGSAIKSPDPTKSNNAGMGIVHAIYNPEYKILNQWSIPLGHHTAQMAEIAAVEFACKKALKVPGPVLVITDSFYVAESANKELPYWKSNGFVNNKKEPLKHISKWKSIAECLSIKPDITIQHEKGHQPINTSIHTEGNALADKLATQGSYVVN

SEQ ID NO: 8121 - protein, 662 aa, synthetic construct
VPWLTQQPLQLTILVPLQEYQDRILNKTALPEEQKQQLKALFTKYDNLWQHWENQVGHRKIRPHNIATGDYPPRPQKQYPINPKAKPSIQIVIDDLLKQGVLTPQNSTMNTPVYPVPKPDGRWRMVLDYREVNKTIPLTAAQNQHSAGILATIVRQKYKTTLDLANGFWAHPITPDSYWLTAFTWQGKQYCWTRLPQGFLNSPALFNADAVDLLKEVPNVQVYVDDIYLSHDNPHEHIQQLEKVFQILLQAGYVVSLKKSEIGQRTVEFLGFNITKEGRGLTDTFKTKLLNVTPPKDLKQLQSILGLLNFARNFIPNFAELVQTLYNLIASSPGKYIEWTEDNTKQLNKVIEALNTASNLEERLPDQRLVIKVNTSPSAGYVRYYNESGKKPIMYLNYVFSKAELKFSMLEKLLTTMHKALIKAMDLAMGQEILVYSPIVSMTKIQKTPLPERKALPIRWITWMTYLEDPRIQFHYDKTLPELKHIPDVYTSSIPPLKHPSQYEGVFCTDGSAIKSPDPTKSNNAGMGIVHAIYNPEYKILNQWSIPLGHHTAQMAEIAAVEFACKKALKVPGPVLVITDSFYVAESANKELPYWKSNGFVNNKKEPLKHISKWKSIAECLSIKPDITIQHEKGHQPINTSIHTEGNALADKLATQGSYVVN

SEQ ID NO: 8122 - protein, 662 aa, synthetic construct
VPWLTQQPLQLTILVPLQEYQDRILNKTALPEEQKQQLKALFTKYDNLWQHWENQVGHRKIRPHNIATGDYPPRPQKQYPINPKAKPSIQIVIDDLLKQGVLTPQNSTMNTPVYPVPKPDGRWRMVLDYREVNKTIPLTAAQNQHSAGILATIVRQKYKTTLDLANGFWAHPITPDSYWLTAFTWQGKQYCWTRLPQGFLNSPALFNADAVDLLKEVPNVQVYVDDIYLSHDNPHEHIQQLEKVFQILLQAGYVVSLKKSEIGQRTVEFLGFNITKEGRGLTDTFKTKLLNVTPPKDLKQLQSILGKLNFARNFIPNFAELVQTLYNLIASSPGKYIEWTEDNTKQLNKVIEALNTASNLEERLPDQRLVIKVNTSPSAGYVRYYNESGKKPIMYLNYVFSKAELKFSMLEKLLTTMHKALIKAMDLAMGQEILVYSPIVSMTKIQKTPLPERKALPIRWITWMTYLEDPRIQFHYDKTLPELKHIPDVYTSSIPPLKHPSQYEGVFCTDGSAIKSPDPTKSNNAGMGIVHAIYNPEYKILNQWSIPLGHHTAQMAEIAAVEFACKKALKVPGPVLVITDSFYVAESANKELPYWKSNGFVNNKKEPLKHISKWKSIAECLSIKPDITIQHEKGHQPINTSIHTEGNALADKLATQGSYVVN

SEQ ID NO: 8123 - protein, 592 aa, Squirrel monkey retrovirus
PRSRAIDIPVPHADKISWKITDPVWVDQWPLTYEKTLAAIALVQEQLAAGHIEPTNSPWNTPIFIIKKKSGSWRLLQDLRAVNKVMVPMGALQPGLPSPVAIPLNYHKIVIDLKDCFFTIPLHPEDRPYFAFSVPQINFQSPMPRYQWKVLPQGMANSPTLCQKFVAAAIAPVRSQWPEAYILHYMDDILLACDSAEAAKACYAHIISCLTSYGLKIAPDKVQVSEPFSYLGFELHHQQVFTPRVCLKTDHLKTLNDFQKLLGDIQWLRPYLKLPTSALVPLNNILKGDPNPLSVRALTPEAKQSLALINKAIQNQSVQQISYNLPLVLLLLPTPHTPTAVFWQPNGTDPTKNGSPLLWLHLPASPSKVLLTYPSLLAMLIIKGRYTGRQLFGRDPHSIIIPYTQDQLTWLLQTSDEWAIALSSFTGDIDNHYPSDPVIQFAKLHQFIFPKITKCAPIPQATLVFTDGSSNGIAAYVIDNQPISIKSPYLSAQLVELYAILQVFTVLAHQPFNLYTDSAYIAQSVPLLETVPFIKSSTNATPLFSKLQQLILNRQHPFFIGHLRAHLNLPGPLAEGNALADAATQIFPIISD

SEQ ID NO: 8124 - protein, 592 aa, synthetic construct
PRSRAIDIPVPHADKISWKITDPVWVDQWPLTYEKTLAAIALVQEQLAAGHIEPTNSPWNTPIFIIKKKSGSWRLLQDLRAVNKVMVPMGALQPGLPSPVAIPLNYHKIVIDLKDCFFTIPLHPEDRPYFAFSVPQINFQSPMPRYQWKVLPQGMANSPTLCQKFVAAAIAPVRSQWPEAYILHYMDDILLACDSAEAAKACYAHIISCLTSYGLKIAPDKVQVSEPFSYLGFELHHQQVFTPRVCLKTDHLKTLNDFQKLLGDIQWLRPYLKLPTSALVPLNNILKPDPNPLSVRALTPEAKQSLALINKAIQNQSVQQISYNLPLVLLLLPTPHTPTAVFWQPNGTDPTKNGSPLLWLHLPASPSKVLLTYPSLLAMLIIKGRYTGRQLFGRDPHSIIIPYTQDQLTWLLQTSDEWAIALSSFTGDIDNHYPSDPVIQFAKLHQFIFPKITKCAPIPQATLVFTDGSSNGIAAYVIDNQPISIKSPYLSAQLVELYAILQVFTVLAHQPFNLYTDSAYIAQSVPLLETVPFIKSSTNATPLFSKLQQLILNRQHPFFIGHLRAHLNLPGPLAEGNALADAATQIFPIISD

SEQ ID NO: 8125 - protein, 592 aa, synthetic construct
PRSRAIDIPVPHADKISWKITDPVWVDQWPLTYEKTLAAIALVQEQLAAGHIEPTNSPWNTPIFIIKKKSGSWRLLQDLRAVNKVMVPMGALQPGLPSPVAPPLNYHKIVIDLKDCFFTIPLHPEDRPYFAFSVPQINFQSPMPRYQWKVLPQGMANSPTLCQKFVAAAIAPVRSQWPEAYILHYMDDILLACDSAEAAKACYAHIISCLTSYGLKIAPDKVQVSEPFSYLGFELHHQQVFTPRVCLKTDHLKTLNDFQKLLGDIQWLRPYLKLPTSALVPLNNILKPDPNPLSVRALTPEAKQSLALINKAIQNQSVQQISYNLPLVLLLLPTPHTPTAVFWQPNGTDPTKNGSPLLWLHLPASPSKVLLTYPSLLAMLIIKGRYTGRQLFGRDPHSIIIPYTQDQLTWLLQTSDEWAIALSSFTGDIDNHYPSDPVIQFAKLHQFIFPKITKCAPIPQATLVFTDGSSNGIAAYVIDNQPISIKSPYLSAQLVELYAILQVFTVLAHQPFNLYTDSAYIAQSVPLLETVPFIKSSTNATPLFSKLQQLILNRQHPFFIGHLRAHLNLPGPLAEGNALADAATQIFPIISD

SEQ ID NO: 8126 - protein, 585 aa, unidentified
LATAVDILAPQRYADPITWKSDEPVWVDQWPLTQEKLAAAQQLVQEQLQAGHIIESNSPWNTPIFVIKKKSGKWRLLQDLRAVNATMVLMGALQPGLPSPVAIPQGYFKIVIDLKDCFFTIPLQPVDQKRFAFSLPSTNFKQPMKRYQWKVLPQGMANSPTLCQKYVAAAIEPVRKSWAQMYIIHYMDDILIAGKLGEQVLQCFAQLKQALTTTGLQIAPEKVQLQDPYTYLGFQINGPKITNQKAVIRRDKLQTLNDFQKLLGDINWLRPYLHLTTGDLKPLFDILKGDSNPNSPRSLSEAALASLQKVETAIAEQFVTQIDYTQPLTFLIFNTTLTPTGLFWQNNPVMWVHLPASPKKVLLPYYDAIADLIILGRDNSKKYFGLEPSTIIQPYSKSQIHWLMQNTETWPIACASYAGNIDNHYPPNKLIQFCKLHAVVFPRIISKTPLDNALLVFTDGSSTGIAAYTFEKTTVRFKTSHTSAQLVELQALIAVLSAFPHRALNVYTDSAYLAHSIPLLETVSHIKHISDTAKFFLQCQQLIYNRSIPFYLGHIRAHSGLPGPLSQGNHITDLATKVVATTLTT

SEQ ID NO: 8127 - protein, 585 aa, synthetic construct
LATAVDILAPQRYADPITWKSDEPVWVDQWPLTQEKLAAAQQLVQEQLQAGHIIESNSPWNTPIFVIKKKSGKWRLLQDLRAVNATMVLMGALQPGLPSPVAPPQGYFKIVIDLKDCFFTIPLQPVDQKRFAFSLPSTNFKQPMKRYQWKVLPQGMANSPTLCQKYVAAAIEPVRKSWAQMYIIHYMDDILIAGKLGEQVLQCFAQLKQALTTTGLQIAPEKVQLQDPYTYLGFQINGPKITNQKAVIRRDKLQTLNDFQKLLGDINWLRPYLHLTTGDLKPLFDILKGDSNPNSPRSLSEAALASLQKVETAIAEQFVTQIDYTQPLTFLIFNTTLTPTGLFWQNNPVMWVHLPASPKKVLLPYYDAIADLIILGRDNSKKYFGLEPSTIIQPYSKSQIHWLMQNTETWPIACASYAGNIDNHYPPNKLIQFCKLHAVVFPRIISKTPLDNALLVFTDGSSTGIAAYTFEKTTVRFKTSHTSAQLVELQALIAVLSAFPHRALNVYTDSAYLAHSIPLLETVSHIKHISDTAKFFLQCQQLIYNRSIPFYLGHIRAHSGLPGPLSQGNHITDLATKVVATTLTT

SEQ ID NO: 8128 - protein, 650 aa, Walleye dermal sarcoma virus
SCQTKNTLNIDEYLLQFPDQLWASLPTDIGRMLVPPITIKIKDNASLPSIRQYPLPKDKTEGLRPLISSLENQGILIKCHSPCNTPIFPIKKAGRDEYRMIHDLRAINNIVAPLTAVVASPTTVLSNLAPSLHWFTVIDLSNAFFSVPIHKDSQYLFAFTFEGHQYTWTVLPQGFIHSPTLFSQALYQSLHKIKFKISSEICIYMDDVLIASKDRDTNLKDTAVMLQHLASEGHKVSKKKLQLCQQEVVYLGQLLTPEGRKILPDRKVTVSQFQQPTTIRQIRAFLGLVGYCRHWIPEFSIHSKFLEKQLKKDTAEPFQLDDQQVEAFNKLKHAITTAPVLVVPDPAKPFQLYTSHSEHASIAVLTQKHAGRTRPIAFLSSKFDAIESGLPPCLKACASIHRSLTQADSFILGAPLIIYTTHAICTLLQRDRSQLVTASRFSKWEADLLRPELTFVACSAVSPAHLYMQSCENNIPPHDCVLLTHTISRPRPDLSDLPIPDPDMTLFSDGSYTTGRGGAAVVMHRPVTDDFIIIHQQPGGASAQTAELLALAAACHLATDKTVNIYTDSRYAYGVVHDFGHLWMHRGFVTSAGTPIKNHKEIEYLLKQIMKPKQVSVIKIEAHTKGVSMEVRGNAAADEAAKNAVFLVQR

SEQ ID NO: 8129 - protein, 650 aa, synthetic construct
SCQTKNTLNIDEYLLQFPDQLWASLPTDIGRMLVPPITIKIKDNASLPSIRQYPLPKDKTEGLRPLISSLENQGILIKCHSPCNTPIFPIKKAGRDEYRMIHDLRAINNIVAPLTAVVASPTTVLSNLAPSLHWFTVIDLSNAFFSVPIHKDSQYLFAFTFEGHQYTWTVLPQGFIHSPTLFNQALYQSLHKIKFKISSEICIYMDDVLIASKDRDTNLKDTAVMLQHLASEGHKVSKKKLQLCQQEVVYLGQLLTPEGRKILPDRKVTVSQFQQPTTIRQIRAFLGLVGYCRHWIPEFSIHSKFLEKQLKPDTAEPFQLDDQQVEAFNKLKHAITTAPVLVVPDPAKPFQLYTSHSEHASIAVLTQKHAGRTRPIAFLSSKFDAIESGLPPCLKACASIHRSLTQADSFILGAPLIIYTTHAICTLLQRDRSQLVTASRFSKWEADLLRPELTFVACSAVSPAHLYMQSCENNIPPHDCVLLTHTISRPRPDLSDLPIPDPDMTLFSDGSYTTGRGGAAVVMHRPVTDDFIIIHQQPGGASAQTAELLALAAACHLATDKTVNIYTDSRYAYGVVHDFGHLWMHRGFVTSAGTPIKNHKEIEYLLKQIMKPKQVSVIKIEAHTKGVSMEVRGNAAADEAAKNAVFLVQR

SEQ ID NO: 8130 - protein, 650 aa, synthetic construct
SCQTKNTLNIDEYLLQFPDQLWASLPTDIGRMLVPPITIKIKDNASLPSIRQYPLPKDKTEGLRPLISSLENQGILIKCHSPCNTPIFPIKKAGRDEYRMIHDLRAINNIVAPLTAVVASPTTVLSNLAPSLHWFTVIDLSNAFFSVPIHKDSQYLFAFTFEGHQYTWTVLPQGFIHSPTLFNQALYQSLHKIKFKISSEICIYMDDVLIASKDRDTNLKDTAVMLQHLASEGHKVSKKKLQLCQQEVVYLGQLLTPEGRKILPDRKVTVSQFQQPTTIRQIRAFLGKVGYCRHFIPEFSIHSKFLEKQLKPDTAEPFQLDDQQVEAFNKLKHAITTAPVLVVPDPAKPFQLYTSHSEHASIAVLTQKHAGRTRPIAFLSSKFDAIESGLPPCLKACASIHRSLTQADSFILGAPLIIYTTHAICTLLQRDRSQLVTASRFSKWEADLLRPELTFVACSAVSPAHLYMQSCENNIPPHDCVLLTHTISRPRPDLSDLPIPDPDMTLFSDGSYTTGRGGAAVVMHRPVTDDFIIIHQQPGGASAQTAELLALAAACHLATDKTVNIYTDSRYAYGVVHDFGHLWMHRGFVTSAGTPIKNHKEIEYLLKQIMKPKQVSVIKIEAHTKGVSMEVRGNAAADEAAKNAVFLVQR

SEQ ID NO: 8131 - protein, 669 aa, Woolly monkey sarcoma virus
VLNLEEEYRLHEKPVPSSIDPSWLQLFPTVWAERAGMGLANQVPPVVVELRSGASPVAVRQYPMSKEAREGIRPHIQRFLDLGVLVPCQSPWNTPLLPVKKPGTNDYRPVQDLREINKRVQDIHPTVPNPYNLLSSLPPSHTWYSVLDLKDAFFCLKLHPNSQPLFAFEWRDPEKGNTGQLTWTRLPQGFKNSPTLFDEALHRDLAPFRALNPQVVLLQYVDDLLVAAPTYRDCKEGTQKLLQELSKLGYRVSAKKAQLCQKEVTYLGYLLKEGKRWLTPARKATVMKIPPPTTPRQVREFLGTAGFCRLWIPGFASLAAPLYPLTKESIPFIWTEEHQKAFDRIKEALLSAPALALPDLTKPFTLYVDERAGVARGVLTQTLGPWRRPVAYLSKKLDPVASGWPTCLKAVAAVALLLKDADKLTLGQNVTVIASHSLESIVRQPPDRWMTNARMTHYQSLLLNERVSFAPPAVLNPATLLPVESEATPVHRCSEILAEETGTRRDLKDQPLPGVPAWYTDGSSFIAEGKRRAGAAIVDGKRTVWASSLPEGTSAQKAELVALTQALRLAEGKDINIYTDSRYAFATAHIHGAIYKQRGLLTSAGKDIKNKEEILALLEAIHLPKRVAIIHCPGHQKGNDPVATGNRRADEAAKQAALSTRVLAETTKP

SEQ ID NO: 8132 - protein, 669 aa, synthetic construct
VLNLEEEYRLHEKPVPSSIDPSWLQLFPTVWAERAGMGLANQVPPVVVELRSGASPVAVRQYPMSKEAREGIRPHIQRFLDLGVLVPCQSPWNTPLLPVKKPGTNDYRPVQDLREINKRVQDIHPTVPNPYNLLSSLPPSHTWYSVLDLKDAFFCLKLHPNSQPLFAFEWRDPEKGNTGQLTWTRLPQGFKNSPTLFNEALHRDLAPFRALNPQVVLLQYVDDLLVAAPTYRDCKEGTQKLLQELSKLGYRVSAKKAQLCQKEVTYLGYLLKEGKRWLTPARKATVMKIPPPTTPRQVREFLGTAGFCRLWIPGFASLAAPLYPLTKPSIPFIWTEEHQKAFDRIKEALLSAPALALPDLTKPFTLYVDERAGVARGVLTQTLGPWRRPVAYLSKKLDPVASGWPTCLKAVAAVALLLKDADKLTLGQNVTVIASHSLESIVRQPPDRWMTNARMTHYQSLLLNERVSFAPPAVLNPATLLPVESEATPVHRCSEILAEETGTRRDLKDQPLPGVPAWYTDGSSFIAEGKRRAGAAIVDGKRTVWASSLPEGTSAQKAELVALTQALRLAEGKDINIYTDSRYAFATAHIHGAIYKQRGWLTSAGKDIKNKEEILALLEAIHLPKRVAIIHCPGHQKGNDPVATGNRRADEAAKQAALSTRVLAETTKP

SEQ ID NO: 8133 - protein, 669 aa, synthetic construct
VLNLEEEYRLHEKPVPSSIDPSWLQLFPTVWAERAGMGLANQVPPVVVELRSGASPVAVRQYPMSKEAREGIRPHIQRFLDLGVLVPCQSPWNTPLLPVKKPGTNDYRPVQDLREINKRVQDIHPTVPNPYNLLSSLPPSHTWYSVLDLKDAFFCLKLHPNSQPLFAFEWRDPEKGNTGQLTWTRLPQGFKNSPTLFNEALHRDLAPFRALNPQVVLLQYVDDLLVAAPTYRDCKEGTQKLLQELSKLGYRVSAKKAQLCQKEVTYLGYLLKEGKRWLTPARKATVMKIPPPTTPRQVREFLGKAGFCRLFIPGFASLAAPLYPLTKPSIPFIWTEEHQKAFDRIKEALLSAPALALPDLTKPFTLYVDERAGVARGVLTQTLGPWRRPVAYLSKKLDPVASGWPTCLKAVAAVALLLKDADKLTLGQNVTVIASHSLESIVRQPPDRWMTNARMTHYQSLLLNERVSFAPPAVLNPATLLPVESEATPVHRCSEILAEETGTRRDLKDQPLPGVPAWYTDGSSFIAEGKRRAGAAIVDGKRTVWASSLPEGTSAQKAELVALTQALRLAEGKDINIYTDSRYAFATAHIHGAIYKQRGWLTSAGKDIKNKEEILALLEAIHLPKRVAIIHCPGHQKGNDPVATGNRRADEAAKQAALSTRVLAETTKP

SEQ ID NO: 8134 - protein, 671 aa, unidentified
TLNIEDEYRLHETSKEPDVPLGSTWLSDFPQAWAETGGMGLAVRQAPLIIPLKATSTPVSIKQYPMSQEARLGIKPHIQRLLDQGILVPCQSPWNTPLLPVKKPGTNDYRPVQDLREVNKRVEDIHPTVPNPYNLLSGLPPSHQWYTVLDLKDAFFCLRLHPTSQPLFAFEWRDPEMGISGQLTWTRLPQGFKNSPTLFDEALHRDLADFRIQHPDLILLQYVDDLLLAATSEQDCQRGTRALLQTLGNLGYRASAKKAQICQKQVKYLGYLLKEGQRWLTEARKETVMGQPTPKTPRQLREFLGTAGFCRLWIPGFAEMAAPLYPLTKTGTLFNWGPDQQKAYQEIKQALLTAPALGLPDLTKPFELFVDEKQGYAKGVLTQKLGPWRRPVAYLSKKLDPVAAGWPPCLRMVAAIAVLTKDAGKLTMGQPLVILAPHAVEALVKQPPDRWLSNARMTHYQAMLLDTDRVQFGPVVALNPATLLPLPEKEAPHDCLEILAETHGTRPDLTDQPIPDADYTWYTDGSSFLQEGQRRAGAAVTTETEVIWARALPAGTSAQRAELIALTQALKMAEGKKLNVYTDSRYAFATAHVHGEIYRRRGLLTSEGREIKNKNEILALLKALFLPKRLSIIHCPGHQKGNSAEARGNRMADQAAREAAMKAVLETSTLL

SEQ ID NO: 8135 - protein, 671 aa, synthetic construct
TLNIEDEYRLHETSKEPDVPLGSTWLSDFPQAWAETGGMGLAVRQAPLIIPLKATSTPVSIKQYPMSQEARLGIKPHIQRLLDQGILVPCQSPWNTPLLPVKKPGTNDYRPVQDLREVNKRVEDIHPTVPNPYNLLSGLPPSHQWYTVLDLKDAFFCLRLHPTSQPLFAFEWRDPEMGISGQLTWTRLPQGFKNSPTLFNEALHRDLADFRIQHPDLILLQYVDDLLLAATSEQDCQRGTRALLQTLGNLGYRASAKKAQICQKQVKYLGYLLKEGQRWLTEARKETVMGQPTPKTPRQLREFLGTAGFCRLWIPGFAEMAAPLYPLTKPGTLFNWGPDQQKAYQEIKQALLTAPALGLPDLTKPFELFVDEKQGYAKGVLTQKLGPWRRPVAYLSKKLDPVAAGWPPCLRMVAAIAVLTKDAGKLTMGQPLVILAPHAVEALVKQPPDRWLSNARMTHYQAMLLDTDRVQFGPVVALNPATLLPLPEKEAPHDCLEILAETHGTRPDLTDQPIPDADYTWYTDGSSFLQEGQRRAGAAVTTETEVIWARALPAGTSAQRAELIALTQALKMAEGKKLNVYTDSRYAFATAHVHGEIYRRRGWLTSEGREIKNKNEILALLKALFLPKRLSIIHCPGHQKGNSAEARGNRMADQAAREAAMKAVLETSTLL

SEQ ID NO: 8136 - protein, 671 aa, synthetic construct
TLNIEDEYRLHETSKEPDVPLGSTWLSDFPQAWAETGGMGLAVRQAPLIIPLKATSTPVSIKQYPMSQEARLGIKPHIQRLLDQGILVPCQSPWNTPLLPVKKPGTNDYRPVQDLREVNKRVEDIHPTVPNPYNLLSGLPPSHQWYTVLDLKDAFFCLRLHPTSQPLFAFEWRDPEMGISGQLTWTRLPQGFKNSPTLFNEALHRDLADFRIQHPDLILLQYVDDLLLAATSEQDCQRGTRALLQTLGNLGYRASAKKAQICQKQVKYLGYLLKEGQRWLTEARKETVMGQPTPKTPRQLREFLGKAGFCRLFIPGFAEMAAPLYPLTKPGTLFNWGPDQQKAYQEIKQALLTAPALGLPDLTKPFELFVDEKQGYAKGVLTQKLGPWRRPVAYLSKKLDPVAAGWPPCLRMVAAIAVLTKDAGKLTMGQPLVILAPHAVEALVKQPPDRWLSNARMTHYQAMLLDTDRVQFGPVVALNPATLLPLPEKEAPHDCLEILAETHGTRPDLTDQPIPDADYTWYTDGSSFLQEGQRRAGAAVTTETEVIWARALPAGTSAQRAELIALTQALKMAEGKKLNVYTDSRYAFATAHVHGEIYRRRGWLTSEGREIKNKNEILALLKALFLPKRLSIIHCPGHQKGNSAEARGNRMADQAAREAAMKAVLETSTLL

SEQ ID NO: 8137-9000 - skipped (864 entries)

SEQ ID NO: 9001 - protein, 1082 aa, Neisseria meningitidis
MAAFKPNPINYILGLDIGIASVGWAMVEIDEEENPIRLIDLGVRVFERAEVPKTGDSLAMARRLARSVRRLTRRRAHRLLRARRLLKREGVLQAADFDENGLIKSLPNTPWQLRAAALDRKLTPLEWSAVLLHLIKHRGYLSQRKNEGETADKELGALLKGVANNAHALQTGDFRTPAELALNKFEKESGHIRNQRGDYSHTFSRKDLQAELILLFEKQKEFGNPHVSGGLKEGIETLLMTQRPALSGDAVQKMLGHCTFEPAEPKAAKNTYTAERFIWLTKLNNLRILEQGSERPLTDTERATLMDEPYRKSKLTYAQARKLLGLEDTAFFKGLRYGKDNAEASTLMEMKAYHAISRALEKEGLKDKKSPLNLSSELQDEIGTAFSLFKTDEDITGRLKDRVQPEILEALLKHISFDKFVQISLKALRRIVPLMEQGKRYDEACAEIYGDHYGKKNTEEKIYLPPIPADEIRNPVVLRALSQARKVINGVVRRYGSPARIHIETAREVGKSFKDRKEIEKRQEENRKDREKAAAKFREYFPNFVGEPKSKDILKLRLYEQQHGKCLYSGKEINLVRLNEKGYVEIDHALPFSRTWDDSFNNKVLVLGSENQNKGNQTPYEYFNGKDNSREWQEFKARVETSRFPRSKKQRILLQKFDEDGFKECNLNDTRYVNRFLCQFVADHILLTGKGKRRVFASNGQITNLLRGFWGLRKVRAENDRHHALDAVVVACSTVAMQQKITRFVRYKEMNAFDGKTIDKETGKVLHQKTHFPQPWEFFAQEVMIRVFGKPDGKPEFEEADTPEKLRTLLAEKLSSRPEAVHEYVTPLFVSRAPNRKMSGAHKDTLRSAKRFVKHNEKISVKRVWLTEIKLADLENMVNYKNGREIELYEALKARLEAYGGNAKQAFDPKDNPFYKKGGQLVKAVRVEKTQESGVLLNKKNAYTIADNGDMVRVDVFCKVDKKGKNQYFIVPIYAWQVAENILPDIDCKGYRIDDSYTFCFSLHKYDLIAFQKDEKSKVEFAYYINCDSSNGRFYLAWHDKGSKEQQFRISTQNLVLIQKYQVNELGKEIRPCRLKKRPPVR

SEQ ID NO: 9002 - protein, 1055 aa, Pasteurella pneumotropica
MQNNPLNYILGLDLGIASIGWAVVEIDEESSPIRLIDVGVRTFERAEVAKTGESLALSRRLARSSRRLIKRRAERLKKAKRLLKAEKILHSIDEKLPINVWQLRVKGLKEKLERQEWAAVLLHLSKHRGYLSQRKNEGKSDNKELGALLSGIASNHQMLQSSEYRTPAEIAVKKFQVEEGHIRNQRGSYTHTFSRLDLLAEMELLFQRQAELGNSYTSTTLLENLTALLMWQKPALAGDAILKMLGKCTFEPSEYKAAKNSYSAERFVWLTKLNNLRILENGTERALNDNERFALLEQPYEKSKLTYAQVRAMLALSDNAIFKGVRYLGEDKKTVESKTTLIEMKFYHQIRKTLGSAELKKEWNELKGNSDLLDEIGTAFSLYKTDDDICRYLEGKLPERVLNALLENLNFDKFIQLSLKALHQILPLMLQGQRYDEAVSAIYGDHYGKKSTETTRLLPTIPADEIRNPVVLRTLTQARKVINAVVRLYGSPARIHIETAREVGKSYQDRKKLEKQQEDNRKQRESAVKKFKEMFPHFVGEPKGKDILKMRLYELQQAKCLYSGKSLELHRLLEKGYVEVDHALPFSRTWDDSFNNKVLVLANENQNKGNLTPYEWLDGKNNSERWQHFVVRVQTSGFSYAKKQRILNHKLDEKGFIERNLNDTRYVARFLCNFIADNMLLVGKGKRNVFASNGQITALLRHRWGLQKVREQNDRHHALDAVVVACSTVAMQQKITRFVRYNEGNVFSGERIDRETGEIIPLHFPSPWAFFKENVEIRIFSENPKLELENRLPDYPQYNHEWVQPLFVSRMPTRKMTGQGHMETVKSAKRLNEGLSVLKVPLTQLKLSDLERMVNRDREIALYESLKARLEQFGNDPAKAFAEPFYKKGGALVKAVRLEQTQKSGVLVRDGNGVADNASMVRVDVFTKGGKYFLVPIYTWQVAKGILPNRAATQGKDENDWDIMDEMATFQFSLCQNDLIKLVTKKKTIFGYFNGLNRATSNINIKEHDLDKSKGKLGIYLEVGVKLAISLEKYQVDELGKNIRPCRPTKRQHVR

SEQ ID NO: 9003 - protein, 1053 aa, Staphylococcus aureus
MKRNYILGLDIGITSVGYGIIDYETRDVIDAGVRLFKEANVENNEGRRSKRGARRLKRRRRHRIQRVKKLLFDYNLLTDHSELSGINPYEARVKGLSQKLSEEEFSAALLHLAKRRGVHNVNEVEEDTGNELSTKEQISRNSKALEEKYVAELQLERLKKDGEVRGSINRFKTSDYVKEAKQLLKVQKAYHQLDQSFIDTYIDLLETRRTYYEGPGEGSPFGWKDIKEWYEMLMGHCTYFPEELRSVKYAYNADLYNALNDLNNLVITRDENEKLEYYEKFQIIENVFKQKKKPTLKQIAKEILVNEEDIKGYRVTSTGKPEFTNLKVYHDIKDITARKEIIENAELLDQIAKILTIYQSSEDIQEELTNLNSELTQEEIEQISNLKGYTGTHNLSLKAINLILDELWHTNDNQIAIFNRLKLVPKKVDLSQQKEIPTTLVDDFILSPVVKRSFIQSIKVINAIIKKYGLPNDIIIELAREKNSKDAQKMINEMQKRNRQTNERIEEIIRTTGKENAKYLIEKIKLHDMQEGKCLYSLEAIPLEDLLNNPFNYEVDHIIPRSVSFDNSFNNKVLVKQEENSKKGNRTPFQYLSSSDSKISYETFKKHILNLAKGKGRISKTKKEYLLEERDINRFSVQKDFINRNLVDTRYATRGLMNLLRSYFRVNNLDVKVKSINGGFTSFLRRKWKFKKERNKGYKHHAEDALIIANADFIFKEWKKLDKAKKVMENQMFEEKQAESMPEIETEQEYKEIFITPHQIKHIKDFKDYKYSHRVDKKPNRELINDTLYSTRKDDKGNTLIVNNLNGLYDKDNDKLKKLINKSPEKLLMYHHDPQTYQKLKLIMEQYGDEKNPLYKYYEETGNYLTKYSKKDNGPVIKKIKYYGNKLNAHLDITDDYPNSRNKVVKLSLKPYRFDVYLDNGVYKFVTVKNLDVIKKENYYEVNSKCYEEAKKLKKISNQAEFIASFYNNDLIKINGELYRVIGVNNDLLNRIEVNMIDITYREYLENMNDKRPPRIIKTIASKTQSIKKYSTDILGNLYEVKSKKHPQIIKKG

SEQ ID NO: 9004 - protein, 1053 aa, Staphylococcus aureus
MKRNYILGLDIGITSVGYGIIDYETRDVIDAGVRLFKEANVENNEGRRSKRGARRLKRRRRHRIQRVKKLLFDYNLLTDHSELSGINPYEARVKGLSQKLSEEEFSAALLHLAKRRGVHNVNEVEEDTGNELSTKEQISRNSKALEEKYVAELQLERLKKDGEVRGSINRFKTSDYVKEAKQLLKVQKAYHQLDQSFIDTYIDLLETRRTYYEGPGEGSPFGWKDIKEWYEMLMGHCTYFPEELRSVKYAYNADLYNALNDLNNLVITRDENEKLEYYEKFQIIENVFKQKKKPTLKQIAKEILVNEEDIKGYRVTSTGKPEFTNLKVYHDIKDITARKEIIENAELLDQIAKILTIYQSSEDIQEELTNLNSELTQEEIEQISNLKGYTGTHNLSLKAINLILDELWHTNDNQIAIFNRLKLVPKKVDLSQQKEIPTTLVDDFILSPVVKRSFIQSIKVINAIIKKYGLPNDIIIELAREKNSKDAQKMINEMQKRNRQTNERIEEIIRTTGKENAKYLIEKIKLHDMQEGKCLYSLEAIPLEDLLNNPFNYEVDHIIPRSVSFDNSFNNKVLVKQEENSKKGNRTPFQYLSSSDSKISYETFKKHILNLAKGKGRISKTKKEYLLEERDINRFSVQKDFINRNLVDTRYATRGLMNLLRSYFRVNNLDVKVKSINGGFTSFLRRKWKFKKERNKGYKHHAEDALIIANADFIFKEWKKLDKAKKVMENQMFEEKQAESMPEIETEQEYKEIFITPHQIKHIKDFKDYKYSHRVDKKPNRKLINDTLYSTRKDDKGNTLIVNNLNGLYDKDNDKLKKLINKSPEKLLMYHHDPQTYQKLKLIMEQYGDEKNPLYKYYEETGNYLTKYSKKDNGPVIKKIKYYGNKLNAHLDITDDYPNSRNKVVKLSLKPYRFDVYLDNGVYKFVTVKNLDVIKKENYYEVNSKCYEEAKKLKKISNQAEFIASFYKNDLIKINGELYRVIGVNNDLLNRIEVNMIDITYREYLENMNDKRPPHIIKTIASKTQSIKKYSTDILGNLYEVKSKKHPQIIKKG

SEQ ID NO: 9005 - protein, 1061 aa, Staphylococcus auricularis
MQENQQKQNYILGLDIGITSVGYGLIDSKTREVIDAGVRLFPEADSENNSNRRSKRGARRLKRRRIHRLNRVKDLLADYQMIDLNNVPKSTDPYTIRVKGLREPLTKEEFAIALLHIAKRRGLHNISVSMGDEEQDNELSTKQQLQKNAQQLQDKYVCELQLERLTNINKVRGEKNRFKTEDFVKEVKQLCETQRQYHNIDDQFIQQYIDLVSTRREYFEGPGNGSPYGWDGDLLKWYEKLMGRCTYFPEELRSVKYAYSADLFNALNDLNNLVVTRDDNPKLEYYEKYHIIENVFKQKKNPTLKQIAKEIGVQDYDIRGYRITKSGKPQFTSFKLYHDLKNIFEQAKYLEDVEMLDEIAKILTIYQDEISIKKALDQLPELLTESEKSQIAQLTGYTGTHRLSLKCIHIVIDELWESPENQMEIFTRLNLKPKKVEMSEIDSIPTTLVDEFILSPVVKRAFIQSIKVINAVINRFGLPEDIIIELAREKNSKDRRKFINKLQKQNEATRKKIEQLLAKYGNTNAKYMIEKIKLHDMQEGKCLYSLEAIPLEDLLSNPTHYEVDHIIPRSVSFDNSLNNKVLVKQSENSKKGNRTPYQYLSSNESKISYNQFKQHILNLSKAKDRISKKKRDMLLEERDINKFEVQKEFINRNLVDTRYATRELSNLLKTYFSTHDYAVKVKTINGGFTNHLRKVWDFKKHRNHGYKHHAEDALVIANADFLFKTHKALRRTDKILEQPGLEVNDTTVKVDTEEKYQELFETPKQVKNIKQFRDFKYSHRVDKKPNRQLINDTLYSTREIDGETYVVQTLKDLYAKDNEKVKKLFTERPQKILMYQHDPKTFEKLMTILNQYAEAKNPLAAYYEDKGEYVTKYAKKGNGPAIHKIKYIDKKLGSYLDVSNKYPETQNKLVKLSLKSFRFDIYKCEQGYKMVSIGYLDVLKKDNYYYIPKDKYEAEKQKKKIKESDLFVGSFYYNDLIMYEDELFRVIGVNSDINNLVELNMVDITYKDFCEVNNVTGEKRIKKTIGKRVVLIEKYTTDILGNLYKTPLPKKPQLIFKRGEL

SEQ ID NO: 9006 - protein, 1061 aa, Staphylococcus auricularis
MQENQQKQNYILGLDIGITSVGYGLIDSKTREVIDAGVRLFPEADSENNSNRRSKRGARRLKRRRIHRLNRVKDLLADYQMIDLNNVPKSTDPYTIRVKGLREPLTKEEFAIALLHIAKRRGLHNISVSMGDEEQDNELSTKQQLQKNAQQLQDKYVCELQLERLTNINKVRGEKNRFKTEDFVKEVKQLCETQRQYHNIDDQFIQQYIDLVSTRREYFEGPGNGSPYGWDGDLLKWYEKLMGRCTYFPEELRSVKYAYSADLFNALNDLNNLVVTRDDNPKLEYYEKYHIIENVFKQKKNPTLKQIAKEIGVQDYDIRGYRITKSGKPQFTSFKLYHDLKNIFEQAKYLEDVEMLDEIAKILTIYQDEISIKKALDQLPELLTESEKSQIAQLTGYTGTHRLSLKCIHIVIDELWESPENQMEIFTRLNLKPKKVEMSEIDSIPTTLVDEFILSPVVKRAFIQSIKVINAVINRFGLPEDIIIELAREKNSKDRRKFINKLQKQNEATRKKIEQLLAKYGNTNAKYMIEKIKLHDMQEGKCLYSLEAIPLEDLLSNPTHYEVDHIIPRSVSFDNSLNNKVLVKQSENSKKGNRTPYQYLSSNESKISYNQFKQHILNLSKAKDRISKKKRDMLLEERDINKFEVQKEFINRNLVDTRYATRELSNLLKTYFSTHDYAVKVKTINGGFTNHLRKVWDFKKHRNHGYKHHAEDALVIANADFLFKTHKALRRTDKILEQPGLEVNDTTVKVDTEEKYQELFETPKQVKNIKQFRDFKYSHRVDKKPNRKLINDTLYSTREIDGETYVVQTLKDLYAKDNEKVKKLFTERPQKILMYQHDPKTFEKLMTILNQYAEAKNPLAAYYEDKGEYVTKYAKKGNGPAIHKIKYIDKKLGSYLDVSNKYPETQNKLVKLSLKSFRFDIYKCEQGYKMVSIGYLDVLKKDNYYYIPKDKYEAEKQKKKIKESDLFVGSFYKNDLIMYEDELFRVIGVNSDINNLVELNMVDITYKDFCEVNNVTGEKHIKKTIGKRVVLIEKYTTDILGNLYKTPLPKKPQLIFKRGEL

SEQ ID NO: 9007 - protein, 1375 aa, Streptococcus canis
MEKKYSIGLDIGTNSVGWAVITDDYKVPSKKFKVLGNTNRKSIKKNLMGALLFDSGETAEATRLKRTARRRYTRRKNRIRYLQEIFANEMAKLDDSFFQRLEESFLVEEDKKNERHPIFGNLADEVAYHRNYPTIYHLRKKLADSPEKADLRLIYLALAHIIKFRGHFLIEGKLNAENSDVAKLFYQLIQTYNQLFEESPLDEIEVDAKGILSARLSKSKRLEKLIAVFPNEKKNGLFGNIIALALGLTPNFKSNFDLTEDAKLQLSKDTYDDDLDELLGQIGDQYADLFSAAKNLSDAILLSDILRSNSEVTKAPLSASMVKRYDEHHQDLALLKTLVRQQFPEKYAEIFKDDTKNGYAGYVGADKKLRKRSGKLATEEEFYKFIKPILEKMDGAEELLAKLNRDDLLRKQRTFDNGSIPHQIHLKELHAILRRQEEFYPFLKENREKIEKILTFRIPYYVGPLARGNSRFAWLTRKSEEAITPWNFEEVVDKGASAQSFIERMTNFDEQLPNKKVLPKHSLLYEYFTVYNELTKVKYVTERMRKPEFLSGEQKKAIVDLLFKTNRKVTVKQLKEDYFKKIECFDSVEIIGVEDRFNASLGTYHDLLKIIKDKDFLDNEENEDILEDIVLTLTLFEDREMIEERLKTYAHLFDDKVMKQLKRRHYTGWGRLSRKMINGIRDKQSGKTILDFLKSDGFSNRNFMQLIHDDSLTFKEEIEKAQVSGQGDSLHEQIADLAGSPAIKKGILQTVKIVDELVKVMGHKPENIVIEMARENQTTTKGLQQSRERKKRIEEGIKELESQILKENPVENTQLQNEKLYLYYLQNGRDMYVDQELDINRLSDYDVDHIVPQSFIKDDSIDNKVLTRSVENRGKSDNVPSEEVVKKMKNYWRQLLNAKLITQRKFDNLTKAERGGLSEADKAGFIKRQLVETRQITKHVARILDSRMNTKRDKNDKPIREVKVITLKSKLVSDFRKDFQLYKVRDINNYHHAHDAYLNAVVGTALIKKYPKLESEFVYGDYKVYDVRKMIAKSEQEIGKATAKRFFYSNIMNFFKTEVKLANGEIRKRPLIETNGETGEVVWNKEKDFATVRKVLAMPQVNIVKKTEVQTGGFSKESILSKRESAKLIPRKKGWDTRKYGGFGSPTVAYSILVVAKVEKGKAKKLKSVKVLVGITIMEKGSYEKDPIGFLEAKGYKDIKKELIFKLPKYSLFELENGRRRMLASAKELQKANELVLPQHLVRLLYYTQNISATTGSNNLGYIEQHREEFKEIFEKIIDFSEKYILKNKVNSNLKSSFDEQFAVSDSILLSNSFVSLLKYTSFGASGGFTFLDLDVKQGRLRYQTVTEVLDATLIYQSITGLYETRTDLSQLGGD

SEQ ID NO: 9008 - protein, 1368 aa, Streptococcus pyogenes [sequence omitted]

SEQ ID NO: 9009 - protein, 1368 aa, Streptococcus pyogenes
MDKKYSIGLDIGTNSVGWAVITDEYKVPSKKFKVLGNTDRHSIKKNLIGALLFDSGETAEATRLKRTARRRYTRRKNRICYLQEIFSNEMAKVDDSFFHRLEESFLVEEDKKHERHPIFGNIVDEVAYHEKYPTIYHLRKKLVDSTDKADLRLIYLALAHMIKFRGHFLIEGDLNPDNSDVDKLFIQLVQTYNQLFEENPINASGVDAKAILSARLSKSRRLENLIAQLPGEKKNGLFGNLIALSLGLTPNFKSNFDLAEDAKLQLSKDTYDDDLDNLLAQIGDQYADLFLAAKNLSDAILLSDILRVNTEITKAPLSASMIKRYDEHHQDLTLLKALVRQQLPEKYKEIFFDQSKNGYAGYIDGGASQEEFYKFIKPILEKMDGTEELLVKLNREDLLRKQRTFDNGSIPHQIHLGELHAILRRQEDFYPFLKDNREKIEKILTFRIPYYVGPLARGNSRFAWMTRKSEETITPWNFEEVVDKGASAQSFIERMTNFDKNLPNEKVLPKHSLLYEYFTVYNELTKVKYVTEGMRKPAFLSGEQKKAIVDLLFKTNRKVTVKQLKEDYFKKIECFDSVEISGVEDRFNASLGTYHDLLKIIKDKDFLDNEENEDILEDIVLTLTLFEDREMIEERLKTYAHLFDDKVMKQLKRRRYTGWGRLSRKLINGIRDKQSGKTILDFLKSDGFANRNFMQLIHDDSLTFKEDIQKAQVSGQGDSLHEHIANLAGSPAIKKGILQTVKVVDELVKVMGRHKPENIVIEMARENQTTQKGQKNSRERMKRIEEGIKELGSQILKEHPVENTQLQNEKLYLYYLQNGRDMYVDQELDINRLSDYDVDHIVPQSFLKDDSIDNKVLTRSDKNRGKSDNVPSEEVVKKMKNYWRQLLNAKLITQRKFDNLTKAERGGLSELDKAGFIKRQLVETRQITKHVAQILDSRMNTKYDENDKLIREVKVITLKSKLVSDFRKDFQFYKVREINNYHHAHDAYLNAVVGTALIKKYPKLESEFVYGDYKVYDVRKMIAKSEQEIGKATAKYFFYSNIMNFFKTEITLANGEIRKRPLIETNGETGEIVWDKGRDFATVRKVLSMPQVNIVKKTEVQTGGFSKESIRPKRNSDKLIARKKDWDPKKYGGFVSPTVAYSVLVVAKVEKGKSKKLKSVKELLGITIMERSSFEKNPIDFLEAKGYKEVKKDLIIKLPKYSLFELENGRKRMLASARFLQKGNELALPSKYVNFLYLASHYEKLKGSPEDNEQKQLFVEQHKHYLDEIIEQISEFSKRVILADANLDKVLSAYNKHRDKPIREQAENIIHLFTLTNLGAPRAFKYFDTTIDRKVYRSTKEVLDATLIHQSITGLYETRIDLSQLGGD

SEQ ID NO: 9010 - protein, 1368 aa, Streptococcus pyogenes
MDKKYSIGLDIGTNSVGWAVITDEYKVPSKKFKVLGNTDRHSIKKNLIGALLFDSGETAERTRLKRTARRRYTRRKNRICYLQEIFSNEMAKVDDSFFHRLEESFLVEEDKKHERHPIFGNIVDEVAYHEKYPTIYHLRKKLVDSTDKADLRLIYLALAHMIKFRGHFLIEGDLNPDNSDVDKLFIQLVQTYNQLFEENPINASGVDAKAILSARLSKSRRLENLIAQLPGEKKNGLFGNLIALSLGLTPNFKSNFDLAEDAKLQLSKDTYDDDLDNLLAQIGDQYADLFLAAKNLSDAILLSDILRVNTEITKAPLSASMIKRYDEHHQDLTLLKALVRQQLPEKYKEIFFDQSKNGYAGYIDGGASQEEFYKFIKPILEKMDGTEELLVKLNREDLLRKQRTFDNGSIPHQIHLGELHAILRRQEDFYPFLKDNREKIEKILTFRIPYYVGPLARGNSRFAWMTRKSEETITPWNFEEVVDKGASAQSFIERMTNFDKNLPNEKVLPKHSLLYEYFTVYNELTKVKYVTEGMRKPAFLSGEQKKAIVDLLFKTNRKVTVKQLKEDYFKKIECFDSVEISGVEDRFNASLGTYHDLLKIIKDKDFLDNEENEDILEDIVLTLTLFEDREMIEERLKTYAHLFDDKVMKQLKRRRYTGWGRLSRKLINGIRDKQSGKTILDFLKSDGFANRNFMQLIHDDSLTFKEDIQKAQVSGQGDSLHEHIANLAGSPAIKKGILQTVKVVDELVKVMGRHKPENIVIEMARENQTTQKGQKNSRERMKRIEEGIKELGSQILKEHPVENTQLQNEKLYLYYLQNGRDMYVDQELDINRLSDYDVDHIVPQSFLKDDSIDNKVLTRSDKNRGKSDNVPSEEVVKKMKNYWRQLLNAKLITQRKFDNLTKAERGGLSELDKAGFIKRQLVETRQITKHVAQILDSRMNTKYDENDKLIREVKVITLKSKLVSDFRKDFQFYKVREINNYHHAHDAYLNAVVGTALIKKYPKLESEFVYGDYKVYDVRKMIAKSEQEIGKATAKYFFYSNIMNFFKTEITLANGEIRKRPLIETNGETGEIVWDKGRDFATVRKVLSMPQVNIVKKTEVQTGGFSKESIRPKRNSDKLIARKKDWDPKKYGGFLWPTVAYSVLVVAKVEKGKSKKLKSVKELLGITIMERSSFEKNPIDFLEAKGYKEVKKDLIIKLPKYSLFELENGRKRMLASAKQLQKGNELALPSKYVNFLYLASHYEKLKGSPEDNEQKQLFVEQHKHYLDEIIEQISEFSKRVILADANLDKVLSAYNKHRDKPIREQAENIIHLFTLTRLGAPRAFKYFDTTIDPKQYRSTKEVLDATLIHQSITGLYETRIDLSQLGGD

SEQ ID NO: 9011 - protein, 1121 aa, Streptococcus thermophilus
MSDLVLGLDIGIGSVGVGILNKVTGEIIHKNSRIFPAAQAENNLVRRTNRQGRRLARRKKHRRVRLNRLFEESGLITDFTKISINLNPYQLRVKGLTDELSNEELFIALKNMVKHRGISYLDDASDDGNSSVGDYAQIVKENSKQLETKTPGQIQLERYQTYGQLRGDFTVEKDGKKHRLINVFPTSAYRSEALRILQTQQEFNPQITDEFINRYLEILTGKRKYYHGPGNEKSRTDYGRYRTSGETLDNIFGILIGKCTFYPDEFRAAKASYTAQEFNLLNDLNNLTVPTETKKLSKEQKNQIINYVKNEKAMGPAKLFKYIAKLLSCDVADIKGYRIDKSGKAEIHTFEAYRKMKTLETLDIEQMDRETLDKLAYVLTLNTEREGIQEALEHEFADGSFSQKQVDELVQFRKANSSIFGKGWHNFSVKLMMELIPELYETSEEQMTILTRLGKQKTTSSSNKTKYIDEKLLTEEIYNPVVAKSVRQAIKIVNAAIKEYGDFDNIVIEMARETNEDDEKKAIQKIQKANKDEKDAAMLKAANQYNGKAELPHSVFHGHKQLATKIRLWHQQGERCLYTGKTISIHDLINNSNQFEVDHILPLSITFDDSLANKVLVYATANQEKGQRTPYQALDSMDDAWSFRELKAFVRESKTLSNKKKEYLLTEEDISKFDVRKKFIERNLVDTRYASRVVLNALQEHFRAHKIDTKVSVVRGQFTSQLRRHWGIEKTRDTYHHHAVDALIIAASSQLNLWKKQKNTLVSYSEDQLLDIETGELISDDEYKESVFKAPYQHFVDTLKSKEFEDSILFSYQVDSKFNRKISDATIYATRQAKVGKDKADETYVLGKIKDIYTQDGYDAFMKIYKKDKSKFLMYRHDPQTFEKVIEPILENYPNKQINEKGKEVPCNPFLKYKEEHGYIRKYSKKGNGPEIKSLKYYDSKLGNHIDITPKDSNNKVVLQSVSPWRADVYFNKTTGKYEILGLKYADLQFEKGTGTYKISQEKYNDIKKKEGVDSDSEFKFTLYKNDLLLVKDTETKEQQLFRFLSRTMPKQKHYVELKPYDKQKFEGGEALIKVLGNVANSGQCKKGLGKSNISIYKVRTDVLGNQHIIKNEGDKPKLDF

SEQ ID NO: 9012 - protein, 1092 aa, Brevibacillus laterosporus
MAYTMGIDVGIASCGWAIVDLERQRIIDIGVRTFEKAENPKNGEALAVPRREARSSRRRLRRKKHRIERLKHMFVRNGLAVDIQHLEQTLRSQNEIDVWQLRVDGLDRMLTQKEWLRVLIHLAQRRGFQSNRKTDGSSEDGQVLVNVTENDRLMEEKDYRTVAEMMVKDEKFSDHKRNKNGNYHGVVSRSSLLVEIHTLFETQRQHHNSLASKDFELEYVNIWSAQRPVATKDQIEKMIGTCTFLPKEKRAPKASWHFQYFMLLQTINHIRITNVQGTRSLNKEEIEQVVNMALTKSKVSYHDTRKILDLSEEYQFVGLDYGKEDEKKKVESKETIIKLDDYHKLNKIFNEVELAKGETWEADDYDTVAYALTFFKDDEDIRDYLQNKYKDSKNRLVKNLANKEYTNELIGKVSTLSFRKVGHLSLKALRKIIPFLEQGMTYDKACQAAGFDFQGISKKKRSVVLPVIDQISNPVVNRALTQTRKVINALIKKYGSPETIHIETARELSKTFDERKNITKDYKENRDKNEHAKKHLSELGIINPTGLDIVKYKLWCEQQGRCMYSNQPISFERLKESGYTEVDHIIPYSRSMNDSYNNRVLVMTRENREKGNQTPFEYMGNDTQRWYEFEQRVTTNPQIKKEKRQNLLLKGFTNRRELEMLERNLNDTRYITKYLSHFISTNLEFSPSDKKKKVVNTSGRITSHLRSRWGLEKNRGQNDLHHAMDAIVIAVTSDSFIQQVTNYYKRKERRELNGDDKFPLPWKFFREEVIARLSPNPKEQIEALPNHFYSEDELADLQPIFVSRMPKRSITGEAHQAQFRRVVGKTKEGKNITAKKTALVDISYDKNGDFNMYGRETDPATYEAIKERYLEFGGNVKKAFSTDLHKPKKDGTKGPLIKSVRIMENKTLVHPVNKGKGVVYNSSIVRTDVFQRKEKYYLLPVYVTDVTKGKLPNKVIVAKKGYHDWIEVDDSFTFLFSLYPNDLIFIRQNPKKKISLKKRIESHSISDSKEVQEIHAYYKGVDSSTAAIEFIIHDGSYYAKGVGVQNLDCFEKYQVDILGNYFKVKGEKRLELETSDSNHKGKDVNSIKSTSR

SEQ ID NO: 9013 - protein, 1053 aa, Staphylococcus aureus
MKRNYILGLDIGITSVGYGIIDYETRDVIDAGVRLFKEANVENNEGRRSKRGARRLKRRRRHRIQRVKKLLFDYNLLTDHSELSGINPYEARVKGLSQKLSEEEFSAALLHLAKRRGVHNVNEVEEDTGNELSTKEQISRNSKALEEKYVAELQLERLKKDGEVRGSINRFKTSDYVKEAKQLLKVQKAYHQLDQSFIDTYIDLLETRRTYYEGPGEGSPFGWKDIKEWYEMLMGHCTYFPEELRSVKYAYNADLYNALNDLNNLVITRDENEKLEYYEKFQIIENVFKQKKKPTLKQIAKEILVNEEDIKGYRVTSTGKPEFTNLKVYHDIKDITARKEIIENAELLDQIAKILTIYQSSEDIQEELTNLNSELTQEEIEQISNLKGYTGTHNLSLKAINLILDELWHTNDNQIAIFNRLKLVPKKVDLSQQKEIPTTLVDDFILSPVVKRSFIQSIKVINAIIKKYGLPNDIIIELAREKNSKDAQKMINEMQKRNRQTNERIEEIIRTTGKENAKYLIEKIKLHDMQEGKCLYSLEAIPLEDLLNNPFNYEVDHIIPRSVSFDNSFNNKVLVKQEENSKKGNRTPFQYLSSSDSKISYETFKKHILNLAKGKGRISKTKKEYLLEERDINRFSVQKDFINRNLVDTRYATRGLMNLLRSYFRVNNLDVKVKSINGGFTSFLRRKWKFKKERNKGYKHHAEDALIIANADFIFKEWKKLDKAKKVMENQMFEEKQAESMPEIETEQEYKEIFITPHQIKHIKDFKDYKYSHRVDKKPNRKLINDTLYSTRKDDKGNTLIVNNLNGLYDKDNDKLKKLINKSPEKLLMYHHDPQTYQKLKLIMEQYGDEKNPLYKYYEETGNYLTKYSKKDNGPVIKKIKYYGNKLNAHLDITDDYPNSRNKVVKLSLKPYRFDVYLDNGVYKFVTVKNLDVIKKENYYEVNSKCYEEAKKLKKISNQAEFIASFYKNDLIKINGELYRVIGVNSDKNNLIEVNMIDITYREYLENMNDKRPPHIIKTIASKTQSIKKYSTDILGNLYEVKSKKHPQIIKKG

SEQ ID NO: 9014 - protein, 1053 aa, Staphylococcus aureus
MKRNYILGLDIGITSVGYGIIDYETRDVIDAGVRLFKEANVENNEGRRSKRGARRLKRRRRHRIQRVKKLLFDYNLLTDHSELSGINPYEARVKGLSQKLSEEEFSAALLHLAKRRGVHNVNEVEEDTGNELSTKEQISRNSKALEEKYVAELQLERLKKDGEVRGSINRFKTSDYVKEAKQLLKVQKAYHQLDQSFIDTYIDLLETRRTYYEGPGEGSPFGWKDIKEWYEMLMGHCTYFPEELRSVKYAYNADLYNALNDLNNLVITRDENEKLEYYEKFQIIENVFKQKKKPTLKQIAKEILVNEEDIKGYRVTSTGKPEFTNLKVYHDIKDITARKEIIENAELLDQIAKILTIYQSSEDIQEELTNLNSELTQEEIEQISNLKGYTGTHNLSLKAINLILDELWHTNDNQIAIFNRLKLVPKKVDLSQQKEIPTTLVDDFILSPVVKRSFIQSIKVINAIIKKYGLPNDIIIELAREKNSKDAQKMINEMQKRNRQTNERIEEIIRTTGKENAKYLIEKIKLHDMQEGKCLYSLEAIPLEDLLNNPFNYEVDHIIPRSVSFDNSFNNKVLVKQEENSKKGNRTPFQYLSSSDSKISYETFKKHILNLAKGKGRISKTKKEYLLEERDINRFSVQKDFINRNLVDTRYATRGLMNLLRSYFRVNNLDVKVKSINGGFTSFLRRKWKFKKERNKGYKHHAEDALIIANADFIFKEWKKLDKAKKVMENQMFEEKQAESMPEIETEQEYKEIFITPHQIKHIKDFKDYKYSHRVDKKPNRKLINDTLYSTRKDDKGNTLIVNNLNGLYDKDNDKLKKLINKSPEKLLMYHHDPQTYQKLKLIMEQYGDEKNPLYKYYEETGNYLTKYSKKDNGPVIKKIKYYGNKLNAHLDITDDYPNSRNKVVKLSLKPYRFDVYLDNGVYKFVTVKNLDVIKKENYYEVNSKCYEEAKKLKKISNQAEFIASFYKNDLIKINGELYRVIGVNNSTRNIVELNMIDITYREYLENMNDKRPPHIIKTIASKTQSIKKYSTDILGNLYEVKSKKHPQIIKKG

SEQ ID NO: 9015 - protein, 1053 aa, Staphylococcus aureus
MKRNYILGLDIGITSVGYGIIDYETRDVIDAGVRLFKEANVENNEGRRSKRGARRLKRRRRHRIQRVKKLLFDYNLLTDHSELSGINPYEARVKGLSQKLSEEEFSAALLHLAKRRGVHNVNEVEEDTGNELSTKEQISRNSKALEEKYVAELQLERLKKDGEVRGSINRFKTSDYVKEAKQLLKVQKAYHQLDQSFIDTYIDLLETRRTYYEGPGEGSPFGWKDIKEWYEMLMGHCTYFPEELRSVKYAYNADLYNALNDLNNLVITRDENEKLEYYEKFQIIENVFKQKKKPTLKQIAKEILVNEEDIKGYRVTSTGKPEFTNLKVYHDIKDITARKEIIENAELLDQIAKILTIYQSSEDIQEELTNLNSELTQEEIEQISNLKGYTGTHNLSLKAINLILDELWHTNDNQIAIFNRLKLVPKKVDLSQQKEIPTTLVDDFILSPVVKRSFIQSIKVINAIIKKYGLPNDIIIELAREKNSKDAQKMINEMQKRNRQTNERIEEIIRTTGKENAKYLIEKIKLHDMQEGKCLYSLEAIPLEDLLNNPFNYEVDHIIPRSVSFDNSFNNKVLVKQEENSKKGNRTPFQYLSSSDSKISYETFKKHILNLAKGKGRISKTKKEYLLEERDINRFSVQKDFINRNLVDTRYATRGLMNLLRSYFRVNNLDVKVKSINGGFTSFLRRKWKFKKERNKGYKHHAEDALIIANADFIFKEWKKLDKAKKVMENQMFEEKQAESMPEIETEQEYKEIFITPHQIKHIKDFKDYKYSHRVDKKPNRKLINDTLYSTRKDDKGNTLIVNNLNGLYDKDNDKLKKLINKSPEKLLMYHHDPQTYQKLKLIMEQYGDEKNPLYKYYEETGNYLTKYSKKDNGPVIKKIKYYGNKLNAHLDITDDYPNSRNKVVKLSLKPYRFDVYLDNGVYKFVTVKNLDVIKKENYYEVNSKCYEEAKKLKKISNQAEFIASFYKNDLIKINGELYRVIGVNSDDRNIIELNMIDITYREYLENMNDKRPPHIIKTIASKTQSIKKYSTDILGNLYEVKSKKHPQIIKKG

SEQ ID NO: 9016 - protein, 1053 aa, Staphylococcus aureus
MKRNYILGLDIGITSVGYGIIDYETRDVIDAGVRLFKEANVENNEGRRSKRGARRLKRRRRHRIQRVKKLLFDYNLLTDHSELSGINPYEARVKGLSQKLSEEEFSAALLHLAKRRGVHNVNEVEEDTGNELSTKEQISRNSKALEEKYVAELQLERLKKDGEVRGSINRFKTSDYVKEAKQLLKVQKAYHQLDQSFIDTYIDLLETRRTYYEGPGEGSPFGWKDIKEWYEMLMGHCTYFPEELRSVKYAYNADLYNALNDLNNLVITRDENEKLEYYEKFQIIENVFKQKKKPTLKQIAKEILVNEEDIKGYRVTSTGKPEFTNLKVYHDIKDITARKEIIENAELLDQIAKILTIYQSSEDIQEELTNLNSELTQEEIEQISNLKGYTGTHNLSLKAINLILDELWHTNDNQIAIFNRLKLVPKKVDLSQQKEIPTTLVDDFILSPVVKRSFIQSIKVINAIIKKYGLPNDIIIELAREKNSKDAQKMINEMQKRNRQTNERIEEIIRTTGKENAKYLIEKIKLHDMQEGKCLYSLEAIPLEDLLNNPFNYEVDHIIPRSVSFDNSFNNKVLVKQEENSKKGNRTPFQYLSSSDSKISYETFKKHILNLAKGKGRISKTKKEYLLEERDINRFSVQKDFINRNLVDTRYATRGLMNLLRSYFRVNNLDVKVKSINGGFTSFLRRKWKFKKERNKGYKHHAEDALIIANADFIFKEWKKLDKAKKVMENQMFEEKQAESMPEIETEQEYKEIFITPHQIKHIKDFKDYKYSHRVDKKPNRKLINDTLYSTRKDDKGNTLIVNNLNGLYDKDNDKLKKLINKSPEKLLMYHHDPQTYQKLKLIMEQYGDEKNPLYKYYEETGNYLTKYSKKDNGPVIKKIKYYGNKLNAHLDITDDYPNSRNKVVKLSLKPYRFDVYLDNGVYKFVTVKNLDVIKKENYYEVNSKCYEEAKKLKKISNQAEFIASFYKNDLIKINGELYRVIGVNNNRLNKIELNMIDITYREYLENMNDKRPPHIIKTIASKTQSIKKYSTDILGNLYEVKSKKHPQIIKKG

SEQ ID NO: 9017 - protein, 1084 aa, Corynebacterium diphtheriae
MKYHVGIDVGTFSVGLAAIEVDDAGMPIKTLSLVSHIHDSGLDPDEIKSAVTRLASSGIARRTRRLYRRKRRRLQQLDKFIQRQGWPVIELEDYSDPLYPWKVRAELAASYIADEKERGEKLSVALRHIARHRGWRNPYAKVSSLYLPDGPSDAFKAIREEIKRASGQPVPETATVGQMVTLCELGTLKLRGEGGVLSARLQQSDYAREIQEICRMQEIGQELYRKIIDVVFAAESPKGSASSRVGKDPLQPGKNRALKASDAFQRYRIAALIGNLRVRVDGEKRILSVEEKNLVFDHLVNLTPKKEPEWVTIAEILGIDRGQLIGTATMTDDGERAGARPPTHDTNRSIVNSRIAPLVDWWKTASALEQHAMVKALSNAEVDDFDSPEGAKVQAFFADLDDDVHAKLDSLHLPVGRAAYSEDTLVRLTRRMLSDGVDLYTARLQEFGIEPSWTPPTPRIGEPVGNPAVDRVLKTVSRWLESATKTWGAPERVIIEHVREGFVTEKRAREMDGDMRRRAARNAKLFQEMQEKLNVQGKPSRADLWRYQSVQRQNCQCAYCGSPITFSNSEMDHIVPRAGQGSTNTRENLVAVCHRCNQSKGNTPFAIWAKNTSIEGVSVKEAVERTRHWVTDTGMRSTDFKKFTKAVVERFQRATMDEEIDARSMESVAWMANELRSRVAQHFASHGTTVRVYRGSLTAEARRASGISGKLKFFDGVGKSRLDRRHHAIDAAVIAFTSDYVAETLAVRSNLKQSQAHRQEAPQWREFTGKDAEHRAAWRVWCQKMEKLSALLTEDLRDDRVVVMSNVRLRLGNGSAHKETIGKLSKVKLSSQLSVSDIDKASSEALWCALTREPGFDPKEGLPANPERHIRVNGTHVYAGDNIGLFPVSAGSIALRGGYAELGSSFHHARVYKITSGKKPAFAMLRVYTIDLLPYRNQDLFSVELKPQTMSMRQAEKKLRDALATGNAEYLGWLVVDDELVVDTSKIATDQVKAVEAELGTIRRWRVDGFFSPSKLRLRPLQMSKEGIKKESAPELSKIIDRPGWLPAVNKLFSDGNVTVVRRDSLGRVRLESTAHLPVTWKVQ

SEQ ID NO: 9018 - protein, 984 aa, Campylobacter jejuni
MARILAFDIGISSIGWAFSENDELKDCGVRIFTKVENPKTGESLALPRRLARSARKRLARRKARLNHLKHLIANEFKLNYEDYQSFDESLAKAYKGSLISPYELRFRALNELLSKQDFARVILHIAKRRGYDDIKNSDDKEKGAILKAIKQNEEKLANYQSVGEYLYKEYFQKFKENSKEFTNVRNKKESYERCIAQSFLKDELKLIFKKQREFGFSFSKKFEEEVLSVAFYKRALKDFSHLVGNCSFFTDEKRAPKNSPLAFMFVALTRIINLLNNLKNTEGILYTKDDLNALLNEVLKNGTLTYKQTKKLLGLSDDYEFKGEKGTYFIEFKKYKEFIKALGEHNLSQDDLNEIAKDITLIKDEIKLKKALAKYDLNQNQIDSLSKLEFKDHLNISFKALKLVTPLMLEGKKYDEACNELNLKVAINEDKKDFLPAFNETYYKDEVTNPVVLRAIKEYRKVLNALLKKYGKVHKINIELAREVGKNHSQRAKIEKEQNENYKAKKDAELECEKLGLKINSKNILKLRLFKEQKEFCAYSGEKIKISDLQDEKMLEIDHIYPYSRSFDDSYMNKVLVFTKQNQEKLNQTPFEAFGNDSAKWQKIEVLAKNLPTKKQKRILDKNYKDKEQKNFKDRNLNDTRYIARLVLNYTKDYLDFLPLSDDENTKLNDTQKGSKVHVEAKSGMLTSALRHTWGFSAKDRNNHLHHAIDAVIIAYANNSIVKAFSDFKKEQESNSAELYAKKISELDYKNKRKFFEPFSGFRQKVLDKIDEIFVSKPERKKPSGALHEETFRKEEEFYQSYGGKEGVLKALELGKIRKVNGKIVKNGDMFRVDIFKHKKTNKFYAVPIYTMDFALKVLPNKAVARSKKGEIKDWILMDENYEFCFSLYKDSLILIQTKDMQEPEFVYYNAFTSSTVSLIVSKHDNKFETLSKNQKILFKNANEKEVIAKSIGIQNLKVFEKYIVSALGEVTKAEFRQREDFKK

SEQ ID NO: 9019 - protein, 1087 aa, Geobacillus stearothermophilus
MRYKIGLDIGITSVGWAVMNLDIPRIEDLGVRIFDRAENPQTGESLALPRRLARSARRRLRRRKHRLERIRRLVIREGILTKEELDKLFEEKHEIDVWQLRVEALDRKLNNDELARVLLHLAKRRGFKSNRKSERSNKENSTMLKHIEENRAILSSYRTVGEMIVKDPKFALHKRNKGENYTNTIARDDLEREIRLIFSKQREFGNMSCTEEFENEYITIWASQRPVASKDDIEKKVGFCTFEPKEKRAPKATYTFQSFIAWEHINKLRLISPSGARGLTDEERRLLYEQAFQKNKITYHDIRTLLHLPDDTYFKGIVYDRGESRKQNENIRFLELDAYHQIRKAVDKVYGKGKSSSFLPIDFDTFGYALTLFKDDADIHSYLRNEYEQNGKRMPNLANKVYDNELIEELLNLSFTKFGHLSLKALRSILPYMEQGEVYSSACERAGYTFTGPKKKQKTMLLPNIPPIANPVVMRALTQARKVVNAIIKKYGSPVSIHIELARDLSQTFDERRKTKKEQDENRKKNETAIRQLMEYGLTLNPTGHDIVKFKLWSEQNGRCAYSLQPIEIERLLEPGYVEVDHVIPYSRSLDDSYTNKVLVLTRENREKGNRIPAEYLGVGTERWQQFETFVLTNKQFSKKKRDRLLRLHYDENEETEFKNRNLNDTRYISRFFANFIREHLKFAESDDKQKVYTVNGRVTAHLRSRWEFNKNREESDLHHAVDAVIVACTTPSDIAKVTAFYQRREQNKELAKKTEPHFPQPWPHFADELRARLSKHPKESIKALNLGNYDDQKLESLQPVFVSRMPKRSVTGAAHQETLRRYVGIDERSGKIQTVVKTKLSEIKLDASGHFPMYGKESDPRTYEAIRQRLLEHNNDPKKAFQEPLYKPKKNGEPGPVIRTVKIIDTKNQVIPLNDGKTVAYNSNIVRVDVFEKDGKYYCVPVYTMDIMKGILPNKAIEPNKPYSEWKEMTEDYTFRFSLYPNDLIRIELPREKTVKTAAGEEINVKDVFVYYKTIDSANGGLELISHDHRFSLRGVGSRTLKRFEKYQVDVLGNIYKVRGEKRVGLASSAHSKPGKTIRPLQSTRD

SEQ ID NO: 9020 - protein, 1378 aa, Streptococcus sp.
MDKKYSIGLDIGTNSVGWAVITDEYKVPSKKFKVLGNTDRHSIKKNLIGALLFDSGETAEATRLKRTARRRYTRRKNRICYLQEIFSNEMAKVDDSFFHRLEESFLVEEDKKHERHPIFGNIVDEVAYHEKYPTIYHLRKKLVDSTDKADLRLIYLALAHMIKFRGHFLIEGDLNPDNSDVDKLFIQLVQTYNQLFEENPINASGVDAKAILSARLSKSRKLENLIAQLPGEKKNGLFGNLIALSLGLTPNFKSNFDLAEDAKLQLSKDTYDDDLDNLLAQIGDQYADLFLAAKNLSDAILLSDILRVNTEITKAPLSASMIKRYDEHHQDLTLLKALVRQQLPEKYKEIFFDQSKNGYAGYIDGGASQEEFYKFIKPILEKMDGTEELLVKLKREDLLRKQRTFDNGSIPHQIHLGELHAILRRQEDFYPFLKDNREKIEKILTFRIPYYVGPLARGNSRFAWMTRKSEETITPWNFEEVVDKGASAQSFIERMTNFDKNLPNEKVLPKHSLLYEYFTVYNELTKVKYVTEGMRKPAFLSGEQKKAIVDLLFKTNRKVTVKQLKEDYFKKIECFDSVEISGVEDRFNASLGTYHDLLKIIKDKDFLDNEENEDILEDIVLTLTLFEDREMIEERLKTYAHLFDDKVMKQLKRRRYTGWGRLSRKLINGIRDKQSGKTILDFLKSDGFANRNFMQLIHDDSLTFKEDIQKAQVSGQGDSLHEHIANLAGSPAIKKGILQTVKVVDELVKVMGRHKPENIVIEMARENQTTQKGQKNSRERMKRIEEGIKELGSQILKEHPVENTQLQNEKLYLYYLQNGRDMYVDQELDINRLSDYDVDHIVPQSFLKDDSIDNKVLTRSDKNRGKSDNVPSEEVVKKMKNYWRQLLNAKLITQRKFDNLTKAERGGLSELDKAGFIKRQLVETRQITKHVAQILDSRMNTKYDENDKLIREVKVITLKSKLVSDFRKDFQFYKVREINNYHHAHDAYLNAVVGTALIKKYPKLESEFVYGDYKVYDVRKMIAKSEQEIGKATAKYFFYSNIMNFFKTEITLANGEIRKRPLIETNGETGEIVWDKGRDFATVRKVLSMPQVNIVKKTEIQTVGQNGGLFDDNPKSPLEVTPSKLVPLKKELNPKKYGGYQKPTTAYPVLLITDTKQLIPISVMNKKQFEQNPVKFLRDRGYQQVGKNDFIKLPKYTLVDIGDGIKRLWASSKEIHKGNQLVVSKKSQILLYHAHHLDSDLSNDYLQNHNQQFDVLFNEIISFSKKCKLGKEHIQKIENVYSNKKNSASIEELAESFIKLLGFTQLGATSPFNFLGVKLNQKQYKGKKDYILPCTEGTLIRQSITGLYETRVDLSKIGEDSGGSGGSKRTADGSEFES

SEQ ID NO: 9021 - protein, 1082 aa, Neisseria meningitidis
MAAFKPNSINYILGLDIGIASVGWAMVEIDEEENPIRLIDLGVRVFERAEVPKTGDSLAMARRLARSVRRLTRRRAHRLLRTRRLLKREGVLQAANFDENGLIKSLPNTPWQLRAAALDRKLTPLEWSAVLLHLIKHRGYLSQRKNEGETADKELGALLKGVAGNAHALQTGDFRTPAELALNKFEKESGHIRNQRSDYSHTFSRKDLQAELILLFEKQKEFGNPHVSGGLKEGIETLLMTQRPALSGDAVQKMLGHCTFEPAEPKAAKNTYTAERFIWLTKLNNLRILEQGSERPLTDTERATLMDEPYRKSKLTYAQARKLLGLEDTAFFKGLRYGKDNAEASTLMEMKAYHAISRALEKEGLKDKKSPLNLSPELQDEIGTAFSLFKTDEDITGRLKDRIQPEILEALLKHISFDKFVQISLKALRRIVPLMEQGKRYDEACAEIYGDHYGKKNTEEKIYLPPIPADEIRNPVVLRALSQARKVINGVVRRYGSPARIHIETAREVGKSFKDRKEIEKRQEENRKDREKAAAKFREYFPNFVGEPKSKDILKLRLYEQQHGKCLYSGKEINLGRLNEKGYVEIDHALPFSRTWDDSFNNKVLVLGSENQNKGNQTPYEYFNGKDNSREWQEFKARVETSRFPRSKKQRILLQKFDEDGFKERNLNDTRYVNRFLCQFVADRMRLTGKGKKRVFASNGQITNLLRGFWGLRKVRAENDRHHALDAVVVACSTVAMQQKITRFVRYKEMNAFDGKTIDKETGEVLHQKTHFPQPWEFFAQEVMIRVFGKPDGKPEFEEADTLEKLRTLLAEKLSSRPEAVHEYVTPLFVSRAPNRKMSGQGHMETVKSAKRLDEGVSVLRVPLTQLKLKDLEKMVNREREPKLYEALKARLEAHKDDPAKAFAEPFYKYDKAGNRTQQVKAVRVEQVQKTGVWVRNHNGIADNATMVRVDVFEKGDKYYLVPIYSWQVAKGILPDRAVVQGKDEEDWQLIDDSFNFKFSLHPNDLVEVITKKARMFGYFASCHRGTGNINIRIHDLDHKIGKNGILEGIGVKTALSFQKYQIDELGKEIRPCRLKKRPPVR

SEQ ID NO: 9022 - protein, 1375 aa, Streptococcus canis
MEKKYSIGLDIGTNSVGWAVITDDYKVPSKKFKVLGNTNRKSIKKNLMGALLFDSGETAEATRLKRTARRRYTRRKNRIRYLQEIFANEMAKLDDSFFQRLEESFLVEEDKKNERHPIFGNLADEVAYHRNYPTIYHLRKKLADSPEKADLRLIYLALAHIIKFRGHFLIEGKLNAENSDVAKLFYQLIQTYNQLFEESPLDEIEVDAKGILSARLSKSKRLEKLIAVFPNEKKNGLFGNIIALALGLTPNFKSNFDLTEDAKLQLSKDTYDDDLDELLGQIGDQYADLFSAAKNLSDAILLSDILRSNSEVTKAPLSASMVKRYDEHHQDLALLKTLVRQQFPEKYAEIFKDDTKNGYAGYVGIGIKHRKRTTKLATQEEFYKFIKPILEKMDGAEELLAKLNRDDLLRKQRTFDNGSIPHQIHLKELHAILRRQEEFYPFLKENREKIEKILTFRIPYYVGPLARGNSRFAWLTRKSEEAITPWNFEEVVDKGASAQSFIERMTNFDEQLPNKKVLPKHSLLYEYFTVYNELTKVKYVTERMRKPEFLSGEQKKAIVDLLFKTNRKVTVKQLKEDYFKKIECFDSVEIIGVEDRFNASLGTYHDLLKIIKDKDFLDNEENEDILEDIVLTLTLFEDREMIEERLKTYAHLFDDKVMKQLKRRHYTGWGRLSRKMINGIRDKQSGKTILDFLKSDGFSNRNFMQLIHDDSLTFKEEIEKAQVSGQGDSLHEQIADLAGSPAIKKGILQTVKIVDELVKVMGHKPENIVIEMARENQTTTKGLQQSRERKKRIEEGIKELESQILKENPVENTQLQNEKLYLYYLQNGRDMYVDQELDINRLSDYDVDHIVPQSFIKDDSIDNKVLTRSVENRGKSDNVPSEEVVKKMKNYWRQLLNAKLITQRKFDNLTKAERGGLSEADKAGFIKRQLVETRQITKHVARILDSRMNTKRDKNDKPIREVKVITLKSKLVSDFRKDFQLYKVRDINNYHHAHDAYLNAVVGTALIKKYPKLESEFVYGDYKVYDVRKMIAKSEQEIGKATAKRFFYSNIMNFFKTEVKLANGEIRKRPLIETNGETGEVVWNKEKDFATVRKVLAMPQVNIVKKTEVQTGGFSKESILSKRESAKLIPRKKGWDTRKYGGFGSPTVAYSILVVAKVEKGKAKKLKSVKVLVGITIMEKGSYEKDPIGFLEAKGYKDIKKELIFKLPKYSLFELENGRRRMLASATELQKANELVLPQHLVRLLYYTQNISATTGSNNLGYIEQHREEFKEIFEKIIDFSEKYILKNKVNSNLKSSFDEQFAVSDSILLSNSFVSLLKYTSFGASGGFTFLDLDVKQGRLRYQTVTEVLDATLIYQSITGLYETRTDLSQLGGD

SEQ ID NO: 9023 - protein, 1375 aa, Streptococcus canis
MEKKYSIGLDIGTNSVGWAVITDDYKVPSKKFKVLGNTNRKSIKKNLMGALLFDSGETAEATRLKRTARRRYTRRKNRIRYLQEIFANEMAKLDDSFFQRLEESFLVEEDKKNERHPIFGNLADEVAYHRNYPTIYHLRKKLADSPEKADLRLIYLALAHIIKFRGHFLIEGKLNAENSDVAKLFYQLIQTYNQLFEESPLDEIEVDAKGILSARLSKSKRLEKLIAVFPNEKKNGLFGNIIALALGLTPNFKSNFDLTEDAKLQLSKDTYDDDLDELLGQIGDQYADLFSAAKNLSDAILLSDILRSNSEVTKAPLSASMVKRYDEHHQDLALLKTLVRQQFPEKYAEIFKDDTKNGYAGYVGADKKLRKRSGKLATEEEFYKFIKPILEKMDGAEELLAKLNRDDLLRKQRTFDNGSIPHQIHLKELHAILRRQEEFYPFLKENREKIEKILTFRIPYYVGPLARGNSRFAWLTRKSEEAITPWNFEEVVDKGASAQSFIERMTNFDEQLPNKKVLPKHSLLYEYFTVYNELTKVKYVTERMRKPEFLSGEQKKAIVDLLFKTNRKVTVKQLKEDYFKKIECFDSVEIIGVEDRFNASLGTYHDLLKIIKDKDFLDNEENEDILEDIVLTLTLFEDREMIEERLKTYAHLFDDKVMKQLKRRHYTGWGRLSRKMINGIRDKQSGKTILDFLKSDGFSNANFMQLIHDDSLTFKEEIEKAQVSGQGDSLHEQIADLAGSPAIKKGILQTVKIVDELVKVMGHKPENIVIEMARENQTTTKGLQQSRERKKRIEEGIKELESQILKENPVENTQLQNEKLYLYYLQNGRDMYVDQELDINRLSDYDVDHIVPQSFIKDDSIDNKVLTRSVENRGKSDNVPSEEVVKKMKNYWRQLLNAKLITQRKFDNLTKAERGGLSEADKAGFIKRQLVETRQITKHVARILDSRMNTKRDKNDKPIREVKVITLKSKLVSDFRKDFQLYKVRDINNYHHAHDAYLNAVVGTALIKKYPKLESEFVYGDYKVYDVRKMIAKSEQEIGKATAKRFFYSNIMNFFKTEVKLANGEIRKRPLIETNGETGEVVWNKEKDFATVRKVLAMPQVNIVKKTEVQTGGFSKESILSKRESAKLIPRKKGWDTRKYGGFGSPTVAYSILVVAKVEKGKAKKLKSVKVLVGITIMEKGSYEKDPIGFLEAKGYKDIKKELIFKLPKYSLFELENGRRRMLASAKELQKANELVLPQHLVRLLYYTQNISATTGSNNLGYIEQHREEFKEIFEKIIDFSEKYILKNKVNSNLKSSFDEQFAVSDSILLSNSFVSLLKYTSFGASGGFTFLDLDVKQGRLRYQTVTEVLDATLIYQSITGLYETRTDLSQLGGD

SEQ ID NO: 9024 - protein, 1368 aa, Streptococcus pyogenes
MDKKYSIGLDIGTNSVGWAVITDEYKVPSKKFKVLGNTDRHSIKKNLIGALLFDSGETAEATRLKRTARRRYTRRKNRICYLQEIFSNEMAKVDDSFFHRLEESFLVEEDKKHERHPIFGNIVDEVAYHEKYPTIYHLRKKLVDSTDKADLRLIYLALAHMIKFRGHFLIEGDLNPDNSDVDKLFIQLVQTYNQLFEENPINASGVDAKAILSARLSKSRRLENLIAQLPGEKKNGLFGNLIALSLGLTPNFKSNFDLAEDAKLQLSKDTYDDDLDNLLAQIGDQYADLFLAAKNLSDAILLSDILRVNTEITKAPLSASMVKRYDEHHQDLTLLKALVRQQLPEKYKEIFFDQSKNGYAGYIDGGASQEEFYKFIKPILEKMDGTEELLVKLNREDLLRKQRTFDNGIIPHQIHLGELHAILRRQGDFYPFLKDNREKIEKILTFRIPYYVGPLARGNSRFAWMTRKSEETITPWNFEEVVDKGASAQSFIERMTNFDKNLPNEKVLPKHSLLYEYFTVYNELTKVKYVTEGMRKPAFLSGEQKKAIVDLLFKTNRKVTVKQLKEDYFKKIECFDSVEISGVEDRFNASLGTYHDLLKIIKDKDFLDNEENEDILEDIVLTLTLFEDREMIEERLKTYAHLFDDKVMKQLKRLRYTGWGRLSRKLINGIRDKQSGKTILDFLKSDGFANRNFMQLIHDDSLTFKEDIQKAQVSGQGDSLHEHIANLAGSPAIKKGILQTVKVVDELVKVMGGHKPENIVIEMARENQTTQKGQKNSRERMKRIEEGIKELGSQILKEHPVENTQLQNEKLYLYYLQNGRDMYVDQELDINRLSDYDVDHIVPQSFLKDDSIDNKVLTRSDKNRGKSDNVPSEEVVKKMKNYWRQLLNAKLITQRKFDNLTKAERGGLSELDKAGFIKRQLVETRQITKHVAQILDSRMNTKYDENDKLIREVKVITLKSKLVSDFRKDFQFYKVREINNYHHAHDAYLNAVVGTALIKKYPKLESEFVYGDYKVYDVRKMIAKSEQEIGKATAKYFFYSNIMNFFKTEITLANGEIRKRPLIETNGETGEIVWDKGRDFATVRKVLSMPQVNIVKKTEVQTGGFSKESILPKGNSDKLIARKKDWDPKKYGGFNSPTAAYSVLVVAKVEKGKSKKLKSVKELLGITIMERSSFEKNPIGFLEAKGYKEVKKDLIIKLPKYSLFELENGRKRMLASAGVLHKGNELALPSKYVNFLYLASHYEKLKGSPEDNEQKQLFVEQHKHYLDEIIEQISEFSKRVILADANLDKVLSAYNKHRDKPIREQAENIIHLFTLTNLGVPAAFKYFDTTIDKKRYTSTKEVLDATLIHQSITGLYETRIDLSQLGGD

SEQ ID NO: 9025 - protein, 1368 aa, Streptococcus pyogenes
MDKKYSIGLDIGTNSVGWAVITDEYKVPSKKFKVLGNTDRHSIKKNLIGALLFDSGETAEATRLKRTARRRYTRRKNRICYLQEIFSNEMAKVDDSFFHRLEESFLVEEDKKHERHPIFGNIVDEVAYHEKYPTIYHLRKKLVDSTDKADLRLIYLALAHMIKFRGHFLIEGDLNPDNSDVDKLFIQLVQTYNQLFEENPINASGVDAKAILSARLSKSRRLENLIAQLPGEKKNGLFGNLIALSLGLTPNFKSNFDLAEDAKLQLSKDTYDDDLDNLLAQIGDQYADLFLAAKNLSDAILLSDILRVNTEITKAPLSASMVKRYDEHHQDLTLLKALVRQQLPEKYKEIFFDQSKNGYAGYIDGGASQEEFYKFIKPILEKMDGTEELLVKLNREDLLRKQRTFDNGIIPHQIHLGELHAILRRQGDFYPFLKDNREKIEKILTFRIPYYVGPLARGNSRFAWMTRKSEETITPWNFEEVVDKGASAQSFIERMTNFDKNLPNEKVLPKHSLLYEYFTVYNELTKVKYVTEGMRKPAFLSGEQKKAIVDLLFKTNRKVTVKQLKEDYFKKIECFDSVEISGVEDRFNASLGTYHDLLKIIKDKDFLDNEENEDILEDIVLTLTLFEDREMIEERLKTYAHLFDDKVMKQLKRLRYTGWGRLSRKLINGIRDKQSGKTILDFLKSDGFANRNFMQLIHDDSLTFKEDIQKAQVSGQGDSLHEHIANLAGSPAIKKGILQTVKVVDELVKVMGGHKPENIVIEMARENQTTQKGQKNSRERMKRIEEGIKELGSQILKEHPVENTQLQNEKLYLYYLQNGRDMYVDQELDINRLSDYDVDHIVPQSFLKDDSIDNKVLTRSDKNRGKSDNVPSEEVVKKMKNYWRQLLNAKLITQRKFDNLTKAERGGLSELDKAGFIKRQLVETRQITKHVAQILDSRMNTKYDENDKLIREVKVITLKSKLVSDFRKDFQFYKVREINNYHHAHDAYLNAVVGTALIKKYPKLESEFVYGDYKVYDVRKMIAKSEQEIGKATAKYFFYSNIMNFFKTEITLANGEIRKRPLIETNGETGEIVWDKGRDFATVRKVLSMPQVNIVKKTEVQTGGFSKESILPKGNSDKLIARKKDWDPKKYGGFNSPTVAYSVLVVAKVEKGKSKKLKSVKELLGITIMERSSFEKNPIGFLEAKGYKEVKKDLIIKLPKYSLFELENGRKRMLASASVLHKGNELALPSKYVNFLYLASHYEKLKGSSEDNKQKQLFVEQHKHYLDEIIEQISEFSKRVILADANLDKVLSAYNKHRDKPIREQAENIIHLFTLTNLGASAAFKYFDTTIGRKLYTSTKEVLDATLIHQSITGLYETRIDLSQLGGD

SEQ ID NO: 9026 - protein, 1368 aa, Streptococcus pyogenes
MDKKYSIGLDIGTNSVGWAVITDEYKVPSKKFKVLGNTDRHSIKKNLIGALLFDSGETAEATRLKRTARRRYTRRKNRICYLQEIFSNEMAKVDDSFFHRLEESFLVEEDKKHERHPIFGNIVDEVAYHEKYPTIYHLRKKLVDSTDKADLRLIYLALAHMIKFRGHFLIEGDLNPDNSDVDKLFIQLVQTYNQLFEENPINASGVDAKAILSARLSKSRRLENLIAQLPGEKKNGLFGNLIALSLGLTPNFKSNFDLAEDAKLQLSKDTYDDDLDNLLAQIGDQYADLFLAAKNLSDAILLSDILRVNTEITKAPLSASMVKRYDEHHQDLTLLKALVRQQLPEKYKEIFFDQSKNGYAGYIDGGASQEEFYKFIKPILEKMDGTEELLVKLNREDLLRKQRTFDNGIIPHQIHLGELHAILRRQGDFYPFLKDNREKIEKILTFRIPYYVGPLARGNSRFAWMTRKSEETITPWNFEEVVDKGASAQSFIERMTNFDKNLPNEKVLPKHSLLYEYFTVYNELTKVKYVTEGMRKPAFLSGEQKKAIVDLLFKTNRKVTVKQLKEDYFKKIECFDSVEISGVEDRFNASLGTYHDLLKIIKDKDFLDNEENEDILEDIVLTLTLFEDREMIEERLKTYAHLFDDKVMKQLKRLRYTGWGRLSRKLINGIRDKQSGKTILDFLKSDGFANRNFMQLIHDDSLTFKEDIQKAQVSGQGDSLHEHIANLAGSPAIKKGILQTVKVVDELVKVMGGHKPENIVIEMARENQTTQKGQKNSRERMKRIEEGIKELGSQILKEHPVENTQLQNEKLYLYYLQNGRDMYVDQELDINRLSDYDVDHIVPQSFLKDDSIDNKVLTRSDKNRGKSDNVPSEEVVKKMKNYWRQLLNAKLITQRKFDNLTKAERGGLSELDKAGFIKRQLVETRQITKHVAQILDSRMNTKYDENDKLIREVKVITLKSKLVSDFRKDFQFYKVREINNYHHAHDAYLNAVVGTALIKKYPKLESEFVYGDYKVYDVRKMIAKSEQEIGKATAKYFFYSNIMNFFKTEITLANGEIRKRPLIETNGETGEIVWDKGRDFATVRKVLSMPQVNIVKKTEVQTGGFSKESILPKGNSDKLIARKKDWDPKKYGGFNSPTVAYSVLVVAKVEKGKSKKLKSVKELLGITIMERSSFEKNPIDFLEAKGYKEVKKDLIIKLPKYSLFELENGRKRMLASAGVLQKGNELALPSKYVNFLYLASHYEKLKGSPEDNEQKQLFVEQHKHYLDEIIEQISEFSKRVILADANLDKVLSAYNKHRDKPIREQAENIIHLFTLTNLGAPAAFKYFDTTINRKQYNTTKEVLDATLIRQSITGLYETRIDLSQLGGD

SEQ ID NO: 9027 - protein, 1368 aa, Streptococcus pyogenes [sequence omitted]

SEQ ID NO: 9028 - protein, 1368 aa, Streptococcus pyogenes
MDKKYSIGLDIGTNSVGWAVITDEYKVPSKKFKVLGNTDRHSIKKNLIGALLFDSGETAEATRLKRTARRRYTRRKNRICYLQEIFSNEMAKVDDSFFHRLEESFLVEEDKKHERHPIFGNIVDEVAYHEKYPTIYHLRKKLVDSTDKADLRLIYLALAHMIKFRGHFLIEGDLNPDNSDVDKLFIQLVQTYNQLFEENPINASGVDAKAILSARLSKSRRLENLIAQLPGEKKNGLFGNLIALSLGLTPNFKSNFDLAEDAKLQLSKDTYDDDLDNLLAQIGDQYADLFLAAKNLSDAILLSDILRVNTEITKAPLSASMIKRYDEHHQDLTLLKALVRQQLPEKYKEIFFDQSKNGYAGYIDGGASQEEFYKFIKPILEKMDGTEELLVKLNREDLLRKQRTFDNGSIPHQIHLGELHAILRRQEDFYPFLKDNREKIEKILTFRIPYYVGPLARGNSRFAWMTRKSEETITPWNFEEVVDKGASAQSFIERMTNFDKNLPNEKVLPKHSLLYEYFTVYNELTKVKYVTEGMRKPAFLSGEQKKAIVDLLFKTNRKVTVKQLKEDYFKKIECFDSVEISGVEDRFNASLGTYHDLLKIIKDKDFLDNEENEDILEDIVLTLTLFEDREMIEERLKTYAHLFDDKVMKQLKRRRYTGWGRLSRKLINGIRDKQSGKTILDFLKSDGFANRNFMQLIHDDSLTFKEDIQKAQVSGQGDSLHEHIANLAGSPAIKKGILQTVKVVDELVKVMGRHKPENIVIEMARENQTTQKGQKNSRERMKRIEEGIKELGSQILKEHPVENTQLQNEKLYLYYLQNGRDMYVDQELDINRLSDYDVDHIVPQSFLKDDSIDNKVLTRSDKNRGKSDNVPSEEVVKKMKNYWRQLLNAKLITQRKFDNLTKAERGGLSELDKAGFIKRQLVETRQITKHVAQILDSRMNTKYDENDKLIREVKVITLKSKLVSDFRKDFQFYKVREINNYHHAHDAYLNAVVGTALIKKYPKLESEFVYGDYKVYDVRKMIAKSEQEIGKATAKYFFYSNIMNFFKTEITLANGEIRKRPLIETNGETGEIVWDKGRDFATVRKVLSMPQVNIVKKTEVQTGGFSKESILPKRNSDKLIARKKDWDPKKYGGFDSPTVAYSVLVVAKVEKGKSKKLKSVKELLGITIMERSSFEKNPIDFLEAKGYKEVKKDLIIKLPKYSLFELENGRKRMLASARELQKGNELALPSKYVNFLYLASHYEKLKGSPEDNEQKQLFVEQHKHYLDEIIEQISEFSKRVILADAQLDKVLSAYNKHRDKPIREQAENIIHLFTLTNLGAPAAFKYFDTTFKQKQYRSTKEVLDATLIHQSITGLYETRIDLSQLGGD

SEQ ID NO: 9029 - protein, 1368 aa, Streptococcus pyogenes
MDKKYSIGLDIGTNSVGWAVITDEYKVPSKKFKVLGNTDRHSIKKNLIGALLFDSGETAEATRLKRTARRRYTRRKNRICYLQEIFSNEMAKVDDSFFHRLEESFLVEEDKKHERHPIFGNIVDEVAYHEKYPTIYHLRKKLVDSTDKADLRLIYLALAHMIKFRGHFLIEGDLNPDNSDVDKLFIQLVQTYNQLFEENPINASGVDAKAILSARLSKSRRLENLIAQLPGEKKNGLFGNLIALSLGLTPNFKSNFDLAEDAKLQLSKDTYDDDLDNLLAQIGDQYADLFLAAKNLSDAILLSDILRVNTEITKAPLSASMIKRYDEHHQDLTLLKALVRQQLPEKYKEIFFDQSKNGYAGYIDGGASQEEFYKFIKPILEKMDGTEELLVKLNREDLLRKQRTFDNGSIPHQIHLGELHAILRRQEDFYPFLKDNREKIEKILTFRIPYYVGPLARGNSRFAWMTRKSEETITPWNFEEVVDKGASAQSFIERMTNFDKNLPNEKVLPKHSLLYEYFTVYNELTKVKYVTEGMRKPAFLSGEQKKAIVDLLFKTNRKVTVKQLKEDYFKKIECFDSVEISGVEDRFNASLGTYHDLLKIIKDKDFLDNEENEDILEDIVLTLTLFEDREMIEERLKTYAHLFDDKVMKQLKRRRYTGWGRLSRKLINGIRDKQSGKTILDFLKSDGFANRNFMQLIHDDSLTFKEDIQKAQVSGQGDSLHEHIANLAGSPAIKKGILQTVKVVDELVKVMGRHKPENIVIEMARENQTTQKGQKNSRERMKRIEEGIKELGSQILKEHPVENTQLQNEKLYLYYLQNGRDMYVDQELDINRLSDYDVDHIVPQSFLKDDSIDNKVLTRSDKNRGKSDNVPSEEVVKKMKNYWRQLLNAKLITQRKFDNLTKAERGGLSELDKAGFIKRQLVETRQITKHVAQILDSRMNTKYDENDKLIREVKVITLKSKLVSDFRKDFQFYKVREINNYHHAHDAYLNAVVGTALIKKYPKLESEFVYGDYKVYDVRKMIAKSEQEIGKATAKYFFYSNIMNFFKTEITLANGEIRKRPLIETNGETGEIVWDKGRDFATVRKVLSMPQVNIVKKTEVQTGGFSKESILPKRNSDKLIARKKDWDPKKYGGFLWPTVAYSVLVVAKVEKGKSKKLKSVKELLGITIMERSSFEKNPIDFLEAKGYKEVKKDLIIKLPKYSLFELENGRKRMLASAKQLQKGNELALPSKYVNFLYLASHYEKLKGSPEDNEQKQLFVEQHKHYLDEIIEQISEFSKRVILADANLDKVLSAYNKHRDKPIREQAENIIHLFTLTNLGAPAAFKYFDTTIDRKQYRSTKEVLDATLIHQSITGLYETRIDLSQLGGD

SEQ ID NO: 9030 - protein, 1368 aa, Streptococcus pyogenes
MDKKYSIGLDIGTNSVGWAVITDEYKVPSKKFKVLGNTDRHSIKKNLIGALLFDSGETAEATRLKRTARRRYTRRKNRICYLQEIFSNEMAKVDDSFFHRLEESFLVEEDKKHERHPIFGNIVDEVAYHEKYPTIYHLRKKLVDSTDKADLRLIYLALAHMIKFRGHFLIEGDLNPDNSDVDKLFIQLVQTYNQLFEENPINASGVDAKAILSARLSKSRRLENLIAQLPGEKKNGLFGNLIALSLGLTPNFKSNFDLAEDAKLQLSKDTYDDDLDNLLAQIGDQYADLFLAAKNLSDAILLSDILRVNTEITKAPLSASMIKRYDEHHQDLTLLKALVRQQLPEKYKEIFFDQSKNGYAGYIDGGASQEEFYKFIKPILEKMDGTEELLVKLNREDLLRKQRTFDNGSIPHQIHLGELHAILRRQEDFYPFLKDNREKIEKILTFRIPYYVGPLARGNSRFAWMTRKSEETITPWNFEEVVDKGASAQSFIERMTNFDKNLPNEKVLPKHSLLYEYFTVYNELTKVKYVTEGMRKPAFLSGEQKKAIVDLLFKTNRKVTVKQLKEDYFKKIECFDSVEISGVEDRFNASLGTYHDLLKIIKDKDFLDNEENEDILEDIVLTLTLFEDREMIEERLKTYAHLFDDKVMKQLKRRRYTGWGRLSRKLINGIRDKQSGKTILDFLKSDGFANRNFMQLIHDDSLTFKEDIQKAQVSGQGDSLHEHIANLAGSPAIKKGILQTVKVVDELVKVMGRHKPENIVIEMARENQTTQKGQKNSRERMKRIEEGIKELGSQILKEHPVENTQLQNEKLYLYYLQNGRDMYVDQELDINRLSDYDVDHIVPQSFLKDDSIDNKVLTRSDKNRGKSDNVPSEEVVKKMKNYWRQLLNAKLITQRKFDNLTKAERGGLSELDKAGFIKRQLVETRQITKHVAQILDSRMNTKYDENDKLIREVKVITLKSKLVSDFRKDFQFYKVREINNYHHAHDAYLNAVVGTALIKKYPKLESEFVYGDYKVYDVRKMIAKSEQEIGKATAKYFFYSNIMNFFKTEITLANGEIRKRPLIETNGETGEIVWDKGRDFATVRKVLSMPQVNIVKKTEVQTGGFSKESILPKRNSDKLIARKKDWDPKKYGGFVSPTVAYSVLVVAKVEKGKSKKLKSVKELLGITIMERSSFEKNPIDFLEAKGYKEVKKDLIIKLPKYSLFELENGRKRMLASAGELQKGNELALPSKYVNFLYLASHYEKLKGSPEDNEQKQLFVEQHKHYLDEIIEQISEFSKRVILADANLDKVLSAYNKHRDKPIREQAENIIHLFTLTNLGAPAAFKYFDTTIDRKQYRSTKEVLDATLIHQSITGLYETRIDLSQLGGD

SEQ ID NO: 9031 - protein, 1368 aa, Streptococcus pyogenes
MDKKYSIGLDIGTNSVGWAVITDEYKVPSKKFKVLGNTDRHSIKKNLIGALLFDSGETAEATRLKRTARRRYTRRKNRICYLQEIFSNEMAKVDDSFFHRLEESFLVEEDKKHERHPIFGNIVDEVAYHEKYPTIYHLRKKLVDSTDKADLRLIYLALAHMIKFRGHFLIEGDLNPDNSDVDKLFIQLVQTYNQLFEENPINASGVDAKAILSARLSKSRRLENLIAQLPGEKKNGLFGNLIALSLGLTPNFKSNFDLAEDAKLQLSKDTYDDDLDNLLAQIGDQYADLFLAAKNLSDAILLSDILRVNTEITKAPLSASMIKRYDEHHQDLTLLKALVRQQLPEKYKEIFFDQSKNGYAGYIDGGASQEEFYKFIKPILEKMDGTEELLVKLNREDLLRKQRTFDNGSIPHQIHLGELHAILRRQEDFYPFLKDNREKIEKILTFRIPYYVGPLARGNSRFAWMTRKSEETITPWNFEEVVDKGASAQSFIERMTNFDKNLPNEKVLPKHSLLYEYFTVYNELTKVKYVTEGMRKPAFLSGEQKKAIVDLLFKTNRKVTVKQLKEDYFKKIECFDSVEISGVEDRFNASLGTYHDLLKIIKDKDFLDNEENEDILEDIVLTLTLFEDREMIEERLKTYAHLFDDKVMKQLKRRRYTGWGRLSRKLINGIRDKQSGKTILDFLKSDGFANRNFMQLIHDDSLTFKEDIQKAQVSGQGDSLHEHIANLAGSPAIKKGILQTVKVVDELVKVMGRHKPENIVIEMARENQTTQKGQKNSRERMKRIEEGIKELGSQILKEHPVENTQLQNEKLYLYYLQNGRDMYVDQELDINRLSDYDVDHIVPQSFLKDDSIDNKVLTRSDKNRGKSDNVPSEEVVKKMKNYWRQLLNAKLITQRKFDNLTKAERGGLSELDKAGFIKRQLVETRQITKHVAQILDSRMNTKYDENDKLIREVKVITLKSKLVSDFRKDFQFYKVREINNYHHAHDAYLNAVVGTALIKKYPKLESEFVYGDYKVYDVRKMIAKSEQEIGKATAKYFFYSNIMNFFKTEITLANGEIRKRPLIETNGETGEIVWDKGRDFATVRKVLSMPQVNIVKKTEVQTGGFSKESILPKRNSDKLIARKKDWDPKKYGGFVSPTVAYSVLVVAKVEKGKSKKLKSVKELLGITIMERSSFEKNPIDFLEAKGYKEVKKDLIIKLPKYSLFELENGRKRMLASARELQKGNELALPSKYVNFLYLASHYEKLKGSPEDNEQKQLFVEQHKHYLDEIIEQISEFSKRVILADANLDKVLSAYNKHRDKPIREQAENIIHLFTLTNLGAPAAFKYFDTTIDRKEYRSTKEVLDATLIHQSITGLYETRIDLSQLGGD

SEQ ID NO: 9032 - protein, 1368 aa, Streptococcus pyogenes
MDKKYSIGLDIGTNSVGWAVITDEYKVPSKKFKVLGNTDRHSIKKNLIGALLFDSGETAEATRLKRTARRRYTRRKNRICYLQEIFSNEMAKVDDSFFHRLEESFLVEEDKKHERHPIFGNIVDEVAYHEKYPTIYHLRKKLVDSTDKADLRLIYLALAHMIKFRGHFLIEGDLNPDNSDVDKLFIQLVQTYNQLFEENPINASGVDAKAILSARLSKSRRLENLIAQLPGEKKNGLFGNLIALSLGLTPNFKSNFDLAEDTKLQLSKDTYDDDLDNLLAQIGDQYADLFLAAKNLSDAILLSDILRVNTEITKAPLSASMIKLYDEHHQDLTLLKALVRQQLPEKYKEIFFDQSKNGYAGYIDGGASQEEFYKFIKPILEKMDGTEELLVKLNREDLLRKQRTFDNGIIPHQIHLGELHAILRRQEDFYPFLKDNREKIEKILTFRIPYYVGPLARGNSRFAWMTRKSEETITPWNFEKVVDKGASAQSFIERMTNFDKNLPNEKVLPKHSLLYEYFTVYNELTKVKYVTEGMRKPAFLSGDQKKAIVDLLFKTNRKVTVKQLKEDYFKKIECFDSVEISGVEDRFNASLGTYHDLLKIIKDKDFLDNEENEDILEDIVLTLTLFEDREMIEERLKTYAHLFDDKVMKQLKRRRYTGWGRLSRKLINGIRDKQSGKTILDFLKSDGFANRNFIQLIHDDSLTFKEDIQKAQVSGQGDSLHEHIANLAGSPAIKKGILQTVKVVDELVKVMGRHKPENIVIEMARENQTTQKGQKNSRERMKRIEEGIKELGSQILKEHPVENTQLQNEKLYLYYLQNGRDMYVDQELDINRLSDYDVDHIVPQSFLKDDSIDNKVLTRSDKNRGKSDNVPSEEVVKKMKNYWRQLLNAKLITQRKFDNLTKAERGGLSELDKAGFIKRQLVETRQITKHVAQILDSRMNTKYDENDKLIREVKVITLKSKLVSDFRKDFQFYKVREINNYHHAHDAYLNAVVGTALIKKYPKLESEFVYGDYKVYDVRKMIAKSEQEIGKATAKYFFYSNIMNFFKTEITLANGEIRKRPLIETNGETGEIVWDKGRDFATVRKVLSMPQVNIVKKTEVQTGGFSKESILPKRNSDKLIARKKDWDPKKYGGFDSPTVAYSVLVVAKVEKGKSKKLKSVKELLGITIMERSSFEKNPIDFLEAKGYKEVKKDLIIKLPKYSLFELENGRKRMLASAGVLQKGNELALPSKYVNFLYLASHYEKLKGSPEDNEQKQLFVEQHKHYLDEIIEQISEFSKRVILADANLDKVLSAYNKHRDKPIREQAENIIHLFTLTNLGAPAAFKYFDTTIDRKRYTSTKEVLDATLIHQSITGLYETRIDLSQLGGD

SEQ ID NO: 9033 - protein, 1368 aa, Streptococcus pyogenes
MDKKYSIGLDIGTNSVGWAVITDEYKVPSKKFKVLGNTDRHSIKKNLIGALLFDSGETAEATRLKRTARRRYTRRKNRICYLQEIFSNEMAKVDDSFFHRLEESFLVEEDKKHERHPIFGNIVDEVAYHEKYPTIYHLRKKLVDSTDKADLRLIYLALAHMIKFRGHFLIEGDLNPDNSDVDKLFIQLVQTYNQLFEENPINASGVDAKAILSARLSKSRRLENLIAQLPGEKKNGLFGNLIALSLGLTPNFKSNFDLAEDTKLQLSKDTYDDDLDNLLAQIGDQYADLFLAAKNLSDAILLSDILRVNTEITKAPLSASMIKLYDEHHQDLTLLKALVRQQLPEKYKEIFFDQSKNGYAGYIDGGASQEEFYKFIKPILEKMDGTEELLVKLNREDLLRKQRTFDNGIIPHQIHLGELHAILRRQEDFYPFLKDNREKIEKILTFRIPYYVGPLARGNSRFAWMTRKSEETITPWNFEKVVDKGASAQSFIERMTNFDKNLPNEKVLPKHSLLYEYFTVYNELTKVKYVTEGMRKPAFLSGDQKKAIVDLLFKTNRKVTVKQLKEDYFKKIECFDSVEISGVEDRFNASLGTYHDLLKIIKDKDFLDNEENEDILEDIVLTLTLFEDREMIEERLKTYAHLFDDKVMKQLKRRRYTGWGRLSRKLINGIRDKQSGKTILDFLKSDGFANRNFIQLIHDDSLTFKEDIQKAQVSGQGDSLHEHIANLAGSPAIKKGILQTVKVVDELVKVMGRHKPENIVIEMARENQTTQKGQKNSRERMKRIEEGIKELGSQILKEHPVENTQLQNEKLYLYYLQNGRDMYVDQELDINRLSDYDVDHIVPQSFLKDDSIDNKVLTRSDKNRGKSDNVPSEEVVKKMKNYWRQLLNAKLITQRKFDNLTKAERGGLSELDKAGFIKRQLVETRQITKHVAQILDSRMNTKYDENDKLIREVKVITLKSKLVSDFRKDFQFYKVREINNYHHAHDAYLNAVVGTALIKKYPKLESEFVYGDYKVYDVRKMIAKSEQEIGKATAKYFFYSNIMNFFKTEITLANGEIRKRPLIETNGETGEIVWDKGRDFATVRKVLSMPQVNIVKKTEVQTGGFSKESIRPKRNSDKLIARKKDWDPKKYGGFVSPTVAYSVLVVAKVEKGKSKKLKSVKELLGITIMERSSFEKNPIDFLEAKGYKEVKKDLIIKLPKYSLFELENGRKRMLASARFLQKGNELALPSKYVNFLYLASHYEKLKGSPEDNEQKQLFVEQHKHYLDEIIEQISEFSKRVILADANLDKVLSAYNKHRDKPIREQAENIIHLFTLTNLGAPRAFKYFDTTIDRKVYRSTKEVLDATLIHQSITGLYETRIDLSQLGGD

SEQ ID NO: 9034 - protein, 1122 aa, Streptococcus thermophilus
MSDLVLGLDIGIGSVGVGILNKVTGEIIHKNSRIFPAAQAENNLVRRTNRQGRRLARRKKHRRVRLNRLFEESGLITDFTKISINLNPYQLRVKGLTDELSNEELFIALKNMVKHRGISYLDDASDDGNSSVGDYAQIVKENSKQLETKTPGQIQLERYQTYGQLRGDFTVEKDGKKHRLINVFPTSAYRSEALRILQTQQEFNPQITDEFINRYLEILTGKRKYYHGPGNEKSRTDYGRYRTSGETLDNIFGILIGKCTFYPDEFRAAKASYTAQEFNLLNDLNNLTVPTETKKLSKEQKNQIINYVKNEKAMGPAKLFKYIAKLLSCDVADIKGYRIDKSGKAEIHTFEAYRKMKTLETLDIEQMDRETLDKLAYVLTLNTEREGIQEALEHEFADGSFSQKQVDELVQFRKANSSIFGKGWHNFSVKLMMELIPELYETSEEQMTILTRLGKQKTTSSSNKTKYIDEKLLTEEIYNPVVAKSVRQAIKIVNAAIKEYGDFDNIVIEMARETNEDDEKKAIQKIQKANKDEKDAAMLKAANQYNGKAELPHSVFHGHKQLATKIRLWHQQGERCLYTGKTISIHDLINNSNQFEVDHILPLSITFDDSLANKVLVYATANQEKGQRTPYQALDSMDDAWSFRELKAFVRESKTLSNKKKEYLLTEEDISKFDVRKKFIERNLVDTRYASRVVLNALQEHFRAHKIDTKVSVVRGQFTSQLRRHWGIEKTRDTYHHHAVDALIIAASSQLNLWKKQKNTLVSYSEEQLLDIETGELISDDEYKESVFKAPYQHFVDTLKSKEFEDSILFSYQVDSKFNRKISDATIYATRQAKVGKDKKDETYVLGKIKDIYTQDGYDAFMKIYKKDKSKFLMYRHDPQTFEKVIEPILENYPNKQMNEKGKEVPCNPFLKYKEEHGYIRKYSKKGNGPEIKSLKYYDSKLLGNPIDITPENSKNKVVLQSLKPWRTDVYFNKATGKYEILGLKYADLQFEKGTGTYKISQEKYNDIKKKEGVDSDSEFKFTLYKNDLLLVKDTETKEQQLFRFLSRTLPKQKHYVELKPYDKQKFEGGEALIKVLGNVANGGQCIKGLAKSNISIYKVRTDVLGNQHIIKNEGDKPKLDF

SEQ ID NO: 9035 - protein, 1122 aa, Streptococcus thermophilus
MSDLVLGLDIGIGSVGVGILNKVTGEIIHKNSRIFPAAQAENNLVRRTNRQGRRLARRKKHRRVRLNRLFEESGLITDFTKISINLNPYQLRVKGLTDELSNEELFIALKNMVKHRGISYLDDASDDGNSSVGDYAQIVKENSKQLETKTPGQIQLERYQTYGQLRGDFTVEKDGKKHRLINVFPTSAYRSEALRILQTQQEFNPQITDEFINRYLEILTGKRKYYHGPGNEKSRTDYGRYRTSGETLDNIFGILIGKCTFYPDEFRAAKASYTAQEFNLLNDLNNLTVPTETKKLSKEQKNQIINYVKNEKAMGPAKLFKYIAKLLSCDVADIKGYRIDKSGKAEIHTFEAYRKMKTLETLDIEQMDRETLDKLAYVLTLNTEREGIQEALEHEFADGSFSQKQVDELVQFRKANSSIFGKGWHNFSVKLMMELIPELYETSEEQMTILTRLGKQKTTSSSNKTKYIDEKLLTEEIYNPVVAKSVRQAIKIVNAAIKEYGDFDNIVIEMARETNEDDEKKAIQKIQKANKDEKDAAMLKAANQYNGKAELPHSVFHGHKQLATKIRLWHQQGERCLYTGKTISIHDLINNSNQFEVDHILPLSITFDDSLANKVLVYATANQEKGQRTPYQALDSMDDAWSFRELKAFVRESKTLSNKKKEYLLTEEDISKFDVRKKFIERNLVDTRYASRVVLNALQEHFRAHKIDTKVSVVRGQFTSQLRRHWGIEKTRDTYHHHAVDALIIAASSQLNLWKKQKNTLVSYSEEQLLDIETGELISDDEYKESVFKAPYQHFVDTLKSKEFEDSILFSYQVDSKFNRKISDATIYATRQAKVGKDKKDETYVLGKIKDIYTQDGYDAFMKIYKKDKSKFLMYRHDPQTFEKVIEPILENYPNKQMNEKGKEVPCNPFLKYKEEHGYIRKYSKKGNGPEIKSLKYYDSKLLGNPIDITPENSKNKVVLQSLKPWRTDVYFNKNTGKYEILGLKYADLQFEKKTGTYKISQEKYNGIMKEEGVDSDSEFKFTLYKNDLLLVKDTETKEQQLFRFLSRTMPNVKYYVELKPYSKDKFEKNESLIEILGSADKSGRCIKGLGKSNISIYKVRTDVLGNQHIIKNEGDKPKLDF

SEQ ID NO: 9036 - protein, 1120 aa, Streptococcus thermophilus
MSDLVLGLDIGIGSVGVGILNKVTGEIIHKNSRIFPAAQAENNLVRRTNRQGRRLARRKKHRRVRLNRLFEESGLITDFTKISINLNPYQLRVKGLTDELSNEELFIALKNMVKHRGISYLDDASDDGNSSVGDYAQIVKENSKQLETKTPGQIQLERYQTYGQLRGDFTVEKDGKKHRLINVFPTSAYRSEALRILQTQQEFNPQITDEFINRYLEILTGKRKYYHGPGNEKSRTDYGRYRTSGETLDNIFGILIGKCTFYPDEFRAAKASYTAQEFNLLNDLNNLTVPTETKKLSKEQKNQIINYVKNEKAMGPAKLFKYIAKLLSCDVADIKGYRIDKSGKAEIHTFEAYRKMKTLETLDIEQMDRETLDKLAYVLTLNTEREGIQEALEHEFADGSFSQKQVDELVQFRKANSSIFGKGWHNFSVKLMMELIPELYETSEEQMTILTRLGKQKTTSSSNKTKYIDEKLLTEEIYNPVVAKSVRQAIKIVNAAIKEYGDFDNIVIEMARETNEDDEKKAIQKIQKANKDEKDAAMLKAANQYNGKAELPHSVFHGHKQLATKIRLWHQQGERCLYTGKTISIHDLINNSNQFEVDHILPLSITFDDSLANKVLVYATANQEKGQRTPYQALDSMDDAWSFRELKAFVRESKTLSNKKKEYLLTEEDISKFDVRKKFIERNLVDTRYASRVVLNALQEHFRAHKIDTKVSVVRGQFTSQLRRHWGIEKTRDTYHHHAVDALIIAASSQLNLWKKQKNTLVSYSEDQLLDIETGELISDDEYKESVFKAPYQHFVDTLKSKEFEDSILFSYQVDSKFNRKISDATIYATRQAKVGKDKADETYVLGKIKDIYTQDGYDAFMKIYKKDKSKFLMYRHDPQTFEKVIEPILENYPNKQINEKGKEVPCNPFLKYKEEHGYIRKYSKKGNGPEIKSLKYYDSKLGNHIDITPKDSNNKVVLQSLKPWRTDVYFNKNTGKYEILGLKYSDMQFEKGTGKYSISKEQYENIKVREGVDENSEFKFTLYKNDLLLLKDSENGEQILLRFTSRNDTSKHYVELKPYNRQKFEGSEYLIKSLGTVAKGGQCIKGLGKSNISIYKVRTDVLGNQHIIKNEGDKPKLDF

SEQ ID NO: 9037 - protein, 1120 aa, Streptococcus thermophilus
MSDLVLGLDIGIGSVGVGILNKVTGEIIHKNSRIFPAAQAENNLVRRTNRQGRRLARRKKHRRVRLNRLFEESGLITDFTKISINLNPYQLRVKGLTDELSNEELFIALKNMVKHRGISYLDDASDDGNSSVGDYAQIVKENSKQLETKTPGQIQLERYQTYGQLRGDFTVEKDGKKHRLINVFPTSAYRSEALRILQTQQEFNPQITDEFINRYLEILTGKRKYYHGPGNEKSRTDYGRYRTSGETLDNIFGILIGKCTFYPDEFRAAKASYTAQEFNLLNDLNNLTVPTETKKLSKEQKNQIINYVKNEKAMGPAKLFKYIAKLLSCDVADIKGYRIDKSGKAEIHTFEAYRKMKTLETLDIEQMDRETLDKLAYVLTLNTEREGIQEALEHEFADGSFSQKQVDELVQFRKANSSIFGKGWHNFSVKLMMELIPELYETSEEQMTILTRLGKQKTTSSSNKTKYIDEKLLTEEIYNPVVAKSVRQAIKIVNAAIKEYGDFDNIVIEMARETNEDDEKKAIQKIQKANKDEKDAAMLKAANQYNGKAELPHSVFHGHKQLATKIRLWHQQGERCLYTGKTISIHDLINNSNQFEVDHILPLSITFDDSLANKVLVYATANQEKGQRTPYQALDSMDDAWSFRELKAFVRESKTLSNKKKEYLLTEEDISKFDVRKKFIERNLVDTRYASRVVLNALQEHFRAHKIDTKVSVVRGQFTSQLRRHWGIEKTRDTYHHHAVDALIIAASSQLNLWKKQKNTLVSYSEDQLLDIETGELISDDEYKESVFKAPYQHFVDTLKSKEFEDSILFSYQVDSKFNRKISDATIYATRQAKVGKDKADETYVLGKIKDIYTQDGYDAFMKIYKKDKSKFLMYRHDPQTFEKVIEPILENYPNKQINEKGKEVPCNPFLKYKEEHGYIRKYSKKGNGPEIKSLKYYDSKLGNHIDITPKDSNNKVVLQSLKPWRTDVYFNKNTGKYEILGLKYSDMQFEKGTGKYSISKEQYENIKVREGVDENSEFKFTLYKNDLLLLKDSENGEQILLRFTSRNDTSKHYVELKPYNRQKFEGSEYLIKSLGTVVKGGRCIKGLGKSNISIYKVRTDVLGNQHIIKNEGDKPKLDF

SEQ ID NO: 9038 - protein, 1057 aa, Staphylococcus sp.
MNQKFILGLDIGITSVGYGLIDYETKNIIDAGVRLFPEANVENNEGRRSKRGSRRLKRRRIHRLERVKLLLTEYDLINKEQIPTSNNPYQIRVKGLSEILSKDELAIALLHLAKRRGIHNVDVAADKEETASDSLSTKDQINKNAKFLESRYVCELQKERLENEGHVRGVENRFLTKDIVREAKKIIDTQMQYYPEIDETFKEKYISLVETRREYFEGPGQGSPFGWNGDLKKWYEMLMGHCTYFPQELRSVKYAYSADLFNALNDLNNLIIQRDNSEKLEYHEKYHIIENVFKQKKKPTLKQIAKEIGVNPEDIKGYRITKSGTPEFTSFKLFHDLKKVVKDHAILDDIDLLNQIAEILTIYQDKDSIVAELGQLEYLMSEADKQSISELTGYTGTHSLSLKCMNMIIDELWHSSMNQMEVFTYLNMRPKKYELKGYQRIPTDMIDDAILSPVVKRTFIQSINVINKVIEKYGIPEDIIIELARENNSDDRKKFINNLQKKNEATRKRINEIIGQTGNQNAKRIVEKIRLHDQQEGKCLYSLESIPLEDLLNNPNHYEVDHIIPRSVSFDNSYHNKVLVKQSENSKKSNLTPYQYFNSGKSKLSYNQFKQHILNLSKSQDRISKKKKEYLLEERDINKFEVQKEFINRNLVDTRYATRELTNYLKAYFSANNMNVKVKTINGSFTDYLRKVWKFKKERNHGYKHHAEDALIIANADFLFKENKKLKAVNSVLEKPEIETKQLDIQVDSEDNYSEMFIIPKQVQDIKDFRNFKYSHRVDKKPNRQLINDTLYSTRKKDNSTYIVQTIKDIYAKDNTTLKKQFDKSPEKFLMYQHDPRTFEKLEVIMKQYANEKNPLAKYHEETGEYLTKYSKKNNGPIVKSLKYIGNKLGSHLDVTHQFKSSTKKLVKLSIKNYRFDVYLTEKGYKFVTIAYLNVFKKDNYYYIPKDKYQELKEKKKIKDTDQFIASFYKNDLIKLNGDLYKIIGVNSDDRNIIELDYYDIKYKDYCEINNIKGEPRIKKTIGKKTESIEKFTTDVLGNLYLHSTEKAPQLIFKRGL

SEQ ID NO: 9039 - protein, 1057 aa, Staphylococcus sp.
MNQKFILGLDIGITSVGYGLIDYETKNIIDAGVRLFPEANVENNEGRRSKRGSRRLKRRRIHRLERVKLLLTEYDLINKEQIPTSNNPYQIRVKGLSEILSKDELAIALLHLAKRRGIHNVDVAADKEETASDSLSTKDQINKNAKFLESRYVCELQKERLENEGHVRGVENRFLTKDIVREAKKIIDTQMQYYPEIDETFKEKYISLVETRREYFEGPGQGSPFGWNGDLKKWYEMLMGHCTYFPQELRSVKYAYSADLFNALNDLNNLIIQRDNSEKLEYHEKYHIIENVFKQKKKPTLKQIAKEIGVNPEDIKGYRITKSGTPEFTSFKLFHDLKKVVKDHAILDDIDLLNQIAEILTIYQDKDSIVAELGQLEYLMSEADKQSISELTGYTGTHSLSLKCMNMIIDELWHSSMNQMEVFTYLNMRPKKYELKGYQRIPTDMIDDAILSPVVKRTFIQSINVINKVIEKYGIPEDIIIELARENNSDDRKKFINNLQKKNEATRKRINEIIGQTGNQNAKRIVEKIRLHDQQEGKCLYSLESIPLEDLLNNPNHYEVDHIIPRSVSFDNSYHNKVLVKQSENSKKSNLTPYQYFNSGKSKLSYNQFKQHILNLSKSQDRISKKKKEYLLEERDINKFEVQKEFINRNLVDTRYATRELTSYLKAYFSANNMDVKVKTINGSFTNHLRKVWRFDKYRNHGYKHHAEDALIIANADFLFKENKKLQNTNKILEKPTIENNTKKVTVEKEEDYNNVFETPKLVEDIKQYRDYKFSHRVDKKPNRQLINDTLYSTRMKDEHDYIVQTITDIYGKDNTNLKKQFNKNPEKFLMYQNDPKTFEKLSIIMKQYSDEKNPLAKYYEETGEYLTKYSKKNNGPIVKKIKLLGNKVGNHLDVTNKYENSTKKLVKLSIKNYRFDVYLTEKGYKFVTIAYLNVFKKDNYYYIPKDKYQELKEKKKIKDTDQFIASFYKNDLIKLNGDLYKIIGVNSDDRNIIELDYYDIKYKDYCEINNIKGEPRIKKTIGKKTESIEKFTTDVLGNLYLHSTEKAPQLIFKRGL

SEQ ID NO: 9040-10050 - skipped (1011 entries)

SEQ ID NO: 10051 - DNA, 24 bp, synthetic construct
  source 1..24: mol_type = other DNA
gttgtagctccctttctcatttcg

SEQ ID NO: 10052 - DNA, 25 bp, synthetic construct
  source 1..25: mol_type = other DNA
gttgtagctccctttttcatttcgc

SEQ ID NO: 10053 - DNA, 14 bp, synthetic construct
  source 1..14: mol_type = other DNA
gttttagtactctg

SEQ ID NO: 10054 - DNA, 14 bp, synthetic construct
  source 1..14: mol_type = other DNA
gttttagtactctg

SEQ ID NO: 10055 - DNA, 14 bp, synthetic construct
  source 1..14: mol_type = other DNA
gttttagtactctg

SEQ ID NO: 10056 - DNA, 14 bp, synthetic construct
  source 1..14: mol_type = other DNA
gttttagtactctg

SEQ ID NO: 10057 - DNA, 12 bp, synthetic construct
  source 1..12: mol_type = other DNA
gttttagagcta

SEQ ID NO: 10058 - DNA, 12 bp, synthetic construct
  source 1..12: mol_type = other DNA
gttttagagcta

SEQ ID NO: 10059 - DNA, 12 bp, synthetic construct
  source 1..12: mol_type = other DNA
gttttagagcta

SEQ ID NO: 10060 - DNA, 12 bp, synthetic construct
  source 1..12: mol_type = other DNA
gttttagagcta

SEQ ID NO: 10061 - DNA, 14 bp, synthetic construct
  source 1..14: mol_type = other DNA
gtctttgtactctg

SEQ ID NO: 10062 - DNA, 16 bp, synthetic construct
  source 1..16: mol_type = other DNA
gctatagttccttact

SEQ ID NO: 10063 - DNA, 14 bp, synthetic construct
  source 1..14: mol_type = other DNA
gtcttagtactctg

SEQ ID NO: 10064 - DNA, 14 bp, synthetic construct
  source 1..14: mol_type = other DNA
gtcttagtactctg

SEQ ID NO: 10065 - DNA, 14 bp, synthetic construct
  source 1..14: mol_type = other DNA
gtcttagtactctg

SEQ ID NO: 10066 - DNA, 14 bp, synthetic construct
  source 1..14: mol_type = other DNA
gtcttagtactctg

SEQ ID NO: 10067 - DNA, 12 bp, synthetic construct
  source 1..12: mol_type = other DNA
actggggttcag

SEQ ID NO: 10068 - DNA, 12 bp, synthetic construct
  source 1..12: mol_type = other DNA
gttttagtccct

SEQ ID NO: 10069 - DNA, 16 bp, synthetic construct
  source 1..16: mol_type = other DNA
gtcatagttcccctga

SEQ ID NO: 10070 - DNA, 12 bp, synthetic construct
  source 1..12: mol_type = other DNA
gttttagagcta

SEQ ID NO: 10071 - DNA, 24 bp, synthetic construct
  source 1..24: mol_type = other DNA
gttgtagctccctttctcatttcg

SEQ ID NO: 10072 - DNA, 12 bp, synthetic construct
  source 1..12: mol_type = other DNA
gttttagagcta

SEQ ID NO: 10073 - DNA, 12 bp, synthetic construct
  source 1..12: mol_type = other DNA
gttttagagcta

SEQ ID NO: 10074 - DNA, 17 bp, synthetic construct
  source 1..17: mol_type = other DNA
gtttaagagctatgctg

SEQ ID NO: 10075 - DNA, 17 bp, synthetic construct
  source 1..17: mol_type = other DNA
gtttaagagctatgctg

SEQ ID NO: 10076 - DNA, 17 bp, synthetic construct
  source 1..17: mol_type = other DNA
gtttaagagctatgctg

SEQ ID NO: 10077 - DNA, 12 bp, synthetic construct
  source 1..12: mol_type = other DNA
gttttagagcta

SEQ ID NO: 10078 - DNA, 12 bp, synthetic construct
  source 1..12: mol_type = other DNA
gttttagagcta

SEQ ID NO: 10079 - DNA, 12 bp, synthetic construct
  source 1..12: mol_type = other DNA
gttttagagcta

SEQ ID NO: 10080 - DNA, 12 bp, synthetic construct
  source 1..12: mol_type = other DNA
gttttagagcta

SEQ ID NO: 10081 - DNA, 12 bp, synthetic construct
  source 1..12: mol_type = other DNA
gttttagagcta

SEQ ID NO: 10082 - DNA, 17 bp, synthetic construct
  source 1..17: mol_type = other DNA
gtttaagagctatgctg

SEQ ID NO: 10083 - DNA, 17 bp, synthetic construct
  source 1..17: mol_type = other DNA
gtttaagagctatgctg

SEQ ID NO: 10084 - DNA, 14 bp, synthetic construct
  source 1..14: mol_type = other DNA
gtctttgtactctg

SEQ ID NO: 10085 - DNA, 14 bp, synthetic construct
  source 1..14: mol_type = other DNA
gtctttgtactctg

SEQ ID NO: 10086 - DNA, 14 bp, synthetic construct
  source 1..14: mol_type = other DNA
gtctttgtactctg

SEQ ID NO: 10087 - DNA, 14 bp, synthetic construct
  source 1..14: mol_type = other DNA
gtctttgtactctg

SEQ ID NO: 10088 - DNA, 14 bp, synthetic construct
  source 1..14: mol_type = other DNA
gttttagtactctg

SEQ ID NO: 10089 - DNA, 14 bp, synthetic construct
  source 1..14: mol_type = other DNA
gttttagtactctg

SEQ ID NO: 10090-10150 - skipped (61 entries)

SEQ ID NO: 10151 - DNA, 93 bp, synthetic construct
  source 1..93: mol_type = other DNA
cgaaatgagaaccgttgctacaataaggccgtctgaaaagatgtgccgcaacgctctgccccttaaagcttctgctttaaggggcatcgttta

SEQ ID NO: 10152 - DNA, 82 bp, synthetic construct
  source 1..82: mol_type = other DNA
gcgaaatgaaaaacgttgttacaataagagatgaatttctcgcaaagctctgcctcttgaaatttcggtttcaagaggcatc

SEQ ID NO: 10153 - DNA, 58 bp, synthetic construct
  source 1..58: mol_type = other DNA
cagaatctactaaaacaaggcaaaatgccgtgtttatctcgtcaacttgttggcgaga

SEQ ID NO: 10154 - DNA, 58 bp, synthetic construct; identical to SEQ ID NO: 10153
  source 1..58: mol_type = other DNA

SEQ ID NO: 10155 - DNA, 58 bp, synthetic construct; identical to SEQ ID NO: 10153
  source 1..58: mol_type = other DNA

SEQ ID NO: 10156 - DNA, 58 bp, synthetic construct; identical to SEQ ID NO: 10153
  source 1..58: mol_type = other DNA

SEQ ID NO: 10157 - DNA, 60 bp, synthetic construct
  source 1..60: mol_type = other DNA
tagcaagttaaaataaggctagtccgttatcaacttgaaaaagtggcaccgagtcggtgc

SEQ ID NO: 10158 - DNA, 60 bp, synthetic construct; identical to SEQ ID NO: 10157
  source 1..60: mol_type = other DNA

SEQ ID NO: 10159 - DNA, 60 bp, synthetic construct; identical to SEQ ID NO: 10157
  source 1..60: mol_type = other DNA

SEQ ID NO: 10160 - DNA, 60 bp, synthetic construct; identical to SEQ ID NO: 10157
  source 1..60: mol_type = other DNA

SEQ ID NO: 10161 - DNA, 66 bp, synthetic construct
  source 1..66: mol_type = other DNA
cagaagctacaaagataaggcttcatgccgaaatcaacaccctgtcattttatggcagggtgtttt

SEQ ID NO: 10162 - DNA, 127 bp, synthetic construct
  source 1..127: mol_type = other DNA
ggtaagttgctatagtaagggcaacagacccgaggcgttggggatcgcctagcccgtgtttacgggctctccccatattcaaaataatgacagacgagcaccttggagcatttatctccgaggtgct

SEQ ID NO: 10163 - DNA, 58 bp, synthetic construct
  source 1..58: mol_type = other DNA
cagaatctactaagacaaggcaaaatgccgtgtttatctcgtcaacttgttggcgaga

SEQ ID NO: 10164 - DNA, 58 bp, synthetic construct; identical to SEQ ID NO: 10163
  source 1..58: mol_type = other DNA

SEQ ID NO: 10165 - DNA, 58 bp, synthetic construct; identical to SEQ ID NO: 10163
  source 1..58: mol_type = other DNA

SEQ ID NO: 10166 - DNA, 58 bp, synthetic construct; identical to SEQ ID NO: 10163
  source 1..58: mol_type = other DNA

SEQ ID NO: 10167 - DNA, 76 bp, synthetic construct
  source 1..76: mol_type = other DNA
ctgaacctcagtaagcattggctcgtttccaatgttgattgctccgccggtgctccttatttttaagggcgccggc

SEQ ID NO: 10168 - DNA, 57 bp, synthetic construct
  source 1..57: mol_type = other DNA
agggactaaaataaagagtttgcgggactctgcggggttacaatcccctaaaaccgc

SEQ ID NO: 10169 - DNA, 98 bp, synthetic construct
  source 1..98: mol_type = other DNA
tcagggttactatgataagggctttctgcctaaggcagactgacccgcggcgttggggatcgcctgtcgcccgcttttggcgggcattccccatcctt

SEQ ID NO: 10170 - DNA, 60 bp, synthetic construct; identical to SEQ ID NO: 10157
  source 1..60: mol_type = other DNA

SEQ ID NO: 10171 - DNA, 93 bp, synthetic construct; identical to SEQ ID NO: 10151
  source 1..93: mol_type = other DNA

SEQ ID NO: 10172 - DNA, 60 bp, synthetic construct; identical to SEQ ID NO: 10157
  source 1..60: mol_type = other DNA

SEQ ID NO: 10173 - DNA, 60 bp, synthetic construct; identical to SEQ ID NO: 10157
  source 1..60: mol_type = other DNA

SEQ ID NO: 10174 - DNA, 65 bp, synthetic construct
  source 1..65: mol_type = other DNA
cagcatagcaagtttaaataaggctagtccgttatcaacttgaaaaagtggcaccgagtcggtgc

SEQ ID NO: 10175 - DNA, 65 bp, synthetic construct; identical to SEQ ID NO: 10174
  source 1..65: mol_type = other DNA

SEQ ID NO: 10176 - DNA, 65 bp, synthetic construct; identical to SEQ ID NO: 10174
  source 1..65: mol_type = other DNA

SEQ ID NO: 10177 - DNA, 60 bp, synthetic construct; identical to SEQ ID NO: 10157
  source 1..60: mol_type = other DNA

SEQ ID NO: 10178 - DNA, 60 bp, synthetic construct; identical to SEQ ID NO: 10157
  source 1..60: mol_type = other DNA

SEQ ID NO: 10179 - DNA, 60 bp, synthetic construct; identical to SEQ ID NO: 10157
  source 1..60: mol_type = other DNA

SEQ ID NO: 10180 - DNA, 60 bp, synthetic construct; identical to SEQ ID NO: 10157
  source 1..60: mol_type = other DNA

SEQ ID NO: 10181 - DNA, 60 bp, synthetic construct; identical to SEQ ID NO: 10157
  source 1..60: mol_type = other DNA

SEQ ID NO: 10182 - DNA, 65 bp, synthetic construct; identical to SEQ ID NO: 10174
  source 1..65: mol_type = other DNA

SEQ ID NO: 10183 - DNA, 65 bp, synthetic construct; identical to SEQ ID NO: 10174
  source 1..65: mol_type = other DNA

SEQ ID NO: 10184 - DNA, 66 bp, synthetic construct; identical to SEQ ID NO: 10161
  source 1..66: mol_type = other DNA

SEQ ID NO: 10185 - DNA, 66 bp, synthetic construct; identical to SEQ ID NO: 10161
  source 1..66: mol_type = other DNA

SEQ ID NO: 10186 - DNA, 66 bp, synthetic construct; identical to SEQ ID NO: 10161
  source 1..66: mol_type = other DNA

SEQ ID NO: 10187 - DNA, 66 bp, synthetic construct; identical to SEQ ID NO: 10161
  source 1..66: mol_type = other DNA

SEQ ID NO: 10188 - DNA, 62 bp, synthetic construct
  source 1..62: mol_type = other DNA
cagaatctactgaaacaagacaatatgtcgtgtttatcccatcaatttattggtgggatttt

SEQ ID NO: 10189 - DNA, 62 bp, synthetic construct; identical to SEQ ID NO: 10188
  source 1..62: mol_type = other DNA

SEQ ID NO: 10190-10192 - skipped (3 entries)

SEQ ID NO: 10193 - DNA, 68 bp, synthetic construct
  source 1..68: mol_type = other DNA
tagcaagttaaaataaggctagtccgttatcaacttggacttcggtccaagtggcaccgagtcggtgc

SEQ ID NO: 10194 - DNA, 68 bp, synthetic construct
  source 1..68: mol_type = other DNA
tagcaagttaaaataaggctagtccgttatcaacttggagcttgctccaagtggcaccgagtcggtgc

SEQ ID NO: 10195 - DNA, 76 bp, synthetic construct
  source 1..76: mol_type = other DNA
gttttagagctagaaatagcaagttaaaataaggctagtccgttatcgacttgaaaaagtcgcaccgagtcggtgc

SEQ ID NO: 10196-11000 - skipped (805 entries)

SEQ ID NO: 11001 - protein, 1367 aa, unidentified
DKKYSIGLDIGTNSVGWAVITDEYKVPSKKFKVLGNTDRHSIKKNLIGALLFDSGETAEATRLKRTARRRYTRRKNRICYLQEIFSNEMAKVDDSFFHRLEESFLVEEDKKHERHPIFGNIVDEVAYHEKYPTIYHLRKKLVDSTDKADLRLIYLALAHMIKFRGHFLIEGDLNPDNSDVDKLFIQLVQTYNQLFEENPINASGVDAKAILSARLSKSRRLENLIAQLPGEKKNGLFGNLIALSLGLTPNFKSNFDLAEDAKLQLSKDTYDDDLDNLLAQIGDQYADLFLAAKNLSDAILLSDILRVNTEITKAPLSASMIKRYDEHHQDLTLLKALVRQQLPEKYKEIFFDQSKNGYAGYIDGGASQEEFYKFIKPILEKMDGTEELLVKLNREDLLRKQRTFDNGSIPHQIHLGELHAILRRQEDFYPFLKDNREKIEKILTFRIPYYVGPLARGNSRFAWMTRKSEETITPWNFEEVVDKGASAQSFIERMTNFDKNLPNEKVLPKHSLLYEYFTVYNELTKVKYVTEGMRKPAFLSGEQKKAIVDLLFKTNRKVTVKQLKEDYFKKIECFDSVEISGVEDRFNASLGTYHDLLKIIKDKDFLDNEENEDILEDIVLTLTLFEDREMIEERLKTYAHLFDDKVMKQLKRRRYTGWGRLSRKLINGIRDKQSGKTILDFLKSDGFANRNFMQLIHDDSLTFKEDIQKAQVSGQGDSLHEHIANLAGSPAIKKGILQTVKVVDELVKVMGRHKPENIVIEMARENQTTQKGQKNSRERMKRIEEGIKELGSQILKEHPVENTQLQNEKLYLYYLQNGRDMYVDQELDINRLSDYDVDAIVPQSFLKDDSIDNKVLTRSDKNRGKSDNVPSEEVVKKMKNYWRQLLNAKLITQRKFDNLTKAERGGLSELDKAGFIKRQLVETRQITKHVAQILDSRMNTKYDENDKLIREVKVITLKSKLVSDFRKDFQFYKVREINNYHHAHDAYLNAVVGTALIKKYPKLESEFVYGDYKVYDVRKMIAKSEQEIGKATAKYFFYSNIMNFFKTEITLANGEIRKRPLIETNGETGEIVWDKGRDFATVRKVLSMPQVNIVKKTEVQTGGFSKESILPKRNSDKLIARKKDWDPKKYGGFDSPTVAYSVLVVAKVEKGKSKKLKSVKELLGITIMERSSFEKNPIDFLEAKGYKEVKKDLIIKLPKYSLFELENGRKRMLASAGELQKGNELALPSKYVNFLYLASHYEKLKGSPEDNEQKQLFVEQHKHYLDEIIEQISEFSKRVILADANLDKVLSAYNKHRDKPIREQAENIIHLFTLTNLGAPAAFKYFDTTIDRKRYTSTKEVLDATLIHQSITGLYETRIDLSQLGGD

SEQ ID NO: 11002 - protein, 33 aa, unidentified; identical to SEQ ID NO: 5006

SEQ ID NO: 11003 - skipped

SEQ ID NO: 11004 - DNA, 62 bp, synthetic construct
  source 1..62: mol_type = other DNA
cactcctccccatcctctccctctgtccctctgtccctctgaccctgcactgtcccagcacc

SEQ ID NO: 11005 - DNA, 122 bp, synthetic construct
  source 1..122: mol_type = other DNA
caggacacagccttggatcaggacagagacttgggggccatcctgcccctccaacccgacatgtgtacctcagctttttccctcacttgcatcaataaagcttctgtgtttggaacagctaa

SEQ ID NO: 11006 - RNA, 47 nt, synthetic construct
  source 1..47: mol_type = other RNA
gggaaataagagagaaaagaagagtaagaagaaatataagagccacc

SEQ ID NO: 11007 - RNA, 110 nt, synthetic construct
  source 1..110: mol_type = other RNA
tgataataggctggagcctcggtggccatgcttcttgccccttgggcctccccccagcccctcctccccttcctgcacccgtacccccgtggtctttgaataaagtctga

SEQ ID NO: 11008 - RNA, 47 nt, synthetic construct; identical to SEQ ID NO: 11006
  source 1..47: mol_type = other RNA

SEQ ID NO: 11009 - RNA, 110 nt, synthetic construct; identical to SEQ ID NO: 11007
  source 1..110: mol_type = other RNA

SEQ ID NO: 11010 - skipped

SEQ ID NO: 11011 - DNA, 20 bp, synthetic construct
  source 1..20: mol_type = other DNA
gccgaagcactgcacgccgt

SEQ ID NO: 11012 - DNA, 76 bp, synthetic construct
  source 1..76: mol_type = other DNA
gttttagagctagaaatagcaagttaaaataaggctagtccgttatcaacttgaaaaagtggcaccgagtcggtgc

SEQ ID NO: 11013 - DNA, 13 bp, synthetic construct
  source 1..13: mol_type = other DNA
accctgacgtacg

SEQ ID NO: 11014 - DNA, 13 bp, synthetic construct
  source 1..13: mol_type = other DNA
gcgtgcagtgctt

SEQ ID NO: 11015 - DNA, 20 bp, synthetic construct
  source 1..20: mol_type = other DNA
agaagtcgtgctgcttcatg

SEQ ID NO: 11016 - DNA, 76 bp, synthetic construct; identical to SEQ ID NO: 11012
  source 1..76: mol_type = other DNA

SEQ ID NO: 11017 - DNA, 47 bp, synthetic construct
  source 1..47: mol_type = other DNA
accctgacctacggcgtgcagtgcttcggccgctaccccgatcacat

SEQ ID NO: 11018 - DNA, 13 bp, synthetic construct
  source 1..13: mol_type = other DNA
gaagcagcacgac

SEQ ID NO: 11019-11094 - skipped (76 entries)

SEQ ID NO: 11095 - protein, 9 aa, synthetic construct
PAAKRVKLD

SEQ ID NO: 11096 - protein, 1367 aa, synthetic construct
DKKYSIGLDIGTNSVGWAVITDEYKVPSKKFKVLGNTDRHSIKKNLIGALLFDSGETAEATRLKRTARRRYTRRKNRICYLQEIFSNEMAKVDDSFFHRLEESFLVEEDKKHERHPIFGNIVDEVAYHEKYPTIYHLRKKLVDSTDKADLRLIYLALAHMIKFRGHFLIEGDLNPDNSDVDKLFIQLVQTYNQLFEENPINASGVDAKAILSARLSKSRRLENLIAQLPGEKKNGLFGNLIALSLGLTPNFKSNFDLAEDAKLQLSKDTYDDDLDNLLAQIGDQYADLFLAAKNLSDAILLSDILRVNTEITKAPLSASMIKRYDEHHQDLTLLKALVRQQLPEKYKEIFFDQSKNGYAGYIDGGASQEEFYKFIKPILEKMDGTEELLVKLNREDLLRKQRTFDNGSIPHQIHLGELHAILRRQEDFYPFLKDNREKIEKILTFRIPYYVGPLARGNSRFAWMTRKSEETITPWNFEEVVDKGASAQSFIERMTNFDKNLPNEKVLPKHSLLYEYFTVYNELTKVKYVTEGMRKPAFLSGEQKKAIVDLLFKTNRKVTVKQLKEDYFKKIECFDSVEISGVEDRFNASLGTYHDLLKIIKDKDFLDNEENEDILEDIVLTLTLFEDREMIEERLKTYAHLFDDKVMKQLKRRRYTGWGRLSRKLINGIRDKQSGKTILDFLKSDGFANRNFMQLIHDDSLTFKEDIQKAQVSGQGDSLHEHIANLAGSPAIKKGILQTVKVVDELVKVMGRHKPENIVIEMARENQTTQKGQKNSRERMKRIEEGIKELGSQILKEHPVENTQLQNEKLYLYYLQNGRDMYVDQELDINRLSDYDVDHIVPQSFLKDDSIDNKVLTRSDKARGKSDNVPSEEVVKKMKNYWRQLLNAKLITQRKFDNLTKAERGGLSELDKAGFIKRQLVETRQITKHVAQILDSRMNTKYDENDKLIREVKVITLKSKLVSDFRKDFQFYKVREINNYHHAHDAYLNAVVGTALIKKYPKLESEFVYGDYKVYDVRKMIAKSEQEIGKATAKYFFYSNIMNFFKTEITLANGEIRKRPLIETNGETGEIVWDKGRDFATVRKVLSMPQVNIVKKTEVQTGGFSKESILPKRNSDKLIARKKDWDPKKYGGFDSPTVAYSVLVVAKVEKGKSKKLKSVKELLGITIMERSSFEKNPIDFLEAKGYKEVKKDLIIKLPKYSLFELENGRKRMLASAGELQKGNELALPSKYVNFLYLASHYEKLKGSPEDNEQKQLFVEQHKHYLDEIIEQISEFSKRVILADANLDKVLSAYNKHRDKPIREQAENIIHLFTLTNLGAPAAFKYFDTTIDRKRYTSTKEVLDATLIHQSITGLYETRIDLSQLGGD

SEQ ID NO: 11097 - protein, 10 aa, synthetic construct
KRTADGSEFE

SEQ ID NO: 11098 - protein, 19 aa, synthetic construct
KRTADGSEFESPKKKAKVE

SEQ ID NO: 11099 - protein, 29 aa, synthetic construct
KRTADGSEFEKRTADGSEFESPKKKAKVE

SEQ ID NO: 11100-12000 - skipped (901 entries)

SEQ ID NO: 12001 - protein, 8 aa, synthetic construct
EAAAKGSS

SEQ ID NO: 12002 - protein, 20 aa, synthetic construct
EAAAKEAAAKEAAAKEAAAK

SEQ ID NO: 12003 - protein, 8 aa, synthetic construct
PAPEAAAK

SEQ ID NO: 12004 - protein, 11 aa, synthetic construct
EAAAKPAPGGG

SEQ ID NO: 12005 - protein, 18 aa, synthetic construct
GSSGSSGSSGSSGSSGSS

SEQ ID NO: 12006 - protein, 11 aa, synthetic construct
PAPGGGEAAAK

SEQ ID NO: 12007 - protein, 46 aa, synthetic construct; identical to SEQ ID NO: 5217

SEQ ID NO: 12008 - protein, 8 aa, synthetic construct
GSSEAAAK

SEQ ID NO: 12009 - protein, 11 aa, synthetic construct
EAAAKPAPGGS

SEQ ID NO: 12010 - protein, 18 aa, synthetic construct
GGSGGSGGSGGSGGSGGS

SEQ ID NO: 12011 - protein, 46 aa, synthetic construct; identical to SEQ ID NO: 5217

SEQ ID NO: 12012 - protein, 46 aa, synthetic construct; identical to SEQ ID NO: 5217

SEQ ID NO: 12013 - protein, 15 aa, synthetic construct
EAAAKEAAAKEAAAK

SEQ ID NO: 12014 - protein, 11 aa, synthetic construct
PAPEAAAKGSS

SEQ ID NO: 12015 - protein, 46 aa, synthetic construct; identical to SEQ ID NO: 5217

SEQ ID NO: 12016 - protein, 15 aa, synthetic construct
EAAAKEAAAKEAAAK

SEQ ID NO: 12017 - protein, 46 aa, synthetic construct; identical to SEQ ID NO: 5217

SEQ ID NO: 12018 - protein, 11 aa, synthetic construct
PAPAPAPAPAP

SEQ ID NO: 12019 - protein, 11 aa, synthetic construct
PAPAPAPAPAP

SEQ ID NO: 12020 - protein, 11 aa, synthetic construct
EAAAKGGSPAP

SEQ ID NO: 12021 - skipped

SEQ ID NO: 12022 - protein, 9 aa, synthetic construct
PAPGGGGSS

SEQ ID NO: 12023 - protein, 16 aa, synthetic construct
SGSETPGTSESATPES

SEQ ID NO: 12024 - protein, 11 aa, synthetic construct
PAPEAAAKGSS

SEQ ID NO: 12025 - protein, 11 aa, synthetic construct
EAAAKGGSGGG

SEQ ID NO: 12026 - protein, 10 aa, synthetic construct
GGGGSGGGGS

SEQ ID NO: 12027 - protein, 9 aa, synthetic construct
GGGPAPGSS

SEQ ID NO: 12028 - protein, 18 aa, synthetic construct
GGSGGSGGSGGSGGSGGS

SEQ ID NO: 12029 - protein, 30 aa, synthetic construct; identical to SEQ ID NO: 5112

SEQ ID NO: 12030 - protein, 6 aa, synthetic construct
GSSPAP

SEQ ID NO: 12031 - protein, 11 aa, synthetic construct
EAAAKGSSPAP

SEQ ID NO: 12032 - protein, 11 aa, synthetic construct
GSSGGGEAAAK

SEQ ID NO: 12033 - protein, 18 aa, synthetic construct
GGSGGSGGSGGSGGSGGS

SEQ ID NO: 12034 - protein, 9 aa, synthetic construct
PAPAPAPAP

SEQ ID NO: 12035 - protein, 20 aa, synthetic construct
EAAAKEAAAKEAAAKEAAAK

SEQ ID NO: 12036 - protein, 11 aa, synthetic construct
EAAAKGGSPAP

SEQ ID NO: 12037 - protein, 11 aa, synthetic construct
PAPGGSEAAAK

SEQ ID NO: 12038 - protein, 30 aa, synthetic construct; identical to SEQ ID NO: 5112

SEQ ID NO: 12039 - protein, 15 aa, synthetic construct
EAAAKGGGGSEAAAK

SEQ ID NO: 12040 - protein, 46 aa, synthetic construct; identical to SEQ ID NO: 5217

SEQ ID NO: 12041 - skipped

SEQ ID NO: 12042 - protein, 12 aa, synthetic construct
GSSGSSGSSGSS

SEQ ID NO: 12043 - protein, 11 aa, synthetic construct
GSSPAPEAAAK

SEQ ID NO: 12044 - protein, 11 aa, synthetic construct
GGSPAPEAAAK

SEQ ID NO: 12045 - protein, 11 aa, synthetic construct
GGGEAAAKGGS

SEQ ID NO: 12046 - protein, 25 aa, synthetic construct
EAAAKEAAAKEAAAKEAAAKEAAAK

SEQ ID NO: 12047 - protein, 8 aa, synthetic construct
GGGGGGGG

SEQ ID NO: 12048 - protein, 6 aa, synthetic construct
GGGPAP

SEQ ID NO: 12049 - protein, 13 aa, synthetic construct
PAPAPAPAPAPAP

SEQ ID NO: 12050 - protein, 18 aa, synthetic construct
GGSGGSGGSGGSGGSGGS

SEQ ID NO: 12051 - skipped

SEQ ID NO: 12052 - protein, 18 aa, synthetic construct
GGSGGSGGSGGSGGSGGS

SEQ ID NO: 12053 - protein, 13 aa, synthetic construct
PAPAPAPAPAPAP

SEQ ID NO: 12054 - protein, 11 aa, synthetic construct
EAAAKPAPGSS

SEQ ID NO: 12055 - protein, 20 aa, synthetic construct
EAAAKEAAAKEAAAKEAAAK

SEQ ID NO: 12056 - protein, 8 aa, synthetic construct
EAAAKGGS

SEQ ID NO: 12057 - protein, 15 aa, synthetic construct
GGGGSEAAAKGGGGS

SEQ ID NO: 12058 - protein, 11 aa, synthetic construct
EAAAKPAPGSS

SEQ ID NO: 12059 - protein, 20 aa, synthetic construct
GGGGSGGGGSGGGGSGGGGS

SEQ ID NO: 12060 - protein, 11 aa, synthetic construct
EAAAKGGGGGS

SEQ ID NO: 12061 - protein, 6 aa, synthetic construct
GGSPAP

SEQ ID NO: 12062 - protein, 11 aa, synthetic construct
EAAAKGGGPAP

SEQ ID NO: 12063 - protein, 25 aa, synthetic construct
EAAAKEAAAKEAAAKEAAAKEAAAK

SEQ ID NO: 12064 - skipped

SEQ ID NO: 12065 - protein, 5 aa, synthetic construct
EAAAK

SEQ ID NO: 12066 - protein, 9 aa, synthetic construct
GGSGSSPAP

SEQ ID NO: 12067 - protein, 18 aa, synthetic construct
GSSGSSGSSGSSGSSGSS

SEQ ID NO: 12068 - protein, 11 aa, synthetic construct
GSSEAAAKGGG

SEQ ID NO: 12069 - protein, 11 aa, synthetic construct
GGGEAAAKGGS

SEQ ID NO: 12070 - protein, 15 aa, synthetic construct
EAAAKGGGGSEAAAK

SEQ ID NO: 12071 - protein, 15 aa, synthetic construct
GGGGSGGGGSGGGGS

SEQ ID NO: 12072 - protein, 20 aa, synthetic construct
GGGGSGGGGSGGGGSGGGGS

SEQ ID NO: 12073 - protein, 16 aa, synthetic construct
SGSETPGTSESATPES

SEQ ID NO: 12074 - protein, 11 aa, synthetic construct
GGGEAAAKPAP

SEQ ID NO: 12075 - protein, 11 aa, synthetic construct
EAAAKGSSGGG

SEQ ID NO: 12076 - protein, 25 aa, synthetic construct
EAAAKEAAAKEAAAKEAAAKEAAAK

SEQ ID NO: 12077 - protein, 12 aa, synthetic construct
GGSGGSGGSGGS

SEQ ID NO: 12078 - protein, 11 aa, synthetic construct
GGSEAAAKPAP

SEQ ID NO: 12079 - protein, 11 aa, synthetic construct
EAAAKGSSGGG

SEQ ID NO: 12080 - protein, 5 aa, synthetic construct
GGGGS

SEQ ID NO: 12081 - protein, 11 aa, synthetic construct
GGGEAAAKGSS

SEQ ID NO: 12082 - protein, 13 aa, synthetic construct
PAPAPAPAPAPAP

SEQ ID NO: 12083 - protein, 20 aa, synthetic construct
GGGGSGGGGSGGGGSGGGGS

SEQ ID NO: 12084 - protein, 11 aa, synthetic construct
GGGEAAAKGSS

SEQ ID NO: 12085 - protein, 9 aa, synthetic construct
PAPGGSGSS

SEQ ID NO: 12086 - protein, 12 aa, synthetic construct
GSAGSAAGSGEF

SEQ ID NO: 12087 - protein, 11 aa, synthetic construct
PAPGGSEAAAK

SEQ ID NO: 12088 - protein, 6 aa, synthetic construct
GGSGSS

SEQ ID NO: 12089 - protein, 9 aa, synthetic construct
PAPGGGGSS

SEQ ID NO: 12090 - protein, 9 aa, synthetic construct
GSSGSSGSS

SEQ ID NO: 12091 - protein, 46 aa, synthetic construct; identical to SEQ ID NO: 5217

SEQ ID NO: 12092 - protein, 5 aa, synthetic construct
EAAAK

SEQ ID NO: 12093 - protein, 12 aa, synthetic construct
GSSGSSGSSGSS

SEQ ID NO: 12094 - protein, 9 aa, synthetic construct
PAPGGGGSS

SEQ ID NO: 12095 - protein, 11 aa, synthetic construct
GGGEAAAKGGS

SEQ ID NO: 12096 - protein, 11 aa, synthetic construct
PAPGGGEAAAK

SEQ ID NO: 12097 - protein, 9 aa, synthetic construct
GGGGGSPAP

SEQ ID NO: 12098 - protein, 8 aa, synthetic construct
EAAAKGGS

SEQ ID NO: 12099 - protein, 11 aa, synthetic construct
EAAAKGSSPAP

SEQ ID NO: 12100 - protein, 8 aa, synthetic construct
PAPEAAAK

SEQ ID NO: 12101 - protein, 12 aa, synthetic construct
GGSGGSGGSGGS

SEQ ID NO: 12102 - protein, 9 aa, synthetic construct
GGGPAPGGS

SEQ ID NO: 12103 - protein, 12 aa, synthetic construct
GSSGSSGSSGSS

SEQ ID NO: 12104 - protein, 11 aa, synthetic construct
EAAAKPAPGGS

SEQ ID NO: 12105 - protein, 6 aa, synthetic construct
GSSGSS

SEQ ID NO: 12106 - protein, 20 aa, synthetic construct
EAAAKEAAAKEAAAKEAAAK

SEQ ID NO: 12107 - protein, 20 aa, synthetic construct
EAAAKEAAAKEAAAKEAAAK

SEQ ID NO: 12108 - skipped

SEQ ID NO: 12109 - protein, 10 aa, synthetic construct
EAAAKEAAAK

SEQ ID NO: 12110 - protein, 11 aa, synthetic construct
PAPEAAAKGGG

SEQ ID NO: 12111 - protein, 11 aa, synthetic construct
GGSGSSEAAAK

SEQ ID NO: 12112 - protein, 25 aa, synthetic construct
EAAAKEAAAKEAAAKEAAAKEAAAK

SEQ ID NO: 12113 - protein, 11 aa, synthetic construct
GSSEAAAKPAP

SEQ ID NO: 12114 - protein, 25 aa, synthetic construct
EAAAKEAAAKEAAAKEAAAKEAAAK

SEQ ID NO: 12115 - protein, 8 aa, synthetic construct
EAAAKGGG

SEQ ID NO: 12116 - protein, 9 aa, synthetic construct
GSSPAPGGG

SEQ ID NO: 12117 - protein, 9 aa, synthetic construct
GGGPAPGSS

SEQ ID NO: 12118 - protein, 6 aa, synthetic construct
GGGGGS

SEQ ID NO: 12119 - protein, 30 aa, synthetic construct; identical to SEQ ID NO: 5130

SEQ ID NO: 12120 - protein, 25 aa, synthetic construct
GGGGSGGGGSGGGGSGGGGSGGGGS

SEQ ID NO: 12121 - protein, 15 aa, synthetic construct
EAAAKEAAAKEAAAK

SEQ ID NO: 12122 - protein, 9 aa, synthetic construct
PAPAPAPAP

SEQ ID NO: 12123 - protein, 15 aa, synthetic construct
GSSGSSGSSGSSGSS

SEQ ID NO: 12124 - protein, 11 aa, synthetic construct
GGGGSSEAAAK

SEQ ID NO: 12125 - protein, 12 aa, synthetic construct
GGSGGSGGSGGS

SEQ ID NO: 12126 - protein, 11 aa, synthetic construct
PAPEAAAKGGS

SEQ ID NO: 12127 - protein, 30 aa, synthetic construct; identical to SEQ ID NO: 5130

SEQ ID NO: 12128 - protein, 15 aa, synthetic construct
EAAAKGGGGSEAAAK

SEQ ID NO: 12129 - protein, 15 aa, synthetic construct
EAAAKGGGGSEAAAK

SEQ ID NO: 12130 - protein, 11 aa, synthetic construct
EAAAKGGGPAP

SEQ ID NO: 12131 - protein, 25 aa, synthetic construct
EAAAKEAAAKEAAAKEAAAKEAAAK

SEQ ID NO: 12132 - protein, 46 aa, synthetic construct; identical to SEQ ID NO: 5217

SEQ ID NO: 12133 - protein, 11 aa, synthetic construct
GGSEAAAKGGG

SEQ ID NO: 12134 - protein, 30 aa, synthetic construct; identical to SEQ ID NO: 5112

SEQ ID NO: 12135 - protein, 9 aa, synthetic construct
GGGPAPGGS

SEQ ID NO: 12136 - protein, 13 aa, synthetic construct
PAPAPAPAPAPAP

SEQ ID NO: 12137 - protein, 9 aa, synthetic construct
GGSGSSGGG

SEQ ID NO: 12138 - protein, 9 aa, synthetic construct
GGSGSSGGG

SEQ ID NO: 12139 - protein, 11 aa, synthetic construct
GGGEAAAKGGS

SEQ ID NO: 12140 - protein, 5 aa, synthetic construct
EAAAK

SEQ ID NO: 12141 - protein, 9 aa, synthetic construct
GGSPAPGSS

SEQ ID NO: 12142 - protein, 11 aa, synthetic construct
GGGGSSEAAAK

SEQ ID NO: 12143 - protein, 11 aa, synthetic construct
PAPAPAPAPAP

SEQ ID NO: 12144 - protein, 20 aa, synthetic construct
EAAAKEAAAKEAAAKEAAAK

SEQ ID NO: 12145 - protein, 9 aa, synthetic construct
GGGGGSGSS

SEQ ID NO: 12146 - protein, 11 aa, synthetic construct
EAAAKGSSPAP

SEQ ID NO: 12147 - protein, 13 aa, synthetic construct
PAPAPAPAPAPAP

SEQ ID NO: 12148 - protein, 9 aa, synthetic construct
GSSGGGGGS

SEQ ID NO: 12149 - protein, 9 aa, synthetic construct
PAPGSSGGG

SEQ ID NO: 12150 - protein, 9 aa, synthetic construct
GGSGGGPAP

SEQ ID NO: 12151 - protein, 7 aa, synthetic construct
GGGGGGG

SEQ ID NO: 12152 - protein, 18 aa, synthetic construct
GSSGSSGSSGSSGSSGSS

SEQ ID NO: 12153 - protein, 9 aa, synthetic construct
GGGPAPGGS

SEQ ID NO: 12154 - protein, 11 aa, synthetic construct
EAAAKGGSGGG

SEQ ID NO: 12155 - protein, 11 aa, synthetic construct
EAAAKGGGGSS

SEQ ID NO: 12156 - protein, 18 aa, synthetic construct
GSSGSSGSSGSSGSSGSS

SEQ ID NO: 12157 - protein, 20 aa, synthetic construct
GGGGSGGGGSGGGGSGGGGS

SEQ ID NO: 12158 - protein, 11 aa, synthetic construct
PAPAPAPAPAP

SEQ ID NO: 12159 - protein, 11 aa, synthetic construct
GGGEAAAKGGS

SEQ ID NO: 12160 - protein, 46 aa, synthetic construct; identical to SEQ ID NO: 5217

SEQ ID NO: 12161 - protein, 12 aa, synthetic construct
GSAGSAAGSGEF

SEQ ID NO: 12162 - protein, 15 aa, synthetic construct
GSSGSSGSSGSSGSS

SEQ ID NO: 12163 - protein, 11 aa, synthetic construct
EAAAKGGSGSS

SEQ ID NO: 12164 - protein, 6 aa, synthetic construct
PAPGGG

SEQ ID NO: 12165 - protein, 9 aa, synthetic construct
GGGPAPGSS

SEQ ID NO: 12166 - protein, 11 aa, synthetic construct
PAPEAAAKGGS

SEQ ID NO: 12167 - protein, 11 aa, synthetic construct
PAPGGGEAAAK

SEQ ID NO: 12168 - protein, 11 aa, synthetic construct
GGGGSSEAAAK

SEQ ID NO: 12169 - protein, 5 aa, synthetic construct
EAAAK

SEQ ID NO: 12170 - protein, 30 aa, synthetic construct; identical to SEQ ID NO: 5112

SEQ ID NO: 12171 - protein, 11 aa, synthetic construct
GGSGGGEAAAK

SEQ ID NO: 12172 - protein, 46 aa, synthetic construct; identical to SEQ ID NO: 5217

SEQ ID NO: 12173 - protein, 9 aa, synthetic construct
GSSPAPGGS

SEQ ID NO: 12174 - protein, 9 aa, synthetic construct
GGSGGGPAP

SEQ ID NO: 12175 - protein, 5 aa, synthetic construct
EAAAK

SEQ ID NO: 12176 - skipped

SEQ ID NO: 12177 - protein, 9 aa, synthetic construct
GGSGGSGGS

SEQ ID NO: 12178 - protein, 20 aa, synthetic construct
EAAAKEAAAKEAAAKEAAAK

SEQ ID NO: 12179 - protein, 11 aa, synthetic construct
PAPEAAAKGGG

SEQ ID NO: 12180 - protein, 11 aa, synthetic construct
GGGGGSEAAAK

SEQ ID NO: 12181 - protein, 9 aa, synthetic construct
GGSGSSGGG

SEQ ID NO: 12182 - protein, 7 aa, synthetic construct
GGGGGGG

SEQ ID NO: 12183 - protein, 11 aa, synthetic construct
GSSEAAAKPAP

SEQ ID NO: 12184 - protein, 11 aa, synthetic construct
GGGGGSEAAAK

SEQ ID NO: 12185 - protein, 25 aa, synthetic construct
GGGGSGGGGSGGGGSGGGGSGGGGS

SEQ ID NO: 12186 - protein, 11 aa, synthetic construct
GGGEAAAKGGS

SEQ ID NO: 12187 - protein, 9 aa, synthetic construct
GGSPAPGGG

SEQ ID NO: 12188 - protein, 12 aa, synthetic construct
GSAGSAAGSGEF

SEQ ID NO: 12189 - protein, 5 aa, synthetic construct
EAAAK

SEQ ID NO: 12190 - protein, 11 aa, synthetic construct
EAAAKPAPGSS

SEQ ID NO: 12191 - protein, 30 aa, synthetic construct; identical to SEQ ID NO: 5130

SEQ ID NO: 12192 - protein, 11 aa, synthetic construct
GGSEAAAKPAP

SEQ ID NO: 12193 - protein, 13 aa, synthetic construct
PAPAPAPAPAPAP

SEQ ID NO: 12194 - protein, 9 aa, synthetic construct
GGSPAPGGG

SEQ ID NO: 12195 - protein, 11 aa, synthetic construct
GGSEAAAKGGG

SEQ ID NO: 12196 - protein, 12 aa, synthetic construct
GGSGGSGGSGGS

SEQ ID NO: 12197 - protein, 30 aa, synthetic construct; identical to SEQ ID NO: 5130

SEQ ID NO: 12198 - skipped

SEQ ID NO: 12199 - protein, 46 aa, synthetic construct; identical to SEQ ID NO: 5217

SEQ ID NO: 12200 - protein, 12 aa, synthetic construct
GGSGGSGGSGGS

SEQ ID NO: 12201 - protein, 8 aa, synthetic construct
GGGEAAAK

SEQ ID NO: 12202 - protein, 18 aa, synthetic construct
GSSGSSGSSGSSGSSGSS

SEQ ID NO: 12203 - protein, 9 aa, synthetic construct
GSSGGGPAP

SEQ ID NO: 12204 - protein, 11 aa, synthetic construct
GSSEAAAKPAP

SEQ ID NO: 12205 - protein, 10 aa, synthetic construct
EAAAKEAAAK

SEQ ID NO: 12206 - protein, 30 aa, synthetic construct; identical to SEQ ID NO: 5112

SEQ ID NO: 12207 - protein, 6 aa, synthetic construct
GGGGGG

SEQ ID NO: 12208 - protein, 9 aa, synthetic construct
GGSGSSGGG

SEQ ID NO: 12209 - protein, 11 aa, synthetic construct
GSSGGGEAAAK

SEQ ID NO: 12210 - protein, 11 aa, synthetic construct
PAPAPAPAPAP

SEQ ID NO: 12211 - protein, 30 aa, synthetic construct; identical to SEQ ID NO: 5130

SEQ ID NO: 12212 - protein, 11 aa, synthetic construct
EAAAKGGSGGG

SEQ ID NO: 12213 - protein, 9 aa, synthetic construct
GGGGSSPAP

SEQ ID NO: 12214 - protein, 11 aa, synthetic construct
GGGEAAAKPAP

SEQ ID NO: 12215 - protein, 9 aa, synthetic construct
GGSGGGPAP

SEQ ID NO: 12216 - protein, 9 aa, synthetic construct
PAPGSSGGS

SEQ ID NO: 12217 - protein, 9 aa, synthetic construct
GGSGGGPAP

SEQ ID NO: 12218 - protein, 11 aa, synthetic construct
EAAAKGGSPAP

SEQ ID NO: 12219 - protein, 11 aa, synthetic construct
EAAAKGGSGGG

SEQ ID NO: 12220 - protein, 9 aa, synthetic construct
PAPGSSGGG

SEQ ID NO: 12221 - protein, 11 aa, synthetic construct
GSSEAAAKGGS

SEQ ID NO: 12222 - protein, 11 aa, synthetic construct
PAPGSSEAAAK

SEQ ID NO: 12223 - protein, 11 aa, synthetic construct
EAAAKGSSPAP

SEQ ID NO: 12224 - protein, 25 aa, synthetic construct
EAAAKEAAAKEAAAKEAAAKEAAAK

SEQ ID NO: 12225 - protein, 11 aa, synthetic construct
PAPGSSEAAAK

SEQ ID NO: 12226 - protein, 11 aa, synthetic construct
EAAAKGSSGGG

SEQ ID NO: 12227 - protein, 11 aa, synthetic construct
EAAAKGGGGGS

SEQ ID NO: 12228 - protein, 15 aa, synthetic construct
EAAAKEAAAKEAAAK

SEQ ID NO: 12229 - protein, 13 aa, synthetic construct
PAPAPAPAPAPAP

SEQ ID NO: 12230 - protein, 15 aa, synthetic construct
GGGGSGGGGSGGGGS

SEQ ID NO: 12231 - protein, 11 aa, synthetic construct
PAPGGSEAAAK

SEQ ID NO: 12232 - protein, 11 aa, synthetic construct
PAPGSSEAAAK

SEQ ID NO: 12233 - protein, 11 aa, synthetic construct
PAPEAAAKGSS

SEQ ID NO: 12234 - protein, 9 aa, synthetic construct
GGSPAPGSS

SEQ ID NO: 12235 - protein, 9 aa, synthetic construct
PAPGGSGGG

SEQ ID NO: 12236 - protein, 11 aa, synthetic construct
EAAAKGGSGSS

SEQ ID NO: 12237 - protein, 6 aa, synthetic construct
GGSGGG

SEQ ID NO: 12238 - protein, 11 aa, synthetic construct
GGSEAAAKGSS

SEQ ID NO: 12239 - protein, 46 aa, synthetic construct; identical to SEQ ID NO: 5217

SEQ ID NO: 12240 - protein, 13 aa, synthetic construct
PAPAPAPAPAPAP

SEQ ID NO: 12241 - protein, 8 aa, synthetic construct
PAPEAAAK

SEQ ID NO: 12242 - protein, 11 aa, synthetic construct
GGSEAAAKGGG

SEQ ID NO: 12243 - protein, 6 aa, synthetic construct
GSSPAP

SEQ ID NO: 12244 - protein, 6 aa, synthetic construct
GGGGSS

SEQ ID NO: 12245 - protein, 11 aa, synthetic construct
GGGEAAAKPAP

SEQ ID NO: 12246 - protein, 11 aa, synthetic construct
EAAAKPAPGGS

SEQ ID NO: 12247 - protein, 11 aa, synthetic construct
EAAAKGGGPAP

SEQ ID NO: 12248 - protein, 11 aa, synthetic construct
PAPGGSEAAAK

SEQ ID NO: 12249 - protein, 9 aa, synthetic construct
PAPGGSGSS

SEQ ID NO: 12250 - protein, 9 aa, synthetic construct
PAPGGSGSS

SEQ ID NO: 12251 - protein, 9 aa, synthetic construct
GGSGGGPAP

SEQ ID NO: 12252 - protein, 20 aa, synthetic construct
EAAAKEAAAKEAAAKEAAAK

SEQ ID NO: 12253 - protein, 25 aa, synthetic construct
GGGGSGGGGSGGGGSGGGGSGGGGS

SEQ ID NO: 12254 - protein, 9 aa, synthetic construct
GGGGSSPAP

SEQ ID NO: 12255 - protein, 9 aa, synthetic construct
GSSGGGPAP

SEQ ID NO: 12256 - protein, 9 aa, synthetic construct
GGGGSSGGS

SEQ ID NO: 12257 - protein, 6 aa, synthetic construct
GGSGGG

SEQ ID NO: 12258 - protein, 9 aa, synthetic construct
GSSGGGGGS

SEQ ID NO: 12259 - protein, 33 aa, synthetic construct; identical to SEQ ID NO: 5006

SEQ ID NO: 12260 - protein, 9 aa, synthetic construct
GGGGGSGSS

SEQ ID NO: 12261 - protein, 11 aa, synthetic construct
GGGEAAAKGGS

SEQ ID NO: 12262 - protein, 6 aa, synthetic construct
GGSGGG

SEQ ID NO: 12263 - protein, 7 aa, synthetic construct
PAPAPAP

SEQ ID NO: 12264 - protein, 46 aa, synthetic construct; identical to SEQ ID NO: 5217

SEQ ID NO: 12265 - protein, 46 aa, synthetic construct; identical to SEQ ID NO: 5217

SEQ ID NO: 12266 - protein, 15 aa, synthetic construct
GSSGSSGSSGSSGSS

SEQ ID NO: 12267 - protein, 11 aa, synthetic construct
GSSGGGEAAAK

SEQ ID NO: 12268 - protein, 11 aa, synthetic construct
GSSGGSEAAAK

SEQ ID NO: 12269 - skipped

SEQ ID NO: 12270 - protein, 15 aa, synthetic construct
EAAAKGGGGSEAAAK

SEQ ID NO: 12271 - protein, 5 aa, synthetic construct
PAPAP

SEQ ID NO: 12272 - skipped

SEQ ID NO: 12273 - protein, 6 aa, synthetic construct
GSSGGG

SEQ ID NO: 12274 - protein, 9 aa, synthetic construct
GSSPAPGGS

SEQ ID NO: 12275 - protein, 9 aa, synthetic construct
PAPAPAPAP

SEQ ID NO: 12276 - protein, 11 aa, synthetic construct
EAAAKGSSGGS

SEQ ID NO: 12277 - protein, 11 aa, synthetic construct
PAPEAAAKGGG

SEQ ID NO: 12278 - protein, 6 aa, synthetic construct
PAPGGS

SEQ ID NO: 12279 - protein, 8 aa, synthetic construct
EAAAKGGG

SEQ ID NO: 12280 - protein, 11 aa, synthetic construct
GSSEAAAKPAP

SEQ ID NO: 12281 - protein, 6 aa, synthetic construct
PAPGGS

SEQ ID NO: 12282 - protein, 8 aa, synthetic construct
EAAAKGGS

SEQ ID NO: 12283 - protein, 30 aa, synthetic construct; identical to SEQ ID NO: 5130

SEQ ID NO: 12284 - protein, 11 aa, synthetic construct
PAPGGSEAAAK

SEQ ID NO: 12285 - skipped

SEQ ID NO: 12286 - protein, 12 aa, synthetic construct
GSSGSSGSSGSS

SEQ ID NO: 12287 - protein, 9 aa, synthetic construct
GSSGSSGSS

SEQ ID NO: 12288 - protein, 6 aa, synthetic construct
GSSGGG

SEQ ID NO: 12289 - protein, 5 aa, synthetic construct
EAAAK

SEQ ID NO: 12290 - protein, 11 aa, synthetic construct
GGSPAPEAAAK

SEQ ID NO: 12291 - protein, 6 aa, synthetic construct
GGSGSS

SEQ ID NO: 12292 - protein, 9 aa, synthetic construct
GSSPAPGGG

SEQ ID NO: 12293 - protein, 25 aa, synthetic construct
EAAAKEAAAKEAAAKEAAAKEAAAK

SEQ ID NO: 12294 - protein, 11 aa, synthetic construct
EAAAKGSSPAP

SEQ ID NO: 12295 - protein, 6 aa, synthetic construct
GGGGSS

SEQ ID NO: 12296 - protein, 9 aa, synthetic construct
GGSPAPGSS

SEQ ID NO: 12297 - protein, 25 aa, synthetic construct
EAAAKEAAAKEAAAKEAAAKEAAAK

SEQ ID NO: 12298 - protein, 11 aa, synthetic construct
PAPEAAAKGGG

SEQ ID NO: 12299 - protein, 11 aa, synthetic construct
EAAAKPAPGGS

SEQ ID NO: 12300 - protein, 5 aa, synthetic construct
PAPAP

SEQ ID NO: 12301 - protein, 20 aa, synthetic construct
EAAAKEAAAKEAAAKEAAAK

SEQ ID NO: 12302 - protein, 9 aa, synthetic construct
GSSPAPGGG

SEQ ID NO: 12303 - protein, 11 aa, synthetic construct
EAAAKGGGPAP

SEQ ID NO: 12304 - protein, 8 aa, synthetic construct
PAPEAAAK

SEQ ID NO: 12305 - protein, 11 aa, synthetic construct
PAPGGGEAAAK

SEQ ID NO: 12306 - protein, 11 aa, synthetic construct
EAAAKGSSGGS

SEQ ID NO: 12307 - protein, 15 aa, synthetic construct
EAAAKEAAAKEAAAK

SEQ ID NO: 12308 - protein, 8 aa, synthetic construct
GSSEAAAK

SEQ ID NO: 12309 - protein, 12 aa, synthetic construct
GSSGSSGSSGSS

SEQ ID NO: 12310 - protein, 20 aa, synthetic construct
GGGGSGGGGSGGGGSGGGGS

SEQ ID NO: 12311 - protein, 15 aa, synthetic construct
EAAAKGGGGSEAAAK

SEQ ID NO: 12312 - skipped

SEQ ID NO: 12313 - protein, 30 aa, synthetic construct; identical to SEQ ID NO: 5112

SEQ ID NO: 12314 - protein, 9 aa, synthetic construct
GGSGSSPAP

SEQ ID NO: 12315 - protein, 15 aa, synthetic construct
GGGGSGGGGSGGGGS

SEQ ID NO: 12316 - protein, 11 aa, synthetic construct
PAPAPAPAPAP

SEQ ID NO: 12317 - protein, 11 aa, synthetic construct
PAPAPAPAPAP

SEQ ID NO: 12318 - protein, 20 aa, synthetic construct
EAAAKEAAAKEAAAKEAAAK

SEQ ID NO: 12319 - protein, 25 aa, synthetic construct
GGGGSGGGGSGGGGSGGGGSGGGGS

SEQ ID NO: 12320 - protein, 9 aa, synthetic construct
GGSGGSGGS

SEQ ID NO: 12321 - protein, 11 aa, synthetic construct
EAAAKPAPGSS

SEQ ID NO: 12322 - skipped

SEQ ID NO: 12323 - protein, 11 aa, synthetic construct
PAPEAAAKGGS

SEQ ID NO: 12324 - protein, 9 aa, synthetic construct
GGGPAPGGS

SEQ ID NO: 12325 - protein, 11 aa, synthetic construct
EAAAKGGGGSS

SEQ ID NO: 12326 - protein, 15 aa, synthetic construct
GSSGSSGSSGSSGSS

SEQ ID NO: 12327 - protein, 16 aa, synthetic construct
SGSETPGTSESATPES

SEQ ID NO: 12328 - protein, 11 aa, synthetic construct
GGSEAAAKGGG

SEQ ID NO: 12329 - protein, 18 aa, synthetic construct
GSSGSSGSSGSSGSSGSS

SEQ ID NO: 12330 - protein, 13 aa, synthetic construct
PAPAPAPAPAPAP

SEQ ID NO: 12331 - protein, 6 aa, synthetic construct
GGSGGS

SEQ ID NO: 12332 - protein, 11 aa, synthetic construct
PAPGSSEAAAK

SEQ ID NO: 12333 - protein, 11 aa, synthetic construct
GGSPAPEAAAK

SEQ ID NO: 12334 - protein, 11 aa, synthetic construct
EAAAKGGGGGS

SEQ ID NO: 12335 - protein, 12 aa, synthetic construct
GGSGGSGGSGGS

SEQ ID NO: 12336 - protein, 11 aa, synthetic construct
GGGGSSEAAAK

SEQ ID NO: 12337 - protein, 11 aa, synthetic construct
GSSEAAAKGGG

SEQ ID NO: 12338 - protein, 6 aa, synthetic construct
PAPGGS

SEQ ID NO: 12339 - protein, 11 aa, synthetic construct
EAAAKGGSGGG

SEQ ID NO: 12340 - protein, 8 aa, synthetic construct
EAAAKGGG

SEQ ID NO: 12341 - protein, 6 aa, synthetic construct
PAPGGS

SEQ ID NO: 12342 - protein, 9 aa, synthetic construct
GSSPAPGGG

SEQ ID NO: 12343 - protein, 11 aa, synthetic construct
PAPEAAAKGGG

SEQ ID NO: 12344 - protein, 11 aa, synthetic construct
GSSEAAAKGGG

SEQ ID NO: 12345 - protein, 11 aa, synthetic construct
PAPGGSEAAAK

SEQ ID NO: 12346 - protein, 6 aa, synthetic construct
GGGGGS

SEQ ID NO: 12347 - protein, 11 aa, synthetic construct
GGSPAPEAAAK

SEQ ID NO: 12348 - protein, 6 aa, synthetic construct
GGGPAP

SEQ ID NO: 12349 - protein, 9 aa, synthetic construct
PAPGSSGGG

SEQ ID NO: 12350 - protein, 9 aa, synthetic construct
PAPGSSGGG

SEQ ID NO: 12351 - protein, 11 aa, synthetic construct
GGGEAAAKGSS

SEQ ID NO: 12352 - protein, 11 aa, synthetic construct
GSSEAAAKGGS

SEQ ID NO: 12353 - protein, 9 aa, synthetic construct
PAPGGSGSS

SEQ ID NO: 12354 - protein, 15 aa, synthetic construct
EAAAKGGGGSEAAAK

SEQ ID NO: 12355 - protein, 7 aa, synthetic construct
PAPAPAP

SEQ ID NO: 12356 - protein, 6 aa, synthetic construct
GGGGGG

SEQ ID NO: 12357 - protein, 11 aa, synthetic construct
GSSPAPEAAAK

SEQ ID NO: 12358 - protein, 9 aa, synthetic construct
GGSGGSGGS

SEQ ID NO: 12359 - protein, 15 aa, synthetic construct
GSSGSSGSSGSSGSS

SEQ ID NO: 12360 - protein, 9 aa, synthetic construct
GGGPAPGGS

SEQ ID NO: 12361 - protein, 11 aa, synthetic construct
GGGPAPEAAAK

SEQ ID NO: 12362 - protein, 6 aa, synthetic construct
GGSGGG

SEQ ID NO: 12363 - protein, 16 aa, synthetic construct
SGSETPGTSESATPES

SEQ ID NO: 12364 - protein, 11 aa, synthetic construct
EAAAKGSSPAP

SEQ ID NO: 12365 - protein, 8 aa, synthetic construct
GSSEAAAK

SEQ ID NO: 12366 - protein, 9 aa, synthetic construct
GSSGGSGGG

SEQ ID NO: 12367 - protein, 25 aa, synthetic construct
EAAAKEAAAKEAAAKEAAAKEAAAK

SEQ ID NO: 12368 - protein, 15 aa, synthetic construct
GGGGSEAAAKGGGGS

SEQ ID NO: 12369 - protein, 9 aa, synthetic construct
PAPGGGGSS

SEQ ID NO: 12370 - protein, 16 aa, synthetic construct
SGSETPGTSESATPES

SEQ ID NO: 12371 - protein, 11 aa, synthetic construct
GGSPAPEAAAK

SEQ ID NO: 12372 - protein, 11 aa, synthetic construct
GSSEAAAKGGG

SEQ ID NO: 12373 - protein, 8 aa, synthetic construct
GSSEAAAK

SEQ ID NO: 12374 - protein, 15 aa, synthetic construct
GGGGSEAAAKGGGGS

SEQ ID NO: 12375 - skipped

SEQ ID NO: 12376 - protein, 11 aa, synthetic construct
PAPGGSEAAAK

SEQ ID NO: 12377 - protein, 5 aa, synthetic construct
GGGGS

SEQ ID NO: 12378 - protein, 6 aa, synthetic construct
GGGPAP

SEQ ID NO: 12379 - protein, 30 aa, synthetic construct; identical to SEQ ID NO: 5130

SEQ ID NO: 12380 - protein, 11 aa, synthetic construct
EAAAKPAPGSS

SEQ ID NO: 12381 - protein, 11 aa, synthetic construct
EAAAKPAPGSS

SEQ ID NO: 12382 - protein, 6 aa, synthetic construct
GGGGGG

SEQ ID NO: 12383 - protein, 11 aa, synthetic construct
EAAAKPAPGGS

SEQ ID NO: 12384 - protein, 11 aa, synthetic construct
PAPGGGEAAAK

SEQ ID NO: 12385 - protein, 25 aa, synthetic construct
EAAAKEAAAKEAAAKEAAAKEAAAK

SEQ ID NO: 12386 - protein, 11 aa, synthetic construct
GSSEAAAKPAP

SEQ ID NO: 12387 - protein, 11 aa, synthetic construct
PAPGGSEAAAK

SEQ ID NO: 12388 - protein, 6 aa, synthetic construct
PAPGSS

SEQ ID NO: 12389 - protein, 8 aa, synthetic construct
EAAAKGGG

SEQ ID NO: 12390 - protein, 8 aa, synthetic construct
EAAAKPAP

SEQ ID NO: 12391 - protein, 11 aa, synthetic construct
PAPEAAAKGGS

SEQ ID NO: 12392 - protein, 9 aa, synthetic construct
GGSPAPGGG

SEQ ID NO: 12393 - protein, 9 aa, synthetic construct
PAPGGSGSS

SEQ ID NO: 12394 - protein, 30 aa, synthetic construct; identical to SEQ ID NO: 5130

SEQ ID NO: 12395 - protein, 9 aa, synthetic construct
GGSGGGPAP

SEQ ID NO: 12396 - protein, 46 aa, synthetic construct; identical to SEQ ID NO: 5217

SEQ ID NO: 12397 - protein, 11 aa, synthetic construct
PAPEAAAKGSS

SEQ ID NO: 12398 - protein, 8 aa, synthetic construct
EAAAKGSS

SEQ ID NO: 12399 - protein, 6 aa, synthetic construct
GGSGGS

SEQ ID NO: 12400 - protein, 25 aa, synthetic construct
EAAAKEAAAKEAAAKEAAAKEAAAK

SEQ ID NO: 12401 - protein, 15 aa, synthetic construct
GGGGSEAAAKGGGGS

SEQ ID NO: 12402 - protein, 11 aa, synthetic construct
GGSEAAAKGGG

SEQ ID NO: 12403 - protein, 15 aa, synthetic construct
GSSGSSGSSGSSGSS

SEQ ID NO: 12404 - protein, 30 aa, synthetic construct; identical to SEQ ID NO: 5112

SEQ ID NO: 12405 - protein, 8 aa, synthetic construct
EAAAKGGG

SEQ ID NO: 12406 - protein, 11 aa, synthetic construct
GGGGGSEAAAK

SEQ ID NO: 12407 - protein, 11 aa, synthetic construct
EAAAKPAPGGS

SEQ ID NO: 12408 - protein, 9 aa, synthetic construct
GGGGGSGSS

SEQ ID NO: 12409 - protein, 11 aa, synthetic construct
PAPGSSEAAAK

SEQ ID NO: 12410 - protein, 11 aa, synthetic construct
GSSEAAAKPAP

SEQ ID NO: 12411 - protein, 11 aa, synthetic construct
EAAAKGSSPAP

SEQ ID NO: 12412 - protein, 9 aa, synthetic construct
GGGPAPGGS

SEQ ID NO: 12413 - protein, 6 aa, synthetic construct
GGSPAP

SEQ ID NO: 12414 - protein, 11 aa, synthetic construct
GGSEAAAKGGG

SEQ ID NO: 12415 - protein, 8 aa, synthetic construct
GGGGGGGG

SEQ ID NO: 12416 - protein, 30 aa, synthetic construct; identical to SEQ ID NO: 5112

SEQ ID NO: 12417 - protein, 30 aa, synthetic construct; identical to SEQ ID NO: 5112

SEQ ID NO: 12418 - protein, 9 aa, synthetic construct
GSSPAPGGG

SEQ ID NO: 12419 - protein, 6 aa, synthetic construct
GGGGGG

SEQ ID NO: 12420 - protein, 6 aa, synthetic construct
GSSGGS

SEQ ID NO: 12421 - protein, 9 aa, synthetic construct
GGSPAPGSS

SEQ ID NO: 12422 - protein, 11 aa, synthetic construct
PAPEAAAKGGG

SEQ ID NO: 12423 - protein, 11 aa, synthetic construct
EAAAKGGGPAP

SEQ ID NO: 12424 - protein, 11 aa, synthetic construct
GGGEAAAKGGS

SEQ ID NO: 12425 - protein, 9 aa, synthetic construct
GGSGSSPAP

SEQ ID NO: 12426 - protein, 16 aa, synthetic construct
SGSETPGTSESATPES

SEQ ID NO: 12427 - protein, 11 aa, synthetic construct
PAPGGSEAAAK

SEQ ID NO: 12428 - protein, 6 aa, synthetic construct
GGSGGG

SEQ ID NO: 12429 - protein, 9 aa, synthetic construct
GGGGSSPAP

SEQ ID NO: 12430 - protein, 11 aa, synthetic construct
GGGEAAAKGSS

SEQ ID NO: 12431 - protein, 13 aa, synthetic construct
PAPAPAPAPAPAP

SEQ ID NO: 12432 - protein, 15 aa, synthetic construct
EAAAKGGGGSEAAAK

SEQ ID NO: 12433 - protein, 25 aa, synthetic construct
EAAAKEAAAKEAAAKEAAAKEAAAK

SEQ ID NO: 12434 - protein, 11 aa, synthetic construct
GGGGGSEAAAK

SEQ ID NO: 12435 - protein, 11 aa, synthetic construct
PAPGSSEAAAK

SEQ ID NO: 12436 - protein, 12 aa, synthetic construct
GSAGSAAGSGEF

SEQ ID NO: 12437 - protein, 15 aa, synthetic construct
EAAAKGGGGSEAAAK

SEQ ID NO: 12438 - protein, 9 aa, synthetic construct
GGSPAPGGG

SEQ ID NO: 12439 - protein, 11 aa, synthetic construct
GSSEAAAKGGG

SEQ ID NO: 12440 - protein, 11 aa, synthetic construct
GGGEAAAKPAP

SEQ ID NO: 12441 - protein, 6 aa, synthetic construct
GGGPAP

SEQ ID NO: 12442 - protein, 8 aa, synthetic construct
GGSEAAAK

SEQ ID NO: 12443 - protein, 33 aa, synthetic construct; identical to SEQ ID NO: 5006

SEQ ID NO: 12444 - protein, 11 aa, synthetic construct
EAAAKPAPGGS

SEQ ID NO: 12445 - protein, 46 aa, synthetic construct; identical to SEQ ID NO: 5217

SEQ ID NO: 12446 - protein, 8 aa, synthetic construct
GGGGGGGG

SEQ ID NO: 12447 - protein, 6 aa, synthetic construct
PAPGSS

SEQ ID NO: 12448 - protein, 5 aa, synthetic construct
EAAAK

SEQ ID NO: 12449 - protein, 12 aa, synthetic construct
GSAGSAAGSGEF

SEQ ID NO: 12450 - protein, 11 aa, synthetic construct
PAPGGGEAAAK

SEQ ID NO: 12451 - protein, 11 aa, synthetic construct
EAAAKGSSGGS

SEQ ID NO: 12452 - protein, 15 aa, synthetic construct
GGGGSEAAAKGGGGS

SEQ ID NO: 12453 - protein, 15 aa, synthetic construct
GGGGSGGGGSGGGGS

SEQ ID NO: 12454 - protein, 15 aa, synthetic construct
EAAAKGGGGSEAAAK

SEQ ID NO: 12455 - protein, 11 aa, synthetic construct
PAPGGGEAAAK

SEQ ID NO: 12456 - protein, 11 aa, synthetic construct
GGSEAAAKPAP

SEQ ID NO: 12457 - protein, 5 aa, synthetic construct
PAPAP

SEQ ID NO: 12458 - protein, 5 aa, synthetic construct
PAPAP

SEQ ID NO: 12459 - protein, 6 aa, synthetic construct
GGSPAP

SEQ ID NO: 12460 - protein, 11 aa, synthetic construct
EAAAKGSSGGS

SEQ ID NO: 12461 - protein, 9 aa, synthetic construct
PAPGSSGGS

SEQ ID NO: 12462 - protein, 15 aa, synthetic construct
EAAAKGGGGSEAAAK

SEQ ID NO: 12463 - protein, 7 aa, synthetic construct
PAPAPAP

SEQ ID NO: 12464 - protein, 18 aa, synthetic construct
GGSGGSGGSGGSGGSGGS

SEQ ID NO: 12465 - protein, 9 aa, synthetic construct
GGGGGSGSS

SEQ ID NO: 12466 - protein, 11 aa, synthetic construct
PAPGSSEAAAK

SEQ ID NO: 12467 - protein, 11 aa, synthetic construct
GGSEAAAKPAP

SEQ ID NO: 12468 - protein, 20 aa, synthetic construct
EAAAKEAAAKEAAAKEAAAK

SEQ ID NO: 12469 - protein, 46 aa, synthetic construct; identical to SEQ ID NO: 5217

SEQ ID NO: 12470 - protein, 11 aa, synthetic construct
GGSGGGEAAAK

SEQ ID NO: 12471 - protein, 8 aa, synthetic construct
GGGEAAAK

SEQ ID NO: 12472 - protein, 15 aa, synthetic construct
GGGGSGGGGSGGGGS

SEQ ID NO: 12473 - protein, 15 aa, synthetic construct
GGSGGSGGSGGSGGS

SEQ ID NO: 12474 - protein, 9 aa, synthetic construct
GSSGGGGGS

SEQ ID NO: 12475 - protein, 11 aa, synthetic construct
PAPGGSEAAAK

SEQ ID NO: 12476 - protein, 9 aa, synthetic construct
GSSGGSPAP

SEQ ID NO: 12477 - protein, 16 aa, synthetic construct
SGSETPGTSESATPES

SEQ ID NO: 12478 - protein, 10 aa, synthetic construct
GGGGSGGGGS

SEQ ID NO: 12479 - protein, 11 aa, synthetic construct
PAPAPAPAPAP

SEQ ID NO: 12480 - protein, 6 aa, synthetic construct
GSSGSS

SEQ ID NO: 12481 - protein, 11 aa, synthetic construct
GSSEAAAKPAP

SEQ ID NO: 12482 - protein, 9 aa, synthetic construct
GGSGSSGGG

SEQ ID NO: 12483 - protein, 10 aa, synthetic construct
EAAAKEAAAK

SEQ ID NO: 12484 - protein, 12 aa, synthetic construct
GSSGSSGSSGSS

SEQ ID NO: 12485 - protein, 9 aa, synthetic construct
GSSPAPGGG

SEQ ID NO: 12486 - protein, 15 aa, synthetic construct
EAAAKEAAAKEAAAK

SEQ ID NO: 12487 - protein, 46 aa, synthetic construct; identical to SEQ ID NO: 5217

SEQ ID NO: 12488 - protein, 30 aa, synthetic construct; identical to SEQ ID NO: 5112

SEQ ID NO: 12489 - protein, 12 aa, synthetic construct
GSAGSAAGSGEF

SEQ ID NO: 12490 - protein, 11 aa, synthetic construct
PAPGSSEAAAK

SEQ ID NO: 12491 - protein, 8 aa, synthetic construct
GGSEAAAK

SEQ ID NO: 12492 - protein, 15 aa, synthetic construct
GSSGSSGSSGSSGSS

SEQ ID NO: 12493 - protein, 11 aa, synthetic construct
GGSEAAAKPAP

SEQ ID NO: 12494 - protein, 9 aa, synthetic construct
GGSGGSGGS

SEQ ID NO: 12495 - protein, 11 aa, synthetic construct
EAAAKGGSGSS

SEQ ID NO: 12496 - protein, 25 aa, synthetic construct
GGGGSGGGGSGGGGSGGGGSGGGGS

SEQ ID NO: 12497 - protein, 20 aa, synthetic construct
EAAAKEAAAKEAAAKEAAAK

SEQ ID NO: 12498 - protein, 9 aa, synthetic construct
GGSGSSPAP

SEQ ID NO: 12499 - protein, 25 aa, synthetic construct
EAAAKEAAAKEAAAKEAAAKEAAAK

SEQ ID NO: 12500 - protein, 25 aa, synthetic construct
GGGGSGGGGSGGGGSGGGGSGGGGS

SEQ ID NO: 12501 - protein, 6 aa, synthetic construct
GGSGSS

SEQ ID NO: 12502 - protein, 8 aa, synthetic construct
PAPEAAAK

SEQ ID NO: 12503 - protein, 8 aa, synthetic construct
EAAAKPAP

SEQ ID NO: 12504 - protein, 6 aa, synthetic construct
GSSPAP

SEQ ID NO: 12505 - protein, 6 aa, synthetic construct
GGGPAP

SEQ ID NO: 12506 - protein, 11 aa, synthetic construct
EAAAKGGSGSS

SEQ ID NO: 12507 - protein, 15 aa, synthetic construct
EAAAKGGGGSEAAAK

SEQ ID NO: 12508 - protein, 6 aa, synthetic construct
GGSGGG

SEQ ID NO: 12509 - protein, 6 aa, synthetic construct
GSSPAP

SEQ ID NO: 12510 - protein, 11 aa, synthetic construct
GGSGSSEAAAK

SEQ ID NO: 12511 - protein, 9 aa, synthetic construct
PAPGSSGGS

SEQ ID NO: 12512 - protein, 6 aa, synthetic construct
GGGGGG

SEQ ID NO: 12513 - protein, 11 aa, synthetic construct
PAPGGSEAAAK

SEQ ID NO: 12514 - protein, 6 aa, synthetic construct
PAPGGS

SEQ ID NO: 12515 - protein, 12 aa, synthetic construct
GGSGGSGGSGGS

SEQ ID NO: 12516 - protein, 6 aa, synthetic construct
GSSPAP

SEQ ID NO: 12517 - protein, 9 aa, synthetic construct
PAPAPAPAP

SEQ ID NO: 12518 - protein, 6 aa, synthetic construct
GGGGGG

SEQ ID NO: 12519 - protein, 18 aa, synthetic construct
GSSGSSGSSGSSGSSGSS

SEQ ID NO: 12520 - protein, 11 aa, synthetic construct
GSSEAAAKGGS

SEQ ID NO: 12521 - protein, 8 aa, synthetic construct
GGSEAAAK

SEQ ID NO: 12522 - protein, 15 aa, synthetic construct
GGSGGSGGSGGSGGS

SEQ ID NO: 12523 - protein, 11 aa, synthetic construct
GSSPAPEAAAK

SEQ ID NO: 12524 - protein, 15 aa, synthetic construct
GSSGSSGSSGSSGSS

SEQ ID NO: 12525 - protein, 11 aa, synthetic construct
EAAAKPAPGGS

SEQ ID NO: 12526 - protein, 33 aa, synthetic construct; identical to SEQ ID NO: 5006

SEQ ID NO: 12527 - protein, 11 aa, synthetic construct
GGSPAPEAAAK

SEQ ID NO: 12528 - protein, 11 aa, synthetic construct
EAAAKGGSGGG

SEQ ID NO: 12529 - protein, 20 aa, synthetic construct
EAAAKEAAAKEAAAKEAAAK

SEQ ID NO: 12530 - protein, 6 aa, synthetic construct
GSSPAP

SEQ ID NO: 12531 - protein, 9 aa, synthetic construct
PAPAPAPAP

SEQ ID NO: 12532 - protein, 11 aa, synthetic construct
PAPGGSEAAAK

SEQ ID NO: 12533 - protein, 11 aa, synthetic construct
GGSGSSEAAAK

SEQ ID NO: 12534 - protein, 6 aa, synthetic construct
GSSGGG

SEQ ID NO: 12535 - protein, 11 aa, synthetic construct
GGGEAAAKGSS

SEQ ID NO: 12536 - protein, 9 aa, synthetic construct
PAPGGSGGG

SEQ ID NO: 12537 - protein, 46 aa, synthetic construct; identical to SEQ ID NO: 5217

SEQ ID NO: 12538 - protein, 9 aa, synthetic construct
PAPGGGGSS

SEQ ID NO: 12539 - protein, 8 aa, synthetic construct
EAAAKGGS

SEQ ID NO: 12540 - protein, 30 aa, synthetic construct; identical to SEQ ID NO: 5130

SEQ ID NO: 12541 - protein, 9 aa, synthetic construct
GGSGGSGGS

SEQ ID NO: 12542 - protein, 5 aa, synthetic construct
PAPAP

SEQ ID NO: 12543 - protein, 11 aa, synthetic construct
GSSGGGEAAAK

SEQ ID NO: 12544 - protein, 11 aa, synthetic construct
GGGGSSEAAAK

SEQ ID NO: 12545 - protein, 11 aa, synthetic construct
EAAAKGSSGGS

SEQ ID NO: 12546 - protein, 15 aa, synthetic construct
EAAAKGGGGSEAAAK

SEQ ID NO: 12547 - protein, 8 aa, synthetic construct
GGGGGGGG

SEQ ID NO: 12548 - protein, 9 aa, synthetic construct
GSSGSSGSS

SEQ ID NO: 12549 - protein, 11 aa, synthetic construct
GGGEAAAKPAP

SEQ ID NO: 12550 - protein, 9 aa, synthetic construct
GGGGGSGSS

SEQ ID NO: 12551 - protein, 7 aa, synthetic construct
GGGGGGG

SEQ ID NO: 12552 - skipped

SEQ ID NO: 12553 - protein, 6 aa, synthetic construct
GSSGGG

SEQ ID NO: 12554 - protein, 11 aa, synthetic construct
EAAAKGGSGSS

SEQ ID NO: 12555 - protein, 11 aa, synthetic construct
PAPGSSEAAAK

SEQ ID NO: 12556 - protein, 11 aa, synthetic construct
GSSEAAAKPAP

SEQ ID NO: 12557 - protein, 9 aa, synthetic construct
GGSPAPGSS

SEQ ID NO: 12558 - protein, 12 aa, synthetic construct
GSAGSAAGSGEF

SEQ ID NO: 12559 - protein, 9 aa, synthetic construct
GGSPAPGGG

SEQ ID NO: 12560 - protein, 20 aa, synthetic construct
GGGGSGGGGSGGGGSGGGGS

SEQ ID NO: 12561 - protein, 9 aa, synthetic construct
GSSGSSGSS

SEQ ID NO: 12562 - protein, 30 aa, synthetic construct; identical to SEQ ID NO: 5130

SEQ ID NO: 12563 - protein, 15 aa, synthetic construct
GGGGSEAAAKGGGGS

SEQ ID NO: 12564 - protein, 11 aa, synthetic construct
GGSEAAAKGSS

SEQ ID NO: 12565 - protein, 15 aa, synthetic construct
EAAAKGGGGSEAAAK

SEQ ID NO: 12566 - protein, 30 aa, synthetic construct; identical to SEQ ID NO: 5130

SEQ ID NO: 12567 - protein, 11 aa, synthetic construct
PAPGGGEAAAK

SEQ ID NO: 12568 - protein, 11 aa, synthetic construct
GSSGGGEAAAK

SEQ ID NO: 12569 - protein, 6 aa, synthetic construct
GSSGSS

SEQ ID NO: 12570 - protein, 13 aa, synthetic construct
PAPAPAPAPAPAP

SEQ ID NO: 12571 - protein, 9 aa, synthetic construct
GGSPAPGGG

SEQ ID NO: 12572 - protein, 15 aa, synthetic construct
GGSGGSGGSGGSGGS

SEQ ID NO: 12573 - protein, 10 aa, synthetic construct
EAAAKEAAAK

SEQ ID NO: 12574 - protein, 46 aa, synthetic construct; identical to SEQ ID NO: 5217

SEQ ID NO: 12575 - protein, 13 aa, synthetic construct
PAPAPAPAPAPAP

SEQ ID NO: 12576 - protein, 11 aa, synthetic construct
GGGEAAAKGGS

SEQ ID NO: 12577 - protein, 11 aa, synthetic construct
EAAAKGGGPAP

SEQ ID NO: 12578 - protein, 11 aa, synthetic construct
PAPEAAAKGSS

SEQ ID NO: 12579 - protein, 11 aa, synthetic construct
PAPEAAAKGSS

SEQ ID NO: 12580 - protein, 11 aa, synthetic construct
PAPGGSEAAAK

SEQ ID NO: 12581 - protein, 9 aa, synthetic construct
GSSPAPGGG

SEQ ID NO: 12582 - protein, 11 aa, synthetic construct
GGGEAAAKPAP

SEQ ID NO: 12583 - protein, 10 aa, synthetic construct
GGGGSGGGGS

SEQ ID NO: 12584 - protein, 11 aa, synthetic construct
GGGEAAAKGSS

SEQ ID NO: 12585 - protein, 9 aa, synthetic construct
PAPGGGGSS

SEQ ID NO: 12586 - protein, 8 aa, synthetic construct
GSSEAAAK

SEQ ID NO: 12587 - protein, 8 aa, synthetic construct
GGGGGGGG

SEQ ID NO: 12588 - protein, 9 aa, synthetic construct
PAPGSSGGS

SEQ ID NO: 12589 - protein, 20 aa, synthetic construct
GGGGSGGGGSGGGGSGGGGS

SEQ ID NO: 12590 - skipped

SEQ ID NO: 12591 - protein, 11 aa, synthetic construct
EAAAKGSSPAP

SEQ ID NO: 12592 - protein, 11 aa, synthetic construct
PAPEAAAKGGS

SEQ ID NO: 12593 - protein, 11 aa, synthetic construct
GSSGGGEAAAK

SEQ ID NO: 12594 - protein, 7 aa, synthetic construct
PAPAPAP

SEQ ID NO: 12595 - protein, 11 aa, synthetic construct
GGSEAAAKGGG

SEQ ID NO: 12596 - protein, 8 aa, synthetic construct
GSSEAAAK

SEQ ID NO: 12597 - protein, 4 aa, synthetic construct
GGGG

SEQ ID NO: 12598 - protein, 6 aa, synthetic construct
GGGGGS

SEQ ID NO: 12599 - protein, 11 aa, synthetic construct
GGGGSSEAAAK

SEQ ID NO: 12600 - protein, 30 aa, synthetic construct; identical to SEQ ID NO: 5130

SEQ ID NO: 12601 - protein, 11 aa, synthetic construct
GGSEAAAKGSS

SEQ ID NO: 12602 - protein, 9 aa, synthetic construct
PAPGSSGGS

SEQ ID NO: 12603 - protein, 6 aa, synthetic construct
GGSPAP

SEQ ID NO: 12604 - protein, 11 aa, synthetic construct
GGGGSSEAAAK

SEQ ID NO: 12605 - protein, 12 aa, synthetic construct
GGSGGSGGSGGS

SEQ ID NO: 12606 - protein, 9 aa, synthetic construct
PAPGSSGGS

SEQ ID NO: 12607 - protein, 9 aa, synthetic construct
GSSPAPGGG

SEQ ID NO: 12608 - protein, 7 aa, synthetic construct
GGGGGGG

SEQ ID NO: 12609 - protein, 11 aa, synthetic construct
EAAAKGGGGGS

SEQ ID NO: 12610 - protein, 11 aa, synthetic construct
EAAAKGGSGGG

SEQ ID NO: 12611 - protein, 11 aa, synthetic construct
GGGGSSEAAAK

SEQ ID NO: 12612 - protein, 15 aa, synthetic construct
GGGGSEAAAKGGGGS

SEQ ID NO: 12613 - protein, 6 aa, synthetic construct
GSSGSS

SEQ ID NO: 12614 - protein, 6 aa, synthetic construct
GGSGGG

SEQ ID NO: 12615 - protein, 11 aa, synthetic construct
PAPEAAAKGGG

SEQ ID NO: 12616 - protein, 46 aa, synthetic construct; identical to SEQ ID NO: 5217

SEQ ID NO: 12617 - protein, 9 aa, synthetic construct
GGGGGSGSS

SEQ ID NO: 12618 - protein, 15 aa, synthetic construct
GSSGSSGSSGSSGSS

SEQ ID NO: 12619 - protein, 15 aa, synthetic construct
GGGGSEAAAKGGGGS

SEQ ID NO: 12620 - protein, 9 aa, synthetic construct
GGGGGSPAP

SEQ ID NO: 12621 - protein, 8 aa, synthetic construct
GGGEAAAK

SEQ ID NO: 12622 - protein, 12 aa, synthetic construct
GGSGGSGGSGGS

SEQ ID NO: 12623 - skipped

SEQ ID NO: 12624 - protein, 11 aa, synthetic construct
GGSPAPEAAAK

SEQ ID NO: 12625 - protein, 10 aa, synthetic construct
EAAAKEAAAK

SEQ ID NO: 12626 - protein, 11 aa, synthetic construct
GGGEAAAKPAP

SEQ ID NO: 12627 - protein, 11 aa, synthetic construct
GGGEAAAKGGS

SEQ ID NO: 12628 - protein, 9 aa, synthetic construct
GGSGGSGGS

SEQ ID NO: 12629 - protein, 11 aa, synthetic construct
EAAAKGGGPAP

SEQ ID NO: 12630 - protein, 5 aa, synthetic construct
EAAAK

SEQ ID NO: 12631 - protein, 11 aa, synthetic construct
PAPEAAAKGGG

SEQ ID NO: 12632 - protein, 8 aa, synthetic construct
EAAAKGSS

SEQ ID NO: 12633 - protein, 11 aa, synthetic construct
GGSEAAAKGGG

SEQ ID NO: 12634 - protein, 20 aa, synthetic construct
GGGGSGGGGSGGGGSGGGGS

SEQ ID NO: 12635 - protein, 25 aa, synthetic construct
GGGGSGGGGSGGGGSGGGGSGGGGS

SEQ ID NO: 12636 - protein, 9 aa, synthetic construct
GGGGSSPAP

SEQ ID NO: 12637 - protein, 18 aa, synthetic construct
GGSGGSGGSGGSGGSGGS

SEQ ID NO: 12638 - protein, 11 aa, synthetic construct
GGGEAAAKPAP

SEQ ID NO: 12639 - protein, 10 aa, synthetic construct
EAAAKEAAAK

SEQ ID NO: 12640 - protein, 11 aa, synthetic construct
GGSGSSEAAAK

SEQ ID NO: 12641 - protein, 11 aa, synthetic construct
PAPEAAAKGSS

SEQ ID NO: 12642 - protein, 11 aa, synthetic construct
PAPAPAPAPAP

SEQ ID NO: 12643 - protein, 11 aa, synthetic construct
GSSGGGEAAAK

SEQ ID NO: 12644 - protein, 9 aa, synthetic construct
GSSPAPGGG

SEQ ID NO: 12645 - protein, 11 aa, synthetic construct
GGSPAPEAAAK

SEQ ID NO: 12646 - protein, 11 aa, synthetic construct
PAPGGSEAAAK

SEQ ID NO: 12647 - protein, 6 aa, synthetic construct
GGGGSS

SEQ ID NO: 12648 - protein, 9 aa, synthetic construct
GGSGSSGGG

SEQ ID NO: 12649 - protein, 11 aa, synthetic construct
GSSGGGEAAAK

SEQ ID NO: 12650 - protein, 8 aa, synthetic construct
EAAAKGGS

SEQ ID NO: 12651 - protein, 9 aa, synthetic construct
GGGPAPGGS

SEQ ID NO: 12652 - protein, 10 aa, synthetic construct
EAAAKEAAAK

SEQ ID NO: 12653 - protein, 9 aa, synthetic construct
GSSGSSGSS

SEQ ID NO: 12654 - protein, 11 aa, synthetic construct
GGGEAAAKPAP

SEQ ID NO: 12655 - protein, 16 aa, synthetic construct
SGSETPGTSESATPES

SEQ ID NO: 12656 - protein, 11 aa, synthetic construct
PAPAPAPAPAP

SEQ ID NO: 12657 - protein, 46 aa, synthetic construct; identical to SEQ ID NO: 5217

SEQ ID NO: 12658 - protein, 9 aa, synthetic construct
PAPGSSGGG

SEQ ID NO: 12659 - protein, 11 aa, synthetic construct
GSSGGGEAAAK

SEQ ID NO: 12660 - protein, 25 aa, synthetic construct
GGGGSGGGGSGGGGSGGGGSGGGGS

SEQ ID NO: 12661 - protein, 9 aa, synthetic construct
GGGGSSPAP

SEQ ID NO: 12662 - protein, 9 aa, synthetic construct
GGSGGGPAP

SEQ ID NO: 12663 - skipped

SEQ ID NO: 12664 - protein, 11 aa, synthetic construct
EAAAKGSSPAP

SEQ ID NO: 12665 - protein, 8 aa, synthetic construct
EAAAKGGG

SEQ ID NO: 12666 - protein, 12 aa, synthetic construct
GSSGSSGSSGSS

SEQ ID NO: 12667 - protein, 11 aa, synthetic construct
PAPEAAAKGSS

SEQ ID NO: 12668 - protein, 8 aa, synthetic construct
GSSEAAAK

SEQ ID NO: 12669 - protein, 11 aa, synthetic construct
EAAAKGGSGSS

SEQ ID NO: 12670 - protein, 8 aa, synthetic construct
GSSEAAAK

SEQ ID NO: 12671 - protein, 11 aa, synthetic construct
GGSGSSEAAAK

SEQ ID NO: 12672 - protein, 11 aa, synthetic construct
GGSEAAAKGGG

SEQ ID NO: 12673 - protein, 20 aa, synthetic construct
GGGGSGGGGSGGGGSGGGGS

SEQ ID NO: 12674 - protein, 13 aa, synthetic construct
PAPAPAPAPAPAP

SEQ ID NO: 12675 - protein, 11 aa, synthetic construct
EAAAKPAPGSS

SEQ ID NO: 12676 - protein, 11 aa, synthetic construct
PAPGSSEAAAK

SEQ ID NO: 12677 - protein, 9 aa, synthetic construct
GGGGSSPAP

SEQ ID NO: 12678 - protein, 11 aa, synthetic construct
EAAAKGGGGGS

SEQ ID NO: 12679 - protein, 11 aa, synthetic construct
GGGEAAAKGGS

SEQ ID NO: 12680 - protein, 9 aa, synthetic construct
GGSGSSGGG

SEQ ID NO: 12681 - protein, 9 aa, synthetic construct
GGGPAPGGS

SEQ ID NO: 12682 - protein, 9 aa, synthetic construct
PAPGGGGGS

SEQ ID NO: 12683 - protein, 9 aa, synthetic construct
GGGPAPGSS

SEQ ID NO: 12684 - protein, 7 aa, synthetic construct
GGGGGGG

SEQ ID NO: 12685 - protein, 9 aa, synthetic construct
GGSGGGGSS

SEQ ID NO: 12686 - protein, 6 aa, synthetic construct
GGGGGG

SEQ ID NO: 12687 - protein, 11 aa, synthetic construct
GGSEAAAKGSS

SEQ ID NO: 12688 - protein, 9 aa, synthetic construct
GGSPAPGGG

SEQ ID NO: 12689 - protein, 9 aa, synthetic construct
GGSPAPGSS

SEQ ID NO: 12690 - protein, 12 aa, synthetic construct
GGSGGSGGSGGS

SEQ ID NO: 12691 - protein, 25 aa, synthetic construct
EAAAKEAAAKEAAAKEAAAKEAAAK

SEQ ID NO: 12692 - protein, 9 aa, synthetic construct
PAPGSSGGS

SEQ ID NO: 12693 - protein, 11 aa, synthetic construct
EAAAKGGGGSS

SEQ ID NO: 12694 - protein, 15 aa, synthetic construct
GGSGGSGGSGGSGGS

SEQ ID NO: 12695 - protein, 9 aa, synthetic construct
PAPGGSGGG

SEQ ID NO: 12696 - protein, 9 aa, synthetic construct
PAPGSSGGG

SEQ ID NO: 12697 - protein, 6 aa, synthetic construct
GSSGSS

SEQ ID NO: 12698 - protein, 8 aa, synthetic construct
EAAAKGSS

SEQ ID NO: 12699 - protein, 6 aa, synthetic construct
GGGPAP

SEQ ID NO: 12700 - protein, 11 aa, synthetic construct
EAAAKGGGGGS

SEQ ID NO: 12701 - protein, 11 aa, synthetic construct
EAAAKGGSPAP

SEQ ID NO: 12702 - protein, 30 aa, synthetic construct; identical to SEQ ID NO: 5130

SEQ ID NO: 12703 - protein, 9 aa, synthetic construct
GSSPAPGGG

SEQ ID NO: 12704 - protein, 11 aa, synthetic construct
GGGEAAAKGSS

SEQ ID NO: 12705 - protein, 11 aa, synthetic construct
GGGGSSEAAAK

SEQ ID NO: 12706 - protein, 8 aa, synthetic construct
GGGGGGGG

SEQ ID NO: 12707 - protein, 11 aa, synthetic construct
PAPGSSEAAAK

SEQ ID NO: 12708 - protein, 8 aa, synthetic construct
EAAAKGSS

SEQ ID NO: 12709 - protein, 11 aa, synthetic construct
GSSEAAAKGGG

SEQ ID NO: 12710 - protein, 8 aa, synthetic construct
GGSEAAAK

SEQ ID NO: 12711 - protein, 11 aa, synthetic construct
GSSEAAAKGGG

SEQ ID NO: 12712 - protein, 9 aa, synthetic construct
PAPGGSGGG

SEQ ID NO: 12713 - protein, 9 aa, synthetic construct
GSSGGSGGG

SEQ ID NO: 12714 - protein, 11 aa, synthetic construct
EAAAKGSSGGG

SEQ ID NO: 12715 - protein, 8 aa, synthetic construct
GSSEAAAK

SEQ ID NO: 12716 - protein, 11 aa, synthetic construct
GSSGGGEAAAK

SEQ ID NO: 12717 - protein, 10 aa, synthetic construct
GGGGSGGGGS

SEQ ID NO: 12718 - protein, 15 aa, synthetic construct
EAAAKGGGGSEAAAK

SEQ ID NO: 12719 - protein, 8 aa, synthetic construct
EAAAKGGG

SEQ ID NO: 12720 - protein, 11 aa, synthetic construct
EAAAKGGSPAP

SEQ ID NO: 12721 - protein, 9 aa, synthetic construct
GGGPAPGGS

SEQ ID NO: 12722 - protein, 8 aa, synthetic construct
GSSEAAAK

SEQ ID NO: 12723 - protein, 11 aa, synthetic construct
GSSGGGEAAAK

SEQ ID NO: 12724 - protein, 16 aa, synthetic construct
SGSETPGTSESATPES

SEQ ID NO: 12725 - protein, 9 aa, synthetic construct
GGSGSSPAP

SEQ ID NO: 12726 - protein, 6 aa, synthetic construct
GGGGGG

SEQ ID NO: 12727 - protein, 9 aa, synthetic construct
GGSPAPGGG

SEQ ID NO: 12728 - protein, 6 aa, synthetic construct
GGSGSS

SEQ ID NO: 12729 - skipped

SEQ ID NO: 12730 - protein, 11 aa, synthetic construct
EAAAKPAPGSS

SEQ ID NO: 12731 - protein, 8 aa, synthetic construct
EAAAKGGG

SEQ ID NO: 12732 - protein, 11 aa, synthetic construct
GSSEAAAKPAP

SEQ ID NO: 12733 - protein, 6 aa, synthetic construct
GGGGSS

SEQ ID NO: 12734 - protein, 11 aa, synthetic construct
GGSGSSEAAAK

SEQ ID NO: 12735 - protein, 6 aa, synthetic construct
GGGGSS

SEQ ID NO: 12736 - protein, 5 aa, synthetic construct
PAPAP

SEQ ID NO: 12737 - protein, 11 aa, synthetic construct
PAPEAAAKGGG

SEQ ID NO: 12738 - protein, 8 aa, synthetic construct
EAAAKGGS

SEQ ID NO: 12739 - protein, 13 aa, synthetic construct
PAPAPAPAPAPAP

SEQ ID NO: 12740 - protein, 11 aa, synthetic construct
GGGGGSEAAAK

SEQ ID NO: 12741 - protein, 6 aa, synthetic construct
PAPGGS

SEQ ID NO: 12742 - protein, 6 aa, synthetic construct
GGGGSS

SEQ ID NO: 12743 - protein, 5 aa, synthetic construct
GGGGS

SEQ ID NO: 12744 - protein, 11 aa, synthetic construct
GSSPAPEAAAK

SEQ ID NO: 12745 - protein, 9 aa, synthetic construct
GGGGSSGGS

SEQ ID NO: 12746 - protein, 11 aa, synthetic construct
PAPEAAAKGSS

SEQ ID NO: 12747 - protein, 11 aa, synthetic construct
GGSGSSEAAAK

SEQ ID NO: 12748 - protein, 8 aa, synthetic construct
EAAAKGGG

SEQ ID NO: 12749 - protein, 11 aa, synthetic construct
PAPGSSEAAAK

SEQ ID NO: 12750 - protein, 11 aa, synthetic construct
EAAAKGSSGGG

SEQ ID NO: 12751 - protein, 8 aa, synthetic construct
PAPEAAAK

SEQ ID NO: 12752 - protein, 11 aa, synthetic construct
GGSPAPEAAAK

SEQ ID NO: 12753 - protein, 18 aa, synthetic construct
GGSGGSGGSGGSGGSGGS

SEQ ID NO: 12754 - protein, 11 aa, synthetic construct
GSSEAAAKPAP

SEQ ID NO: 12755 - protein, 46 aa, synthetic construct; identical to SEQ ID NO: 5217

SEQ ID NO: 12756 - protein, 11 aa, synthetic construct
GSSGGGEAAAK

SEQ ID NO: 12757 - protein, 9 aa, synthetic construct
PAPGGSGGG

SEQ ID NO: 12758 - protein, 11 aa, synthetic construct
PAPGGSEAAAK

SEQ ID NO: 12759 - protein, 5 aa, synthetic construct
GGGGS

SEQ ID NO: 12760 - protein, 15 aa, synthetic construct
GGGGSGGGGSGGGGS

SEQ ID NO: 12761 - protein, 11 aa, synthetic construct
PAPAPAPAPAP

SEQ ID NO: 12762 - protein, 25 aa, synthetic construct
EAAAKEAAAKEAAAKEAAAKEAAAK

SEQ ID NO: 12763 - protein, 11 aa, synthetic construct
GSSGGSEAAAK

SEQ ID NO: 12764 - protein, 12 aa, synthetic construct
GGSGGSGGSGGS

SEQ ID NO: 12765 - protein, 11 aa, synthetic construct
EAAAKGSSGGG

SEQ ID NO: 12766 - protein, 8 aa, synthetic construct
EAAAKGGG

SEQ ID NO: 12767 - protein, 16 aa, synthetic construct
SGSETPGTSESATPES

SEQ ID NO: 12768 - protein, 9 aa, synthetic construct
PAPGSSGGS

SEQ ID NO: 12769 - protein, 11 aa, synthetic construct
PAPEAAAKGSS

SEQ ID NO: 12770 - protein, 8 aa, synthetic construct
PAPEAAAK

SEQ ID NO: 12771 - protein, 11 aa, synthetic construct
GSSEAAAKGGG

SEQ ID NO: 12772 - protein, 6 aa, synthetic construct
GSSPAP

SEQ ID NO: 12773 - protein, 20 aa, synthetic construct
EAAAKEAAAKEAAAKEAAAK

SEQ ID NO: 12774 - protein, 9 aa, synthetic construct
PAPGGSGSS

SEQ ID NO: 12775 - protein, 15 aa, synthetic construct
GGGGSGGGGSGGGGS

SEQ ID NO: 12776 - protein, 11 aa, synthetic construct
GSSGGSEAAAK

SEQ ID NO: 12777 - protein, 8 aa, synthetic construct
EAAAKGGS

SEQ ID NO: 12778 - protein, 8 aa, synthetic construct
EAAAKGGS

SEQ ID NO: 12779 - protein, 6 aa, synthetic construct
GGSPAP

SEQ ID NO: 12780 - protein, 6 aa, synthetic construct
GGSGSS

SEQ ID NO: 12781 - protein, 16 aa, synthetic construct
SGSETPGTSESATPES

SEQ ID NO: 12782 - protein, 7 aa, synthetic construct
GGGGGGG

SEQ ID NO: 12783 - protein, 9 aa, synthetic construct
GGSPAPGSS

SEQ ID NO: 12784 - protein, 9 aa, synthetic construct
GGGGSSGGS

SEQ ID NO: 12785 - protein, 6 aa, synthetic construct
PAPGGS

SEQ ID NO: 12786 - protein, 9 aa, synthetic construct
PAPGSSGGS

SEQ ID NO: 12787 - protein, 25 aa, synthetic construct
EAAAKEAAAKEAAAKEAAAKEAAAK

SEQ ID NO: 12788 - protein, 33 aa, synthetic construct; identical to SEQ ID NO: 5006

SEQ ID NO: 12789 - protein, 15 aa, synthetic construct
GGSGGSGGSGGSGGS

SEQ ID NO: 12790 - protein, 8 aa, synthetic construct
GSSEAAAK

SEQ ID NO: 12791 - protein, 20 aa, synthetic construct
EAAAKEAAAKEAAAKEAAAK

SEQ ID NO: 12792 - protein, 15 aa, synthetic construct
GGSGGSGGSGGSGGS

SEQ ID NO: 12793 - protein, 13 aa, synthetic construct
PAPAPAPAPAPAP

SEQ ID NO: 12794 - protein, 11 aa, synthetic construct
GGSPAPEAAAK

SEQ ID NO: 12795 - protein, 5 aa, synthetic construct
EAAAK

SEQ ID NO: 12796 - protein, 11 aa, synthetic construct
EAAAKGSSGGS

SEQ ID NO: 12797 - protein, 9 aa, synthetic construct
GGSGGGGSS

SEQ ID NO: 12798 - protein, 11 aa, synthetic construct
GGGEAAAKPAP

SEQ ID NO: 12799 - protein, 11 aa, synthetic construct
EAAAKGGSGGG

SEQ ID NO: 12800 - protein, 11 aa, synthetic construct
GGGGGSEAAAK

SEQ ID NO: 12801 - protein, 6 aa, synthetic construct
GGGGGG

SEQ ID NO: 12802 - protein, 6 aa, synthetic construct
GGGGGG

SEQ ID NO: 12803 - protein, 7 aa, synthetic construct
GGGGGGG

SEQ ID NO: 12804 - protein, 46 aa, synthetic construct; identical to SEQ ID NO: 5217

SEQ ID NO: 12805 - protein, 9 aa, synthetic construct
PAPGSSGGS

SEQ ID NO: 12806 - protein, 6 aa, synthetic construct
GGGGGS

SEQ ID NO: 12807 - protein, 8 aa, synthetic construct
EAAAKPAP

SEQ ID NO: 12808 - skipped

SEQ ID NO: 12809 - protein, 46 aa, synthetic construct; identical to SEQ ID NO: 5217

SEQ ID NO: 12810 - protein, 11 aa, synthetic construct
EAAAKGSSPAP

SEQ ID NO: 12811 - protein, 16 aa, synthetic construct
SGSETPGTSESATPES

SEQ ID NO: 12812 - protein, 11 aa, synthetic construct
GGSPAPEAAAK

SEQ ID NO: 12813 - protein, 12 aa, synthetic construct
GSSGSSGSSGSS

SEQ ID NO: 12814 - protein, 46 aa, synthetic construct; identical to SEQ ID NO: 5217

SEQ ID NO: 12815 - protein, 6 aa, synthetic construct
GGSPAP

SEQ ID NO: 12816 - protein, 11 aa, synthetic construct
GGGGGSEAAAK

SEQ ID NO: 12817 - protein, 5 aa, synthetic construct
GGGGG

SEQ ID NO: 12818 - protein, 8 aa, synthetic construct
GSSEAAAK

SEQ ID NO: 12819 - skipped

SEQ ID NO: 12820 - protein, 11 aa, synthetic construct
EAAAKGGSPAP

SEQ ID NO: 12821 - protein, 9 aa, synthetic construct
PAPAPAPAP

SEQ ID NO: 12822 - protein, 11 aa, synthetic construct
PAPGGGEAAAK

SEQ ID NO: 12823 - protein, 11 aa, synthetic construct
GGGGSSEAAAK

SEQ ID NO: 12824 - protein, 5 aa, synthetic construct
GGGGG

SEQ ID NO: 12825 - protein, 18 aa, synthetic construct
GGSGGSGGSGGSGGSGGS

SEQ ID NO: 12826 - protein, 5 aa, synthetic construct
GGGGG

SEQ ID NO: 12827 - protein, 11 aa, synthetic construct
PAPEAAAKGGG

SEQ ID NO: 12828 - protein, 9 aa, synthetic construct
GSSGGGPAP

SEQ ID NO: 12829 - protein, 18 aa, synthetic construct
GSSGSSGSSGSSGSSGSS

SEQ ID NO: 12830 - protein, 11 aa, synthetic construct
EAAAKGGSPAP

SEQ ID NO: 12831 - protein, 11 aa, synthetic construct
GSSGGSEAAAK

SEQ ID NO: 12832 - skipped

SEQ ID NO: 12833 - protein, 8 aa, synthetic construct
EAAAKGGS

SEQ ID NO: 12834 - protein, 9 aa, synthetic construct
GGGGGSPAP

SEQ ID NO: 12835 - protein, 8 aa, synthetic construct
EAAAKGSS

SEQ ID NO: 12836 - protein, 11 aa, synthetic construct
EAAAKGGGGSS

SEQ ID NO: 12837 - protein, 9 aa, synthetic construct
PAPGSSGGG

SEQ ID NO: 12838 - protein, 11 aa, synthetic construct
GGGGSSEAAAK

SEQ ID NO: 12839 - protein, 7 aa, synthetic construct
PAPAPAP

SEQ ID NO: 12840 - protein, 11 aa, synthetic construct
GSSGGSEAAAK

SEQ ID NO: 12841 - protein, 11 aa, synthetic construct
PAPEAAAKGSS

SEQ ID NO: 12842 - protein, 15 aa, synthetic construct
GGSGGSGGSGGSGGS

SEQ ID NO: 12843 - protein, 9 aa, synthetic construct
GGSGSSPAP

SEQ ID NO: 12844 - protein, 9 aa, synthetic construct
GGGGSSPAP

SEQ ID NO: 12845 - protein, 5 aa, synthetic construct
GGGGS

SEQ ID NO: 12846 - protein, 20 aa, synthetic construct
EAAAKEAAAKEAAAKEAAAK

SEQ ID NO: 12847 - protein, 10 aa, synthetic construct
EAAAKEAAAK

SEQ ID NO: 12848 - protein, 11 aa, synthetic construct
PAPGGGEAAAK

SEQ ID NO: 12849 - protein, 11 aa, synthetic construct
GSSGGSEAAAK

SEQ ID NO: 12850 - protein, 30 aa, synthetic construct; identical to SEQ ID NO: 5130

SEQ ID NO: 12851 - protein, 11 aa, synthetic construct
GSSEAAAKPAP

SEQ ID NO: 12852 - protein, 11 aa, synthetic construct
EAAAKPAPGSS

SEQ ID NO: 12853 - protein, 9 aa, synthetic construct
GSSGGSPAP

SEQ ID NO: 12854 - protein, 11 aa, synthetic construct
GSSEAAAKGGG

SEQ ID NO: 12855 - protein, 11 aa, synthetic construct
GGGEAAAKGGS

SEQ ID NO: 12856 - protein, 11 aa, synthetic construct
GSSEAAAKGGG

SEQ ID NO: 12857 - protein, 7 aa, synthetic construct
PAPAPAP

SEQ ID NO: 12858 - protein, 11 aa, synthetic construct
EAAAKGGSPAP

SEQ ID NO: 12859 - protein, 11 aa, synthetic construct
PAPGGSEAAAK

SEQ ID NO: 12860 - protein, 5 aa, synthetic construct
GGGGS

SEQ ID NO: 12861 - protein, 11 aa, synthetic construct
EAAAKGSSGGG

SEQ ID NO: 12862 - protein, 11 aa, synthetic construct
EAAAKGGGPAP

SEQ ID NO: 12863 - protein, 8 aa, synthetic construct
EAAAKGSS

SEQ ID NO: 12864 - protein, 9 aa, synthetic construct
GGSPAPGGG

SEQ ID NO: 12865 - protein, 15 aa, synthetic construct
GGGGSEAAAKGGGGS

SEQ ID NO: 12866 - protein, 11 aa, synthetic construct
GGGEAAAKGGS

SEQ ID NO: 12867 - protein, 11 aa, synthetic construct
EAAAKGGGGSS

SEQ ID NO: 12868 - protein, 11 aa, synthetic construct
EAAAKGGGPAP

SEQ ID NO: 12869 - protein, 6 aa, synthetic construct
GSSPAP

SEQ ID NO: 12870 - protein, 8 aa, synthetic construct
EAAAKGGS

SEQ ID NO: 12871 - protein, 6 aa, synthetic construct
GGGGSS

SEQ ID NO: 12872 - protein, 11 aa, synthetic construct
EAAAKGSSPAP

SEQ ID NO: 12873 - protein, 6 aa, synthetic construct
GGGPAP

SEQ ID NO: 12874 - protein, 11 aa, synthetic construct
EAAAKGSSGGS

SEQ ID NO: 12875 - protein, 6 aa, synthetic construct
PAPGGG

SEQ ID NO: 12876 - protein, 11 aa, synthetic construct
GSSPAPEAAAK

SEQ ID NO: 12877 - protein, 6 aa, synthetic construct
GGGPAP

SEQ ID NO: 12878 - protein, 9 aa, synthetic construct
GSSGGGGGS

SEQ ID NO: 12879 - protein, 16 aa, synthetic construct
SGSETPGTSESATPES

SEQ ID NO: 12880 - protein, 6 aa, synthetic construct
GGGPAP

SEQ ID NO: 12881 - protein, 11 aa, synthetic construct
EAAAKGGGGSS

SEQ ID NO: 12882 - protein, 9 aa, synthetic construct
GGGGSSPAP

SEQ ID NO: 12883 - protein, 15 aa, synthetic construct
GGGGSEAAAKGGGGS

SEQ ID NO: 12884 - protein, 6 aa, synthetic construct
GSSPAP

SEQ ID NO: 12885 - protein, 11 aa, synthetic construct
GGSGSSEAAAK

SEQ ID NO: 12886 - protein, 16 aa, synthetic construct
SGSETPGTSESATPES

SEQ ID NO: 12887 - protein, 6 aa, synthetic construct
PAPGGG

SEQ ID NO: 12888 - protein, 11 aa, synthetic construct
GGGEAAAKPAP

SEQ ID NO: 12889 - protein, 11 aa, synthetic construct
EAAAKGGSGSS

SEQ ID NO: 12890 - protein, 9 aa, synthetic construct
GGSPAPGGG

SEQ ID NO: 12891 - protein, 9 aa, synthetic construct
PAPGGSGSS

SEQ ID NO: 12892 - protein, 9 aa, synthetic construct
GSSGGSPAP

SEQ ID NO: 12893 - protein, 11 aa, synthetic construct
EAAAKGSSGGG

SEQ ID NO: 12894 - protein, 10 aa, synthetic construct
GGGGSGGGGS

SEQ ID NO: 12895 - protein, 9 aa, synthetic construct
GSSGGGGGS

SEQ ID NO: 12896 - protein, 9 aa, synthetic construct
GGGGSSGGS

SEQ ID NO: 12897 - protein, 8 aa, synthetic construct
EAAAKGGS

SEQ ID NO: 12898 - protein, 12 aa, synthetic construct
GSSGSSGSSGSS

SEQ ID NO: 12899 - skipped

SEQ ID NO: 12900 - protein, 11 aa, synthetic construct
GSSGGSEAAAK

SEQ ID NO: 12901 - protein, 33 aa, synthetic construct; identical to SEQ ID NO: 5006

SEQ ID NO: 12902 - protein, 5 aa, synthetic construct
GGGGG

SEQ ID NO: 12903 - protein, 11 aa, synthetic construct
PAPEAAAKGSS

SEQ ID NO: 12904 - protein, 6 aa, synthetic construct
GGGGGG

SEQ ID NO: 12905 - protein, 8 aa, synthetic construct
EAAAKGGG

SEQ ID NO: 12906 - protein, 6 aa, synthetic construct
GGGGSS

SEQ ID NO: 12907 - protein, 11 aa, synthetic construct
GSSGGGEAAAK

SEQ ID NO: 12908 - protein, 6 aa, synthetic construct
GGSGSS

SEQ ID NO: 12909 - protein, 8 aa, synthetic construct
EAAAKPAP

SEQ ID NO: 12910 - protein, 15 aa, synthetic construct
EAAAKEAAAKEAAAK

SEQ ID NO: 12911 - protein, 4 aa, synthetic construct
GGGG

SEQ ID NO: 12912 - protein, 9 aa, synthetic construct
GSSPAPGGS

SEQ ID NO: 12913 - protein, 9 aa, synthetic construct
GSSGGGGGS

SEQ ID NO: 12914 - protein, 9 aa, synthetic construct
GGGGSSGGS

SEQ ID NO: 12915 - skipped

SEQ ID NO: 12916 - protein, 5 aa, synthetic construct
GGGGG

SEQ ID NO: 12917 - protein, 18 aa, synthetic construct
GSSGSSGSSGSSGSSGSS

SEQ ID NO: 12918 - protein, 9 aa, synthetic construct
PAPGGGGSS

SEQ ID NO: 12919 - protein, 8 aa, synthetic construct
GGGGGGGG

SEQ ID NO: 12920 - protein, 16 aa, synthetic construct
SGSETPGTSESATPES

SEQ ID NO: 12921 - protein, 6 aa, synthetic construct
PAPGGG

SEQ ID NO: 12922 - protein, 9 aa, synthetic construct
GSSGSSGSS

SEQ ID NO: 12923 - protein, 6 aa, synthetic construct
GGSGSS

SEQ ID NO: 12924 - protein, 15 aa, synthetic construct
EAAAKGGGGSEAAAK

SEQ ID NO: 12925 - protein, 8 aa, synthetic construct
GGGGGGGG

SEQ ID NO: 12926 - protein, 6 aa, synthetic construct
GSSGSS

SEQ ID NO: 12927 - protein, 11 aa, synthetic construct
PAPEAAAKGGS

SEQ ID NO: 12928 - protein, 10 aa, synthetic construct
EAAAKEAAAK

SEQ ID NO: 12929 - protein, 15 aa, synthetic construct
GGGGSGGGGSGGGGS

SEQ ID NO: 12930 - protein, 11 aa, synthetic construct
EAAAKGSSPAP

SEQ ID NO: 12931 - protein, 11 aa, synthetic construct
GGGGSSEAAAK

SEQ ID NO: 12932 - protein, 11 aa, synthetic construct
GGGGSSEAAAK

SEQ ID NO: 12933 - protein, 9 aa, synthetic construct
PAPGGSGSS

SEQ ID NO: 12934 - protein, 11 aa, synthetic construct
GGSGGGEAAAK

SEQ ID NO: 12935 - protein, 11 aa, synthetic construct
PAPEAAAKGGS

SEQ ID NO: 12936 - protein, 9 aa, synthetic construct
GGGPAPGSS

SEQ ID NO: 12937 - protein, 9 aa, synthetic construct
PAPGGSGGG

SEQ ID NO: 12938 - protein, 8 aa, synthetic construct
GGGGGGGG

SEQ ID NO: 12939 - protein, 8 aa, synthetic construct
GSSEAAAK

SEQ ID NO: 12940 - protein, 15 aa, synthetic construct
GGGGSGGGGSGGGGS

SEQ ID NO: 12941 - protein, 8 aa, synthetic construct
EAAAKGGS

SEQ ID NO: 12942 - protein, 9 aa, synthetic construct
GGGGGSGSS

SEQ ID NO: 12943 - protein, 6 aa, synthetic construct
GGGPAP

SEQ ID NO: 12944 - protein, 11 aa, synthetic construct
EAAAKPAPGGG

SEQ ID NO: 12945 - protein, 9 aa, synthetic construct
GSSGGSPAP

SEQ ID NO: 12946 - protein, 33 aa, synthetic construct; identical to SEQ ID NO: 5006

SEQ ID NO: 12947 - protein, 9 aa, synthetic construct
PAPAPAPAP

SEQ ID NO: 12948 - protein, 6 aa, synthetic construct
GSSGGS

SEQ ID NO: 12949 - protein, 11 aa, synthetic construct
GSSEAAAKGGG

SEQ ID NO: 12950 - protein, 9 aa, synthetic construct
GGSGSSPAP

SEQ ID NO: 12951 - protein, 11 aa, synthetic construct
GSSEAAAKGGS

SEQ ID NO: 12952 - protein, 25 aa, synthetic construct
EAAAKEAAAKEAAAKEAAAKEAAAK

SEQ ID NO: 12953 - protein, 9 aa, synthetic construct
PAPGGGGSS

SEQ ID NO: 12954 - protein, 8 aa, synthetic construct
EAAAKGSS

SEQ ID NO: 12955 - protein, 46 aa, synthetic construct; identical to SEQ ID NO: 5217

SEQ ID NO: 12956 - protein, 18 aa, synthetic construct
GGSGGSGGSGGSGGSGGS

SEQ ID NO: 12957 - protein, 6 aa, synthetic construct
GGGGGG

SEQ ID NO: 12958 - protein, 8 aa, synthetic construct
PAPEAAAK

SEQ ID NO: 12959 - protein, 11 aa, synthetic construct
GGSGSSEAAAK

SEQ ID NO: 12960 - skipped

SEQ ID NO: 12961 - protein, 5 aa, synthetic construct
GGGGG

SEQ ID NO: 12962 - protein, 12 aa, synthetic construct
GGSGGSGGSGGS

SEQ ID NO: 12963 - protein, 18 aa, synthetic construct
GSSGSSGSSGSSGSSGSS

SEQ ID NO: 12964 - protein, 11 aa, synthetic construct
GSSEAAAKPAP

SEQ ID NO: 12965 - protein, 11 aa, synthetic construct
GGGEAAAKPAP

SEQ ID NO: 12966 - protein, 9 aa, synthetic construct
GSSGSSGSS

SEQ ID NO: 12967 - protein, 9 aa, synthetic construct
PAPAPAPAP

SEQ ID NO: 12968 - protein, 8 aa, synthetic construct
EAAAKGGG

SEQ ID NO: 12969 - protein, 13 aa, synthetic construct
PAPAPAPAPAPAP

SEQ ID NO: 12970 - protein, 11 aa, synthetic construct
EAAAKGGSGSS

SEQ ID NO: 12971 - protein, 6 aa, synthetic construct
GGGGGG

SEQ ID NO: 12972 - protein, 6 aa, synthetic construct
PAPGGG

SEQ ID NO: 12973 - protein, 9 aa, synthetic construct
GGGGGSGSS

SEQ ID NO: 12974 - protein, 20 aa, synthetic construct
GGGGSGGGGSGGGGSGGGGS

SEQ ID NO: 12975 - protein, 9 aa, synthetic construct
GGSGGSGGS

SEQ ID NO: 12976 - protein, 11 aa, synthetic construct
EAAAKPAPGGG

SEQ ID NO: 12977 - protein, 46 aa, synthetic construct; identical to SEQ ID NO: 5217

SEQ ID NO: 12978 - protein, 30 aa, synthetic construct; identical to SEQ ID NO: 5112

SEQ ID NO: 12979 - protein, 15 aa, synthetic construct
EAAAKGGGGSEAAAK

SEQ ID NO: 12980 - protein, 9 aa, synthetic construct
GGGPAPGSS

SEQ ID NO: 12981 - protein, 5 aa, synthetic construct
GGGGG

SEQ ID NO: 12982 - protein, 30 aa, synthetic construct; identical to SEQ ID NO: 5112

SEQ ID NO: 12983 - protein, 10 aa, synthetic construct
GGGGSGGGGS

SEQ ID NO: 12984 - protein, 11 aa, synthetic construct
EAAAKGGSPAP

SEQ ID NO: 12985 - protein, 11 aa, synthetic construct
EAAAKGSSPAP

SEQ ID NO: 12986 - protein, 9 aa, synthetic construct
PAPGGSGSS

SEQ ID NO: 12987-12988 - skipped (2 entries)

SEQ ID NO: 12989 - protein, 9 aa, synthetic construct
GGGPAPGSS

SEQ ID NO: 12990 - protein, 8 aa, synthetic construct
EAAAKPAP

SEQ ID NO: 12991 - protein, 11 aa, synthetic construct
GSSPAPEAAAK

SEQ ID NO: 12992 - protein, 9 aa, synthetic construct
GGSPAPGSS

SEQ ID NO: 12993 - protein, 11 aa, synthetic construct
GGGGGSEAAAK

SEQ ID NO: 12994 - protein, 11 aa, synthetic construct
PAPEAAAKGGG

SEQ ID NO: 12995 - protein, 6 aa, synthetic construct
PAPGGG

SEQ ID NO: 12996 - protein, 11 aa, synthetic construct
GGSPAPEAAAK

SEQ ID NO: 12997 - protein, 9 aa, synthetic construct
GGSGGGGSS

SEQ ID NO: 12998 - protein, 11 aa, synthetic construct
EAAAKGGGGSS

SEQ ID NO: 12999 - protein, 11 aa, synthetic construct
EAAAKGGSPAP

SEQ ID NO: 13000 - protein, 9 aa, synthetic construct
GGSGGGGSS

SEQ ID NO: 13001 - protein, 11 aa, synthetic construct
PAPGSSEAAAK

SEQ ID NO: 13002 - protein, 8 aa, synthetic construct
GSSEAAAK

SEQ ID NO: 13003 - protein, 12 aa, synthetic construct
GSAGSAAGSGEF

SEQ ID NO: 13004 - protein, 11 aa, synthetic construct
EAAAKGGSGSS

SEQ ID NO: 13005 - protein, 11 aa, synthetic construct
GGSEAAAKPAP

SEQ ID NO: 13006 - protein, 25 aa, synthetic construct
GGGGSGGGGSGGGGSGGGGSGGGGS

SEQ ID NO: 13007 - protein, 11 aa, synthetic construct
PAPGSSEAAAK

SEQ ID NO: 13008 - protein, 9 aa, synthetic construct
GGGGSSPAP

SEQ ID NO: 13009 - protein, 7 aa, synthetic construct
PAPAPAP

SEQ ID NO: 13010 - protein, 11 aa, synthetic construct
EAAAKPAPGGG

SEQ ID NO: 13011 - protein, 9 aa, synthetic construct
GGGPAPGSS

SEQ ID NO: 13012 - skipped

SEQ ID NO: 13013 - protein, 9 aa, synthetic construct
PAPGGSGGG

SEQ ID NO: 13014 - protein, 15 aa, synthetic construct
GGSGGSGGSGGSGGS

SEQ ID NO: 13015 - protein, 9 aa, synthetic construct
PAPAPAPAP

SEQ ID NO: 13016 - protein, 9 aa, synthetic construct
GSSPAPGGG

SEQ ID NO: 13017 - protein, 9 aa, synthetic construct
GSSPAPGGG

SEQ ID NO: 13018 - protein, 6 aa, synthetic construct
PAPGGG

SEQ ID NO: 13019 - protein, 11 aa, synthetic construct
GGGEAAAKGSS

SEQ ID NO: 13020 - protein, 8 aa, synthetic construct
EAAAKGSS

SEQ ID NO: 13021 - protein, 8 aa, synthetic construct
EAAAKGGS

SEQ ID NO: 13022 - protein, 25 aa, synthetic construct
EAAAKEAAAKEAAAKEAAAKEAAAK

SEQ ID NO: 13023 - protein, 11 aa, synthetic construct
PAPEAAAKGGG

SEQ ID NO: 13024 - protein, 11 aa, synthetic construct
EAAAKGSSGGG

SEQ ID NO: 13025 - protein, 46 aa, synthetic construct; identical to SEQ ID NO: 5217

SEQ ID NO: 13026 - protein, 30 aa, synthetic construct; identical to SEQ ID NO: 5130

SEQ ID NO: 13027 - protein, 9 aa, synthetic construct
GSSGGSGGG

SEQ ID NO: 13028 - protein, 12 aa, synthetic construct
GSSGSSGSSGSS

SEQ ID NO: 13029 - protein, 9 aa, synthetic construct
GGSPAPGGG

SEQ ID NO: 13030 - skipped

SEQ ID NO: 13031 - protein, 9 aa, synthetic construct
GGGPAPGSS

SEQ ID NO: 13032 - protein, 6 aa, synthetic construct
GGGGSS

SEQ ID NO: 13033 - protein, 9 aa, synthetic construct
GSSGGSGGG

SEQ ID NO: 13034 - protein, 15 aa, synthetic construct
EAAAKEAAAKEAAAK

SEQ ID NO: 13035 - protein, 33 aa, synthetic construct; identical to SEQ ID NO: 5006

SEQ ID NO: 13036 - protein, 9 aa, synthetic construct
PAPGGGGGS

SEQ ID NO: 13037 - protein, 11 aa, synthetic construct
PAPAPAPAPAP

SEQ ID NO: 13038 - protein, 5 aa, synthetic construct
EAAAK

SEQ ID NO: 13039 - skipped

SEQ ID NO: 13040 - protein, 11 aa, synthetic construct
GGSEAAAKGGG

SEQ ID NO: 13041 - protein, 9 aa, synthetic construct
GGGGGSGSS

SEQ ID NO: 13042 - protein, 11 aa, synthetic construct
EAAAKGSSPAP

SEQ ID NO: 13043 - protein, 9 aa, synthetic construct
GGSGGSGGS

SEQ ID NO: 13044 - protein, 11 aa, synthetic construct
EAAAKPAPGGG

SEQ ID NO: 13045 - protein, 11 aa, synthetic construct
GGGPAPEAAAK

SEQ ID NO: 13046 - protein, 11 aa, synthetic construct
GGSPAPEAAAK

SEQ ID NO: 13047 - protein, 15 aa, synthetic construct
GGSGGSGGSGGSGGS

SEQ ID NO: 13048 - protein, 11 aa, synthetic construct
EAAAKGGSGSS

SEQ ID NO: 13049 - protein, 11 aa, synthetic construct
GGGEAAAKGGS

SEQ ID NO: 13050 - protein, 9 aa, synthetic construct
PAPAPAPAP

SEQ ID NO: 13051 - protein, 20 aa, synthetic construct
EAAAKEAAAKEAAAKEAAAK

SEQ ID NO: 13052 - protein, 8 aa, synthetic construct
EAAAKPAP

SEQ ID NO: 13053 - protein, 10 aa, synthetic construct
EAAAKEAAAK

SEQ ID NO: 13054 - protein, 8 aa, synthetic construct
EAAAKGGG

SEQ ID NO: 13055 - protein, 8 aa, synthetic construct
EAAAKGSS

SEQ ID NO: 13056 - protein, 30 aa, synthetic construct; identical to SEQ ID NO: 5130

SEQ ID NO: 13057 - protein, 9 aa, synthetic construct
GGGPAPGSS

SEQ ID NO: 13058 - protein, 4 aa, synthetic construct
GGGG

SEQ ID NO: 13059 - protein, 11 aa, synthetic construct
EAAAKGGSGSS

SEQ ID NO: 13060 - protein, 15 aa, synthetic construct
GGGGSGGGGSGGGGS

SEQ ID NO: 13061 - protein, 5 aa, synthetic construct
EAAAK

SEQ ID NO: 13062 - protein, 6 aa, synthetic construct
GGGGSS

SEQ ID NO: 13063 - protein, 11 aa, synthetic construct
PAPEAAAKGGS

SEQ ID NO: 13064 - skipped

SEQ ID NO: 13065 - protein, 12 aa, synthetic construct
GSAGSAAGSGEF

SEQ ID NO: 13066 - protein, 30 aa, synthetic construct; identical to SEQ ID NO: 5130

SEQ ID NO: 13067 - protein, 10 aa, synthetic construct
GGGGSGGGGS

SEQ ID NO: 13068 - protein, 5 aa, synthetic construct
EAAAK

SEQ ID NO: 13069 - protein, 9 aa, synthetic construct
GGGPAPGGS

SEQ ID NO: 13070 - protein, 15 aa, synthetic construct
GGGGSGGGGSGGGGS

SEQ ID NO: 13071 - protein, 6 aa, synthetic construct
PAPGGG

SEQ ID NO: 13072 - protein, 11 aa, synthetic construct
GGGEAAAKPAP

SEQ ID NO: 13073 - protein, 11 aa, synthetic construct
EAAAKPAPGSS

SEQ ID NO: 13074 - protein, 6 aa, synthetic construct
PAPGSS

SEQ ID NO: 13075 - protein, 12 aa, synthetic construct
GSAGSAAGSGEF

SEQ ID NO: 13076 - protein, 9 aa, synthetic construct
PAPGGGGSS

SEQ ID NO: 13077 - protein, 11 aa, synthetic construct
GSSGGGEAAAK

SEQ ID NO: 13078 - skipped

SEQ ID NO: 13079 - protein, 12 aa, synthetic construct
GSSGSSGSSGSS

SEQ ID NO: 13080 - protein, 11 aa, synthetic construct
PAPEAAAKGGG

SEQ ID NO: 13081 - protein, 11 aa, synthetic construct
GGGPAPEAAAK

SEQ ID NO: 13082 - protein, 9 aa, synthetic construct
PAPGGGGGS

SEQ ID NO: 13083 - protein, 20 aa, synthetic construct
EAAAKEAAAKEAAAKEAAAK

SEQ ID NO: 13084 - protein, 9 aa, synthetic construct
GGGGGSPAP

SEQ ID NO: 13085 - protein, 15 aa, synthetic construct
GSSGSSGSSGSSGSS

SEQ ID NO: 13086 - protein, 11 aa, synthetic construct
GSSPAPEAAAK

SEQ ID NO: 13087 - protein, 18 aa, synthetic construct
GSSGSSGSSGSSGSSGSS

SEQ ID NO: 13088 - protein, 18 aa, synthetic construct
GSSGSSGSSGSSGSSGSS

SEQ ID NO: 13089 - protein, 11 aa, synthetic construct
GGSPAPEAAAK

SEQ ID NO: 13090 - protein, 6 aa, synthetic construct
GSSGGG

SEQ ID NO: 13091 - protein, 11 aa, synthetic construct
EAAAKGSSGGS

SEQ ID NO: 13092 - protein, 11 aa, synthetic construct
GGSGSSEAAAK

SEQ ID NO: 13093 - protein, 11 aa, synthetic construct
GGGPAPEAAAK

SEQ ID NO: 13094 - protein, 9 aa, synthetic construct
GGGPAPGGS

SEQ ID NO: 13095 - protein, 5 aa, synthetic construct
GGGGG

SEQ ID NO: 13096 - protein, 11 aa, synthetic construct
GGGEAAAKPAP

SEQ ID NO: 13097 - protein, 10 aa, synthetic construct
GGGGSGGGGS

SEQ ID NO: 13098 - protein, 11 aa, synthetic construct
GGGPAPEAAAK

SEQ ID NO: 13099 - protein, 11 aa, synthetic construct
GGSGSSEAAAK

SEQ ID NO: 13100 - protein, 11 aa, synthetic construct
EAAAKGGGPAP

SEQ ID NO: 13101 - protein, 15 aa, synthetic construct
GSSGSSGSSGSSGSS

SEQ ID NO: 13102 - protein, 5 aa, synthetic construct
PAPAP

SEQ ID NO: 13103 - protein, 9 aa, synthetic construct
GGSPAPGSS

SEQ ID NO: 13104 - protein, 9 aa, synthetic construct
GGSGGGPAP

SEQ ID NO: 13105 - protein, 6 aa, synthetic construct
GGSPAP

SEQ ID NO: 13106 - protein, 11 aa, synthetic construct
EAAAKGGSPAP

SEQ ID NO: 13107 - protein, 9 aa, synthetic construct
GSSPAPGGG

SEQ ID NO: 13108 - protein, 12 aa, synthetic construct
GSAGSAAGSGEF

SEQ ID NO: 13109 - protein, 6 aa, synthetic construct
GGSPAP

SEQ ID NO: 13110 - protein, 6 aa, synthetic construct
GSSGSS

SEQ ID NO: 13111 - protein, 9 aa, synthetic construct
GGGPAPGSS

SEQ ID NO: 13112 - protein, 46 aa, synthetic construct; identical to SEQ ID NO: 5217

SEQ ID NO: 13113 - protein, 9 aa, synthetic construct
PAPGSSGGG

SEQ ID NO: 13114 - protein, 11 aa, synthetic construct
GGSEAAAKPAP

SEQ ID NO: 13115 - protein, 6 aa, synthetic construct
GGGGGS

SEQ ID NO: 13116 - protein, 11 aa, synthetic construct
PAPEAAAKGGS

SEQ ID NO: 13117 - protein, 30 aa, synthetic construct; identical to SEQ ID NO: 5130

SEQ ID NO: 13118 - protein, 8 aa, synthetic construct
GGSEAAAK

SEQ ID NO: 13119 - protein, 11 aa, synthetic construct
GSSPAPEAAAK

SEQ ID NO: 13120 - protein, 6 aa, synthetic construct
PAPGGG

SEQ ID NO: 13121 - protein, 8 aa, synthetic construct
EAAAKPAP

SEQ ID NO: 13122 - protein, 15 aa, synthetic construct
GSSGSSGSSGSSGSS

SEQ ID NO: 13123 - protein, 6 aa, synthetic construct
PAPGGG

SEQ ID NO: 13124 - protein, 11 aa, synthetic construct
GGSGGGEAAAK

SEQ ID NO: 13125 - protein, 6 aa, synthetic construct
PAPGGS

SEQ ID NO: 13126 - protein, 12 aa, synthetic construct
GGSGGSGGSGGS

SEQ ID NO: 13127 - protein, 20 aa, synthetic construct
EAAAKEAAAKEAAAKEAAAK

SEQ ID NO: 13128 - protein, 11 aa, synthetic construct
GGSEAAAKGGG

SEQ ID NO: 13129 - protein, 6 aa, synthetic construct
GGGPAP

SEQ ID NO: 13130 - protein, 30 aa, synthetic construct; identical to SEQ ID NO: 5112

SEQ ID NO: 13131 - protein, 9 aa, synthetic construct
GGSPAPGSS

SEQ ID NO: 13132 - protein, 9 aa, synthetic construct
GGGPAPGSS

SEQ ID NO: 13133 - protein, 9 aa, synthetic construct
GGGGSSGGS

SEQ ID NO: 13134 - protein, 11 aa, synthetic construct
GGGEAAAKGSS

SEQ ID NO: 13135 - protein, 5 aa, synthetic construct
PAPAP

SEQ ID NO: 13136 - protein, 9 aa, synthetic construct
GGSPAPGGG

SEQ ID NO: 13137 - protein, 6 aa, synthetic construct
PAPGSS

SEQ ID NO: 13138 - protein, 9 aa, synthetic construct
GSSGGSPAP

SEQ ID NO: 13139 - protein, 15 aa, synthetic construct
EAAAKGGGGSEAAAK

SEQ ID NO: 13140 - protein, 11 aa, synthetic construct
GSSEAAAKGGS

SEQ ID NO: 13141 - protein, 9 aa, synthetic construct
PAPAPAPAP

SEQ ID NO: 13142 - protein, 11 aa, synthetic construct
GGSEAAAKPAP

SEQ ID NO: 13143 - protein, 6 aa, synthetic construct
PAPGGS

SEQ ID NO: 13144 - protein, 11 aa, synthetic construct
EAAAKGGGPAP

SEQ ID NO: 13145 - protein, 9 aa, synthetic construct
GGSGSSGGG

SEQ ID NO: 13146 - protein, 11 aa, synthetic construct
EAAAKGGSGSS

SEQ ID NO: 13147 - protein, 33 aa, synthetic construct; identical to SEQ ID NO: 5006

SEQ ID NO: 13148 - protein, 11 aa, synthetic construct
GSSEAAAKGGS

SEQ ID NO: 13149 - protein, 5 aa, synthetic construct
GGGGG

SEQ ID NO: 13150 - protein, 30 aa, synthetic construct; identical to SEQ ID NO: 5112

SEQ ID NO: 13151 - protein, 11 aa, synthetic construct
GGGEAAAKGSS

SEQ ID NO: 13152 - protein, 15 aa, synthetic construct
EAAAKGGGGSEAAAK

SEQ ID NO: 13153 - protein, 8 aa, synthetic construct
EAAAKGGG

SEQ ID NO: 13154 - protein, 6 aa, synthetic construct
GGSGGG

SEQ ID NO: 13155 - protein, 9 aa, synthetic construct
GGSGSSGGG

SEQ ID NO: 13156 - protein, 30 aa, synthetic construct; identical to SEQ ID NO: 5112

SEQ ID NO: 13157 - protein, 15 aa, synthetic construct
GGGGSEAAAKGGGGS

SEQ ID NO: 13158 - protein, 11 aa, synthetic construct
PAPAPAPAPAP

SEQ ID NO: 13159 - skipped

SEQ ID NO: 13160 - protein, 11 aa, synthetic construct
GGGGGSEAAAK

SEQ ID NO: 13161 - protein, 15 aa, synthetic construct
GSSGSSGSSGSSGSS

SEQ ID NO: 13162 - protein, 25 aa, synthetic construct
EAAAKEAAAKEAAAKEAAAKEAAAK

SEQ ID NO: 13163 - protein, 9 aa, synthetic construct
GGSGSSGGG

SEQ ID NO: 13164 - skipped

SEQ ID NO: 13165 - protein, 11 aa, synthetic construct
GSSPAPEAAAK

SEQ ID NO: 13166 - protein, 11 aa, synthetic construct
EAAAKGGGGSS

SEQ ID NO: 13167 - protein, 11 aa, synthetic construct
GGGEAAAKGGS

SEQ ID NO: 13168 - protein, 9 aa, synthetic construct
GGSGGGPAP

SEQ ID NO: 13169 - protein, 12 aa, synthetic construct
GSAGSAAGSGEF

SEQ ID NO: 13170 - protein, 8 aa, synthetic construct
GSSEAAAK

SEQ ID NO: 13171 - protein, 6 aa, synthetic construct
PAPGSS

SEQ ID NO: 13172 - protein, 15 aa, synthetic construct
EAAAKEAAAKEAAAK

SEQ ID NO: 13173 - protein, 12 aa, synthetic construct
GSAGSAAGSGEF

SEQ ID NO: 13174 - protein, 12 aa, synthetic construct
GSSGSSGSSGSS

SEQ ID NO: 13175 - protein, 46 aa, synthetic construct; identical to SEQ ID NO: 5217

SEQ ID NO: 13176 - protein, 11 aa, synthetic construct
GGGGSSEAAAK

SEQ ID NO: 13177 - protein, 11 aa, synthetic construct
GSSGGGEAAAK

SEQ ID NO: 13178 - protein, 8 aa, synthetic construct
EAAAKPAP

SEQ ID NO: 13179 - protein, 9 aa, synthetic construct
GGSPAPGGG

SEQ ID NO: 13180 - protein, 8 aa, synthetic construct
PAPEAAAK

SEQ ID NO: 13181 - protein, 9 aa, synthetic construct
GSSGSSGSS

SEQ ID NO: 13182 - protein, 11 aa, synthetic construct
GSSGGGEAAAK

SEQ ID NO: 13183 - protein, 6 aa, synthetic construct
GGSPAP

SEQ ID NO: 13184 - protein, 12 aa, synthetic construct
GSAGSAAGSGEF

SEQ ID NO: 13185 - protein, 11 aa, synthetic construct
PAPGGSEAAAK

SEQ ID NO: 13186 - protein, 11 aa, synthetic construct
GGSPAPEAAAK

SEQ ID NO: 13187 - protein, 9 aa, synthetic construct
GGGGGSPAP

SEQ ID NO: 13188 - protein, 11 aa, synthetic construct
EAAAKGSSPAP

SEQ ID NO: 13189 - protein, 11 aa, synthetic construct
EAAAKGGGPAP

SEQ ID NO: 13190 - protein, 6 aa, synthetic construct
PAPGSS

SEQ ID NO: 13191 - protein, 9 aa, synthetic construct
GGSGSSGGG

SEQ ID NO: 13192 - protein, 33 aa, synthetic construct; identical to SEQ ID NO: 5006

SEQ ID NO: 13193 - protein, 18 aa, synthetic construct
GGSGGSGGSGGSGGSGGS

SEQ ID NO: 13194 - protein, 9 aa, synthetic construct
GGSGGSGGS

SEQ ID NO: 13195 - protein, 5 aa, synthetic construct
GGGGG

SEQ ID NO: 13196 - protein, 6 aa, synthetic construct
GGGPAP

SEQ ID NO: 13197 - protein, 9 aa, synthetic construct
PAPGGSGGG

SEQ ID NO: 13198 - protein, 15 aa, synthetic construct
GGGGSEAAAKGGGGS

SEQ ID NO: 13199 - protein, 11 aa, synthetic construct
EAAAKGSSGGG

SEQ ID NO: 13200 - protein, 11 aa, synthetic construct
GSSGGSEAAAK

SEQ ID NO: 13201 - protein, 11 aa, synthetic construct
EAAAKGGSGSS

SEQ ID NO: 13202 - protein, 11 aa, synthetic construct
PAPAPAPAPAP

SEQ ID NO: 13203 - protein, 30 aa, synthetic construct; identical to SEQ ID NO: 5112

SEQ ID NO: 13204 - protein, 7 aa, synthetic construct
GGGGGGG

SEQ ID NO: 13205 - protein, 5 aa, synthetic construct
EAAAK

SEQ ID NO: 13206 - protein, 11 aa, synthetic construct
GGGEAAAKGGS

SEQ ID NO: 13207 - protein, 11 aa, synthetic construct
GGGEAAAKGGS

SEQ ID NO: 13208 - protein, 9 aa, synthetic construct
GGGGGSPAP

SEQ ID NO: 13209 - protein, 20 aa, synthetic construct
GGGGSGGGGSGGGGSGGGGS

SEQ ID NO: 13210 - protein, 7 aa, synthetic construct
GGGGGGG

SEQ ID NO: 13211 - protein, 13 aa, synthetic construct
PAPAPAPAPAPAP

SEQ ID NO: 13212 - protein, 9 aa, synthetic construct
GSSPAPGGG

SEQ ID NO: 13213 - protein, 9 aa, synthetic construct
GGGGGSPAP

SEQ ID NO: 13214 - protein, 15 aa, synthetic construct
GGGGSGGGGSGGGGS

SEQ ID NO: 13215 - protein, 15 aa, synthetic construct
GGGGSGGGGSGGGGS

SEQ ID NO: 13216 - protein, 11 aa, synthetic construct
GSSEAAAKGGS

SEQ ID NO: 13217 - protein, 15 aa, synthetic construct
GSSGSSGSSGSSGSS

SEQ ID NO: 13218 - protein, 11 aa, synthetic construct
EAAAKGGGGGS

SEQ ID NO: 13219 - protein, 9 aa, synthetic construct
GSSGGGGGS

SEQ ID NO: 13220 - protein, 11 aa, synthetic construct
GGGEAAAKPAP

SEQ ID NO: 13221 - protein, 9 aa, synthetic construct
GSSGGSPAP

SEQ ID NO: 13222 - protein, 9 aa, synthetic construct
GSSGGGPAP

SEQ ID NO: 13223 - protein, 9 aa, synthetic construct
GGGGGSGSS

SEQ ID NO: 13224 - protein, 46 aa, synthetic construct; identical to SEQ ID NO: 5217

SEQ ID NO: 13225 - protein, 8 aa, synthetic construct
PAPEAAAK

SEQ ID NO: 13226 - protein, 15 aa, synthetic construct
GGGGSGGGGSGGGGS

SEQ ID NO: 13227 - protein, 9 aa, synthetic construct
GGSGSSGGG

SEQ ID NO: 13228 - protein, 8 aa, synthetic construct
EAAAKGGS

SEQ ID NO: 13229 - protein, 11 aa, synthetic construct
EAAAKGSSPAP

SEQ ID NO: 13230 - protein, 11 aa, synthetic construct
EAAAKGGSGSS

SEQ ID NO: 13231 - protein, 6 aa, synthetic construct
GSSGSS

SEQ ID NO: 13232 - protein, 9 aa, synthetic construct
PAPAPAPAP

SEQ ID NO: 13233 - protein, 6 aa, synthetic construct
GGSGGG

SEQ ID NO: 13234-13235 - skipped (2 entries)

SEQ ID NO: 13236 - protein, 11 aa, synthetic construct
GGSGSSEAAAK

SEQ ID NO: 13237 - protein, 11 aa, synthetic construct
PAPEAAAKGSS

SEQ ID NO: 13238 - protein, 6 aa, synthetic construct
GGSGGS

SEQ ID NO: 13239 - protein, 7 aa, synthetic construct
GGGGGGG

SEQ ID NO: 13240 - protein, 11 aa, synthetic construct
GGSPAPEAAAK

SEQ ID NO: 13241 - protein, 30 aa, synthetic construct; identical to SEQ ID NO: 5130

SEQ ID NO: 13242 - protein, 6 aa, synthetic construct
GGSPAP

SEQ ID NO: 13243 - protein, 11 aa, synthetic construct
GGSEAAAKGGG

SEQ ID NO: 13244 - protein, 10 aa, synthetic construct
GGGGSGGGGS

SEQ ID NO: 13245 - protein, 8 aa, synthetic construct
GGGEAAAK

SEQ ID NO: 13246 - protein, 30 aa, synthetic construct; identical to SEQ ID NO: 5112

SEQ ID NO: 13247 - protein, 11 aa, synthetic construct
GGSEAAAKPAP

SEQ ID NO: 13248 - protein, 11 aa, synthetic construct
GSSGGGEAAAK

SEQ ID NO: 13249 - protein, 11 aa, synthetic construct
GGGGGSEAAAK

SEQ ID NO: 13250 - protein, 11 aa, synthetic construct
EAAAKGGSGGG

SEQ ID NO: 13251 - protein, 9 aa, synthetic construct
GGGGSSPAP

SEQ ID NO: 13252 - protein, 10 aa, synthetic construct
EAAAKEAAAK

SEQ ID NO: 13253 - protein, 46 aa, synthetic construct; identical to SEQ ID NO: 5217

SEQ ID NO: 13254 - protein, 15 aa, synthetic construct
GSSGSSGSSGSSGSS

SEQ ID NO: 13255 - protein, 6 aa, synthetic construct
GSSGGG

SEQ ID NO: 13256 - protein, 6 aa, synthetic construct
GSSGGS

SEQ ID NO: 13257 - protein, 10 aa, synthetic construct
GGGGSGGGGS

SEQ ID NO: 13258 - protein, 6 aa, synthetic construct
PAPGSS

SEQ ID NO: 13259 - protein, 11 aa, synthetic construct
GGGPAPEAAAK

SEQ ID NO: 13260 - protein, 8 aa, synthetic construct
EAAAKGGS

SEQ ID NO: 13261 - skipped

SEQ ID NO: 13262 - protein, 4 aa, synthetic construct
GGGG

SEQ ID NO: 13263 - protein, 11 aa, synthetic construct
GGGGGSEAAAK

SEQ ID NO: 13264 - protein, 15 aa, synthetic construct
GSSGSSGSSGSSGSS

SEQ ID NO: 13265 - protein, 9 aa, synthetic construct
PAPGGSGGG

SEQ ID NO: 13266 - protein, 6 aa, synthetic construct
GGGPAP

SEQ ID NO: 13267 - protein, 11 aa, synthetic construct
GGGPAPEAAAK

SEQ ID NO: 13268 - protein, 8 aa, synthetic construct
GGGEAAAK

SEQ ID NO: 13269 - skipped

SEQ ID NO: 13270 - protein, 11 aa, synthetic construct
EAAAKPAPGSS

SEQ ID NO: 13271 - protein, 11 aa, synthetic construct
GGSGSSEAAAK

SEQ ID NO: 13272 - protein, 8 aa, synthetic construct
EAAAKGSS

SEQ ID NO: 13273 - protein, 11 aa, synthetic construct
GGSGSSEAAAK

SEQ ID NO: 13274 - protein, 6 aa, synthetic construct
GGSGGG

SEQ ID NO: 13275 - protein, 6 aa, synthetic construct
GGGPAP

SEQ ID NO: 13276 - protein, 9 aa, synthetic construct
GGSPAPGGG

SEQ ID NO: 13277 - protein, 11 aa, synthetic construct
GGGGGSEAAAK

SEQ ID NO: 13278 - protein, 11 aa, synthetic construct
EAAAKGSSGGS

SEQ ID NO: 13279 - protein, 5 aa, synthetic construct
PAPAP

SEQ ID NO: 13280 - protein, 9 aa, synthetic construct
GSSPAPGGS

SEQ ID NO: 13281 - protein, 11 aa, synthetic construct
GSSEAAAKGGG

SEQ ID NO: 13282 - protein, 11 aa, synthetic construct
EAAAKGGGGGS

SEQ ID NO: 13283 - protein, 15 aa, synthetic construct
GSSGSSGSSGSSGSS

SEQ ID NO: 13284 - protein, 11 aa, synthetic construct
EAAAKGGGGSS

SEQ ID NO: 13285 - protein, 8 aa, synthetic construct
EAAAKGSS

SEQ ID NO: 13286 - protein, 30 aa, synthetic construct; identical to SEQ ID NO: 5130

SEQ ID NO: 13287 - protein, 8 aa, synthetic construct
EAAAKGGS

SEQ ID NO: 13288 - protein, 11 aa, synthetic construct
GSSGGSEAAAK

SEQ ID NO: 13289 - protein, 11 aa, synthetic construct
EAAAKPAPGGS

SEQ ID NO: 13290 - protein, 6 aa, synthetic construct
GGSGGS

SEQ ID NO: 13291 - protein, 11 aa, synthetic construct
EAAAKGSSGGG

SEQ ID NO: 13292 - protein, 12 aa, synthetic construct
GGSGGSGGSGGS

SEQ ID NO: 13293 - protein, 8 aa, synthetic construct
GGGGGGGG

SEQ ID NO: 13294 - protein, 11 aa, synthetic construct
GGSGSSEAAAK

SEQ ID NO: 13295 - protein, 8 aa, synthetic construct
EAAAKGGG

SEQ ID NO: 13296 - protein, 15 aa, synthetic construct
GGGGSGGGGSGGGGS

SEQ ID NO: 13297 - protein, 12 aa, synthetic construct
GGSGGSGGSGGS

SEQ ID NO: 13298 - protein, 11 aa, synthetic construct
PAPAPAPAPAP

SEQ ID NO: 13299 - protein, 20 aa, synthetic construct
EAAAKEAAAKEAAAKEAAAK

SEQ ID NO: 13300 - protein, 9 aa, synthetic construct
GGSGGSGGS

SEQ ID NO: 13301 - protein, 9 aa, synthetic construct
PAPGGGGSS

SEQ ID NO: 13302 - protein, 11 aa, synthetic construct
GSSEAAAKGGS

SEQ ID NO: 13303 - protein, 9 aa, synthetic construct
GSSGGGPAP

SEQ ID NO: 13304 - protein, 6 aa, synthetic construct
GGSGSS

SEQ ID NO: 13305 - protein, 11 aa, synthetic construct
GGGGGSEAAAK

SEQ ID NO: 13306 - protein, 8 aa, synthetic construct
GSSEAAAK

SEQ ID NO: 13307 - protein, 9 aa, synthetic construct
GGGGGSGSS

SEQ ID NO: 13308 - protein, 11 aa, synthetic construct
EAAAKGGSGSS

SEQ ID NO: 13309 - skipped

SEQ ID NO: 13310 - protein, 5 aa, synthetic construct
GGGGG

SEQ ID NO: 13311 - protein, 5 aa, synthetic construct
EAAAK

SEQ ID NO: 13312 - skipped

SEQ ID NO: 13313 - protein, 13 aa, synthetic construct
PAPAPAPAPAPAP

SEQ ID NO: 13314 - protein, 20 aa, synthetic construct
EAAAKEAAAKEAAAKEAAAK

SEQ ID NO: 13315 - protein, 15 aa, synthetic construct
EAAAKGGGGSEAAAK

SEQ ID NO: 13316 - protein, 9 aa, synthetic construct
PAPGGSGGG

SEQ ID NO: 13317 - protein, 9 aa, synthetic construct
GGSGGGPAP

SEQ ID NO: 13318 - protein, 11 aa, synthetic construct
GGGGSSEAAAK

SEQ ID NO: 13319 - protein, 9 aa, synthetic construct
PAPGGGGSS

SEQ ID NO: 13320 - protein, 12 aa, synthetic construct
GGSGGSGGSGGS

SEQ ID NO: 13321 - protein, 9 aa, synthetic construct
PAPGGSGGG

SEQ ID NO: 13322 - protein, 9 aa, synthetic construct
GSSPAPGGS

SEQ ID NO: 13323 - protein, 9 aa, synthetic construct
GSSGSSGSS

SEQ ID NO: 13324 - protein, 9 aa, synthetic construct
PAPGGGGGS

SEQ ID NO: 13325 - protein, 6 aa, synthetic construct
GSSPAP

SEQ ID NO: 13326 - protein, 6 aa, synthetic construct
GGSGGG

SEQ ID NO: 13327 - protein, 15 aa, synthetic construct
EAAAKGGGGSEAAAK

SEQ ID NO: 13328 - protein, 11 aa, synthetic construct
GGSPAPEAAAK

SEQ ID NO: 13329 - protein, 8 aa, synthetic construct
EAAAKPAP

SEQ ID NO: 13330 - protein, 30 aa, synthetic construct; identical to SEQ ID NO: 5112

SEQ ID NO: 13331 - protein, 11 aa, synthetic construct
EAAAKGGGGSS

SEQ ID NO: 13332 - protein, 10 aa, synthetic construct
EAAAKEAAAK

SEQ ID NO: 13333 - protein, 11 aa, synthetic construct
GSSEAAAKGGS

SEQ ID NO: 13334 - protein, 6 aa, synthetic construct
GGSPAP

SEQ ID NO: 13335 - protein, 20 aa, synthetic construct
EAAAKEAAAKEAAAKEAAAK

SEQ ID NO: 13336 - protein, 15 aa, synthetic construct
GSSGSSGSSGSSGSS

SEQ ID NO: 13337 - protein, 8 aa, synthetic construct
PAPEAAAK

SEQ ID NO: 13338 - protein, 9 aa, synthetic construct
GSSGGSPAP

SEQ ID NO: 13339 - protein, 9 aa, synthetic construct
GGGPAPGGS

SEQ ID NO: 13340 - protein, 11 aa, synthetic construct
EAAAKPAPGGS

SEQ ID NO: 13341 - protein, 10 aa, synthetic construct
GGGGSGGGGS

SEQ ID NO: 13342 - protein, 8 aa, synthetic construct
GGGEAAAK

SEQ ID NO: 13343 - protein, 11 aa, synthetic construct
EAAAKGGGGGS

SEQ ID NO: 13344 - protein, 9 aa, synthetic construct
GGSPAPGSS

SEQ ID NO: 13345 - protein, 11 aa, synthetic construct
GSSPAPEAAAK

SEQ ID NO: 13346 - protein, 12 aa, synthetic construct
GSAGSAAGSGEF

SEQ ID NO: 13347 - protein, 5 aa, synthetic construct
EAAAK

SEQ ID NO: 13348 - protein, 11 aa, synthetic construct
EAAAKGGGGSS

SEQ ID NO: 13349 - skipped

SEQ ID NO: 13350 - protein, 9 aa, synthetic construct
GGSGSSPAP

SEQ ID NO: 13351 - protein, 11 aa, synthetic construct
GGSEAAAKPAP

SEQ ID NO: 13352 - protein, 11 aa, synthetic construct
EAAAKGGSGSS

SEQ ID NO: 13353 - protein, 6 aa, synthetic construct
PAPGSS

SEQ ID NO: 13354 - protein, 11 aa, synthetic construct
PAPEAAAKGGG

SEQ ID NO: 13355 - protein, 46 aa, synthetic construct; identical to SEQ ID NO: 5217

SEQ ID NO: 13356 - protein, 9 aa, synthetic construct
GSSGSSGSS

SEQ ID NO: 13357 - protein, 6 aa, synthetic construct
PAPGGG

SEQ ID NO: 13358 - protein, 6 aa, synthetic construct
PAPGGS

SEQ ID NO: 13359 - protein, 6 aa, synthetic construct
GSSGGG

SEQ ID NO: 13360 - protein, 18 aa, synthetic construct
GSSGSSGSSGSSGSSGSS

SEQ ID NO: 13361 - skipped

SEQ ID NO: 13362 - protein, 11 aa, synthetic construct
EAAAKGSSPAP

SEQ ID NO: 13363 - protein, 12 aa, synthetic construct
GSSGSSGSSGSS

SEQ ID NO: 13364 - protein, 25 aa, synthetic construct
GGGGSGGGGSGGGGSGGGGSGGGGS

SEQ ID NO: 13365 - protein, 5 aa, synthetic construct
GGGGS

SEQ ID NO: 13366 - protein, 11 aa, synthetic construct
EAAAKGSSGGG

SEQ ID NO: 13367 - protein, 6 aa, synthetic construct
GGGGGG

SEQ ID NO: 13368 - protein, 11 aa, synthetic construct
GGSGSSEAAAK

SEQ ID NO: 13369 - protein, 11 aa, synthetic construct
GSSPAPEAAAK

SEQ ID NO: 13370 - protein, 10 aa, synthetic construct
GGGGSGGGGS

SEQ ID NO: 13371 - protein, 9 aa, synthetic construct
GSSGGGGGS

SEQ ID NO: 13372 - protein, 12 aa, synthetic construct
GSAGSAAGSGEF

SEQ ID NO: 13373 - protein, 11 aa, synthetic construct
GGGEAAAKGSS

SEQ ID NO: 13374 - protein, 46 aa, synthetic construct; identical to SEQ ID NO: 5217

SEQ ID NO: 13375 - protein, 9 aa, synthetic construct
PAPGGSGGG

SEQ ID NO: 13376 - protein, 25 aa, synthetic construct
EAAAKEAAAKEAAAKEAAAKEAAAK

SEQ ID NO: 13377 - protein, 9 aa, synthetic construct
GGSGSSPAP

SEQ ID NO: 13378 - protein, 6 aa, synthetic construct
GGGGGG

SEQ ID NO: 13379 - protein, 25 aa, synthetic construct
EAAAKEAAAKEAAAKEAAAKEAAAK

SEQ ID NO: 13380 - protein, 11 aa, synthetic construct
EAAAKGSSPAP

SEQ ID NO: 13381 - protein, 9 aa, synthetic construct
GGGPAPGGS

SEQ ID NO: 13382 - protein, 46 aa, synthetic construct; identical to SEQ ID NO: 5217

SEQ ID NO: 13383 - skipped

SEQ ID NO: 13384 - protein, 8 aa, synthetic construct
EAAAKGGS

SEQ ID NO: 13385 - protein, 11 aa, synthetic construct
GSSGGSEAAAK

SEQ ID NO: 13386 - protein, 11 aa, synthetic construct
GGSGSSEAAAK

SEQ ID NO: 13387 - protein, 15 aa, synthetic construct
EAAAKEAAAKEAAAK

SEQ ID NO: 13388 - protein, 11 aa, synthetic construct
GGSGGGEAAAK

SEQ ID NO: 13389 - protein, 20 aa, synthetic construct
GGGGSGGGGSGGGGSGGGGS

SEQ ID NO: 13390 - protein, 8 aa, synthetic construct
EAAAKGSS

SEQ ID NO: 13391 - protein, 9 aa, synthetic construct
GSSGGGGGS

SEQ ID NO: 13392 - protein, 18 aa, synthetic construct
GSSGSSGSSGSSGSSGSS

SEQ ID NO: 13393 - protein, 6 aa, synthetic construct
GGSGSS

SEQ ID NO: 13394 - protein, 15 aa, synthetic construct
EAAAKGGGGSEAAAK

SEQ ID NO: 13395 - protein, 11 aa, synthetic construct
EAAAKGGGPAP

SEQ ID NO: 13396 - protein, 11 aa, synthetic construct
GGSEAAAKGGG

SEQ ID NO: 13397 - protein, 30 aa, synthetic construct; identical to SEQ ID NO: 5130

SEQ ID NO: 13398 - protein, 30 aa, synthetic construct; identical to SEQ ID NO: 5130

SEQ ID NO: 13399 - protein, 11 aa, synthetic construct
GSSPAPEAAAK

SEQ ID NO: 13400 - protein, 15 aa, synthetic construct
GGGGSEAAAKGGGGS

SEQ ID NO: 13401 - protein, 12 aa, synthetic construct
GSSGSSGSSGSS

SEQ ID NO: 13402 - protein, 8 aa, synthetic construct
GGSEAAAK

SEQ ID NO: 13403 - protein, 8 aa, synthetic construct
GGGGGGGG

SEQ ID NO: 13404 - protein, 6 aa, synthetic construct
GSSGGG

SEQ ID NO: 13405 - protein, 8 aa, synthetic construct
EAAAKGGS

SEQ ID NO: 13406 - protein, 5 aa, synthetic construct
GGGGS

SEQ ID NO: 13407 - protein, 11 aa, synthetic construct
GGSEAAAKGGG

SEQ ID NO: 13408 - protein, 9 aa, synthetic construct
GGSGSSGGG

SEQ ID NO: 13409 - protein, 11 aa, synthetic construct
GGSGSSEAAAK

SEQ ID NO: 13410 - protein, 11 aa, synthetic construct
EAAAKGGSGSS

SEQ ID NO: 13411 - skipped

SEQ ID NO: 13412 - protein, 9 aa, synthetic construct
GGGPAPGSS

SEQ ID NO: 13413 - protein, 15 aa, synthetic construct
GSSGSSGSSGSSGSS

SEQ ID NO: 13414 - protein, 11 aa, synthetic construct
GGGEAAAKPAP

SEQ ID NO: 13415 - protein, 6 aa, synthetic construct
GSSGGG

SEQ ID NO: 13416 - protein, 9 aa, synthetic construct
GGSPAPGSS

SEQ ID NO: 13417 - protein, 6 aa, synthetic construct
PAPGGS

SEQ ID NO: 13418 - protein, 11 aa, synthetic construct
PAPAPAPAPAP

SEQ ID NO: 13419 - protein, 6 aa, synthetic construct
GSSGGS

SEQ ID NO: 13420 - protein, 11 aa, synthetic construct
GSSGGSEAAAK

SEQ ID NO: 13421 - protein, 11 aa, synthetic construct
EAAAKGSSGGS

SEQ ID NO: 13422 - protein, 8 aa, synthetic construct
EAAAKGGG

SEQ ID NO: 13423 - protein, 9 aa, synthetic construct
PAPGGGGGS

SEQ ID NO: 13424 - protein, 15 aa, synthetic construct
GGGGSEAAAKGGGGS

SEQ ID NO: 13425 - protein, 30 aa, synthetic construct; identical to SEQ ID NO: 5130

SEQ ID NO: 13426 - skipped

SEQ ID NO: 13427 - protein, 9 aa, synthetic construct
GSSGGSPAP

SEQ ID NO: 13428 - skipped

SEQ ID NO: 13429 - protein, 6 aa, synthetic construct
PAPGSS

SEQ ID NO: 13430 - protein, 11 aa, synthetic construct
GGSEAAAKGGG

SEQ ID NO: 13431 - protein, 11 aa, synthetic construct
GGSEAAAKPAP

SEQ ID NO: 13432 - protein, 9 aa, synthetic construct
GGGGSSPAP

SEQ ID NO: 13433 - protein, 25 aa, synthetic construct
EAAAKEAAAKEAAAKEAAAKEAAAK

SEQ ID NO: 13434 - protein, 4 aa, synthetic construct
GGGG

SEQ ID NO: 13435 - protein, 11 aa, synthetic construct
GGSEAAAKPAP

SEQ ID NO: 13436 - protein, 9 aa, synthetic construct
PAPGSSGGG

SEQ ID NO: 13437 - protein, 11 aa, synthetic construct
PAPEAAAKGGS

SEQ ID NO: 13438 - protein, 9 aa, synthetic construct
GGGGSSPAP

SEQ ID NO: 13439 - protein, 20 aa, synthetic construct
GGGGSGGGGSGGGGSGGGGS

SEQ ID NO: 13440 - protein, 8 aa, synthetic construct
GGGEAAAK

SEQ ID NO: 13441 - protein, 6 aa, synthetic construct
GGGGSS

SEQ ID NO: 13442 - protein, 9 aa, synthetic construct
GGSPAPGSS

SEQ ID NO: 13443 - protein, 5 aa, synthetic construct
GGGGS

SEQ ID NO: 13444 - protein, 11 aa, synthetic construct
EAAAKGSSGGS

SEQ ID NO: 13445 - skipped

SEQ ID NO: 13446 - protein, 4 aa, synthetic construct
GGGG

SEQ ID NO: 13447 - protein, 6 aa, synthetic construct
GSSGGS

SEQ ID NO: 13448 - protein, 12 aa, synthetic construct
GGSGGSGGSGGS

SEQ ID NO: 13449 - protein, 11 aa, synthetic construct
PAPEAAAKGGS

SEQ ID NO: 13450 - protein, 11 aa, synthetic construct
EAAAKGSSGGG

SEQ ID NO: 13451 - protein, 8 aa, synthetic construct
GSSEAAAK

SEQ ID NO: 13452 - protein, 12 aa, synthetic construct
GSAGSAAGSGEF

SEQ ID NO: 13453 - protein, 11 aa, synthetic construct
GGGGGSEAAAK

SEQ ID NO: 13454 - protein, 4 aa, synthetic construct
GGGG

SEQ ID NO: 13455 - protein, 11 aa, synthetic construct
GGGGSSEAAAK

SEQ ID NO: 13456 - protein, 6 aa, synthetic construct
PAPGGG

SEQ ID NO: 13457 - protein, 11 aa, synthetic construct
EAAAKGGSGGG

SEQ ID NO: 13458 - protein, 9 aa, synthetic construct
GGGPAPGGS

SEQ ID NO: 13459 - protein, 8 aa, synthetic construct
EAAAKPAP

SEQ ID NO: 13460 - protein, 9 aa, synthetic construct
GSSGSSGSS

SEQ ID NO: 13461 - protein, 9 aa, synthetic construct
GSSPAPGGS

SEQ ID NO: 13462 - protein, 9 aa, synthetic construct
GGGGGSPAP

SEQ ID NO: 13463 - protein, 9 aa, synthetic construct
GGSGSSGGG

SEQ ID NO: 13464 - protein, 11 aa, synthetic construct
GGGEAAAKGSS

SEQ ID NO: 13465 - protein, 8 aa, synthetic construct
GSSEAAAK

SEQ ID NO: 13466 - protein, 5 aa, synthetic construct
EAAAK

SEQ ID NO: 13467 - protein, 11 aa, synthetic construct
EAAAKGGSGSS

SEQ ID NO: 13468 - protein, 11 aa, synthetic construct
GSSEAAAKGGG

SEQ ID NO: 13469 - protein, 9 aa, synthetic construct
PAPGSSGGG

SEQ ID NO: 13470 - protein, 11 aa, synthetic construct
EAAAKGGGGGS

SEQ ID NO: 13471 - protein, 11 aa, synthetic construct
GGSEAAAKPAP

SEQ ID NO: 13472 - protein, 9 aa, synthetic construct
GGGPAPGGS

SEQ ID NO: 13473 - protein, 5 aa, synthetic construct
GGGGS

SEQ ID NO: 13474 - protein, 15 aa, synthetic construct
GGSGGSGGSGGSGGS

SEQ ID NO: 13475 - protein, 6 aa, synthetic construct
GGGPAP

SEQ ID NO: 13476 - protein, 8 aa, synthetic construct
EAAAKPAP

SEQ ID NO: 13477 - protein, 8 aa, synthetic construct
GGSEAAAK

SEQ ID NO: 13478 - protein, 11 aa, synthetic construct
GSSEAAAKPAP

SEQ ID NO: 13479 - protein, 6 aa, synthetic construct
GGSGSS

SEQ ID NO: 13480 - protein, 11 aa, synthetic construct
EAAAKPAPGGG

SEQ ID NO: 13481 - protein, 11 aa, synthetic construct
GGSPAPEAAAK

SEQ ID NO: 13482 - protein, 11 aa, synthetic construct
GGSEAAAKGGG

SEQ ID NO: 13483 - protein, 15 aa, synthetic construct
GGGGSEAAAKGGGGS

SEQ ID NO: 13484 - protein, 11 aa, synthetic construct
GSSGGGEAAAK

SEQ ID NO: 13485 - protein, 11 aa, synthetic construct
EAAAKGGGPAP

SEQ ID NO: 13486 - protein, 6 aa, synthetic construct
GSSPAP

SEQ ID NO: 13487 - protein, 46 aa, synthetic construct; identical to SEQ ID NO: 5217

SEQ ID NO: 13488 - protein, 11 aa, synthetic construct
GGSEAAAKGSS

SEQ ID NO: 13489 - protein, 11 aa, synthetic construct
GSSGGSEAAAK

SEQ ID NO: 13490 - protein, 11 aa, synthetic construct
GGSEAAAKGSS

SEQ ID NO: 13491 - protein, 8 aa, synthetic construct
EAAAKGGG

SEQ ID NO: 13492 - protein, 11 aa, synthetic construct
GSSGGSEAAAK

SEQ ID NO: 13493 - protein, 15 aa, synthetic construct
GGGGSEAAAKGGGGS

SEQ ID NO: 13494 - protein, 11 aa, synthetic construct
PAPGSSEAAAK

SEQ ID NO: 13495 - protein, 8 aa, synthetic construct
PAPEAAAK

SEQ ID NO: 13496 - protein, 9 aa, synthetic construct
PAPGGSGSS

SEQ ID NO: 13497 - protein, 6 aa, synthetic construct
PAPGSS

SEQ ID NO: 13498 - protein, 9 aa, synthetic construct
PAPGGGGGS

SEQ ID NO: 13499 - protein, 11 aa, synthetic construct
EAAAKPAPGSS

SEQ ID NO: 13500 - protein, 9 aa, synthetic construct
GSSPAPGGS

SEQ ID NO: 13501 - protein, 11 aa, synthetic construct
GGSGSSEAAAK

SEQ ID NO: 13502 - protein, 6 aa, synthetic construct
GGGGGG

SEQ ID NO: 13503 - protein, 20 aa, synthetic construct
EAAAKEAAAKEAAAKEAAAK

SEQ ID NO: 13504 - protein, 9 aa, synthetic construct
GGSPAPGSS

SEQ ID NO: 13505 - protein, 11 aa, synthetic construct
PAPAPAPAPAP

SEQ ID NO: 13506 - protein, 9 aa, synthetic construct
GGSGSSPAP

SEQ ID NO: 13507 - protein, 11 aa, synthetic construct
EAAAKGGSGGG

SEQ ID NO: 13508 - protein, 15 aa, synthetic construct
GSSGSSGSSGSSGSS

SEQ ID NO: 13509 - protein, 46 aa, synthetic construct; identical to SEQ ID NO: 5217

SEQ ID NO: 13510 - protein, 11 aa, synthetic construct
GSSGGGEAAAK

SEQ ID NO: 13511 - protein, 11 aa, synthetic construct
GSSGGSEAAAK

SEQ ID NO: 13512 - protein, 8 aa, synthetic construct
GGGGGGGG

SEQ ID NO: 13513 - protein, 11 aa, synthetic construct
PAPGGSEAAAK

SEQ ID NO: 13514 - protein, 9 aa, synthetic construct
GGGGSSPAP

SEQ ID NO: 13515 - protein, 9 aa, synthetic construct
PAPAPAPAP

SEQ ID NO: 13516 - protein, 11 aa, synthetic construct
GGSEAAAKPAP

SEQ ID NO: 13517 - protein, 9 aa, synthetic construct
PAPGGSGGG

SEQ ID NO: 13518 - protein, 30 aa, synthetic construct; identical to SEQ ID NO: 5130

SEQ ID NO: 13519 - protein, 15 aa, synthetic construct
GGGGSGGGGSGGGGS

SEQ ID NO: 13520 - protein, 9 aa, synthetic construct
GGSGGGPAP

SEQ ID NO: 13521 - protein, 11 aa, synthetic construct
GGGPAPEAAAK

SEQ ID NO: 13522 - protein, 9 aa, synthetic construct
GGGGGSGSS

SEQ ID NO: 13523 - skipped

SEQ ID NO: 13524 - protein, 9 aa, synthetic construct
GGGGGSPAP

SEQ ID NO: 13525 - protein, 6 aa, synthetic construct
GGSPAP

SEQ ID NO: 13526 - protein, 9 aa, synthetic construct
GGGPAPGGS

SEQ ID NO: 13527 - protein, 9 aa, synthetic construct
PAPGSSGGG

SEQ ID NO: 13528 - protein, 9 aa, synthetic construct
PAPGSSGGG

SEQ ID NO: 13529 - protein, 6 aa, synthetic construct
PAPGGS

SEQ ID NO: 13530 - protein, 11 aa, synthetic construct
GGGEAAAKGSS

SEQ ID NO: 13531 - protein, 11 aa, synthetic construct
GGSEAAAKGSS

SEQ ID NO: 13532 - protein, 11 aa, synthetic construct
PAPGGSEAAAK

SEQ ID NO: 13533 - protein, 11 aa, synthetic construct
GGSEAAAKGGG

SEQ ID NO: 13534 - protein, 9 aa, synthetic construct
GGSGGGGSS

SEQ ID NO: 13535 - protein, 11 aa, synthetic construct
GGGEAAAKPAP

SEQ ID NO: 13536 - protein, 8 aa, synthetic construct
EAAAKGSS

SEQ ID NO: 13537 - protein, 11 aa, synthetic construct
PAPEAAAKGSS

SEQ ID NO: 13538 - protein, 12 aa, synthetic construct
GSAGSAAGSGEF

SEQ ID NO: 13539 - protein, 11 aa, synthetic construct
EAAAKGGGGGS

SEQ ID NO: 13540 - protein, 11 aa, synthetic construct
EAAAKGSSPAP

SEQ ID NO: 13541 - protein, 15 aa, synthetic construct
GGGGSEAAAKGGGGS

SEQ ID NO: 13542 - protein, 11 aa, synthetic construct
GSSEAAAKPAP

SEQ ID NO: 13543 - protein, 6 aa, synthetic construct
GGGGGG

SEQ ID NO: 13544 - protein, 6 aa, synthetic construct
PAPGGS

SEQ ID NO: 13545 - skipped

SEQ ID NO: 13546 - protein, 7 aa, synthetic construct
PAPAPAP

SEQ ID NO: 13547 - protein, 4 aa, synthetic construct
GGGG

SEQ ID NO: 13548 - protein, 11 aa, synthetic construct
GSSGGSEAAAK

SEQ ID NO: 13549 - protein, 9 aa, synthetic construct
GGSGGGGSS

SEQ ID NO: 13550 - protein, 9 aa, synthetic construct
GGGGSSGGS

SEQ ID NO: 13551 - protein, 9 aa, synthetic construct
GSSPAPGGG

SEQ ID NO: 13552 - protein, 11 aa, synthetic construct
GGSEAAAKPAP

SEQ ID NO: 13553 - skipped

SEQ ID NO: 13554 - protein, 6 aa, synthetic construct
GSSGGS

SEQ ID NO: 13555 - protein, 5 aa, synthetic construct
GGGGG

SEQ ID NO: 13556 - protein, 9 aa, synthetic construct
GSSGGGPAP

SEQ ID NO: 13557 - protein, 11 aa, synthetic construct
GSSEAAAKGGG

SEQ ID NO: 13558 - protein, 30 aa, synthetic construct; identical to SEQ ID NO: 5130

SEQ ID NO: 13559 - protein, 11 aa, synthetic construct
GGSEAAAKPAP

SEQ ID NO: 13560 - protein, 13 aa, synthetic construct
PAPAPAPAPAPAP

SEQ ID NO: 13561 - protein, 15 aa, synthetic construct
GGGGSEAAAKGGGGS

SEQ ID NO: 13562 - protein, 11 aa, synthetic construct
EAAAKPAPGSS

SEQ ID NO: 13563 - protein, 15 aa, synthetic construct
GSSGSSGSSGSSGSS

SEQ ID NO: 13564 - protein, 11 aa, synthetic construct
PAPEAAAKGSS

SEQ ID NO: 13565 - protein, 46 aa, synthetic construct; identical to SEQ ID NO: 5217

SEQ ID NO: 13566 - protein, 46 aa, synthetic construct; identical to SEQ ID NO: 5217

SEQ ID NO: 13567 - protein, 11 aa, synthetic construct
GGSEAAAKGGG

SEQ ID NO: 13568 - protein, 9 aa, synthetic construct
GGSGGGGSS

SEQ ID NO: 13569 - protein, 11 aa, synthetic construct
PAPEAAAKGSS

SEQ ID NO: 13570 - skipped

SEQ ID NO: 13571 - protein, 11 aa, synthetic construct
GGSGGGEAAAK

SEQ ID NO: 13572 - protein, 11 aa, synthetic construct
EAAAKGGGGSS

SEQ ID NO: 13573 - protein, 9 aa, synthetic construct
GSSPAPGGG

SEQ ID NO: 13574 - protein, 11 aa, synthetic construct
EAAAKGSSGGG

SEQ ID NO: 13575 - protein, 11 aa, synthetic construct
GGSGGGEAAAK

SEQ ID NO: 13576 - protein, 15 aa, synthetic construct
GGSGGSGGSGGSGGS

SEQ ID NO: 13577 - protein, 11 aa, synthetic construct
EAAAKPAPGGS

SEQ ID NO: 13578 - protein, 11 aa, synthetic construct
GGGGGSEAAAK

SEQ ID NO: 13579 - protein, 6 aa, synthetic construct
GSSPAP

SEQ ID NO: 13580 - protein, 11 aa, synthetic construct
GGGEAAAKPAP

SEQ ID NO: 13581 - protein, 11 aa, synthetic construct
GSSGGSEAAAK

SEQ ID NO: 13582 - protein, 11 aa, synthetic construct
EAAAKPAPGGS

SEQ ID NO: 13583 - protein, 6 aa, synthetic construct
PAPGGG

SEQ ID NO: 13584 - protein, 11 aa, synthetic construct
EAAAKGSSPAP

SEQ ID NO: 13585 - protein, 11 aa, synthetic construct
GSSPAPEAAAK

SEQ ID NO: 13586 - protein, 11 aa, synthetic construct
GGSGGGEAAAK

SEQ ID NO: 13587 - protein, 9 aa, synthetic construct
GSSGSSGSS

SEQ ID NO: 13588 - protein, 8 aa, synthetic construct
EAAAKGGS

SEQ ID NO: 13589 - protein, 11 aa, synthetic construct
EAAAKPAPGGS

SEQ ID NO: 13590 - protein, 11 aa, synthetic construct
EAAAKPAPGGS

SEQ ID NO: 13591 - protein, 9 aa, synthetic construct
GSSGGGGGS

SEQ ID NO: 13592 - protein, 9 aa, synthetic construct
PAPGGGGSS

SEQ ID NO: 13593 - protein, 9 aa, synthetic construct
GSSGSSGSS

SEQ ID NO: 13594 - protein, 20 aa, synthetic construct
EAAAKEAAAKEAAAKEAAAK

SEQ ID NO: 13595 - skipped

SEQ ID NO: 13596 - protein, 11 aa, synthetic construct
EAAAKPAPGSS

SEQ ID NO: 13597 - protein, 8 aa, synthetic construct
EAAAKGGG

SEQ ID NO: 13598 - protein, 11 aa, synthetic construct
PAPGSSEAAAK

SEQ ID NO: 13599 - protein, 9 aa, synthetic construct
PAPGSSGGS

SEQ ID NO: 13600 - protein, 11 aa, synthetic construct
GSSPAPEAAAK

SEQ ID NO: 13601 - protein, 18 aa, synthetic construct
GSSGSSGSSGSSGSSGSS

SEQ ID NO: 13602 - protein, 5 aa, synthetic construct
GGGGS

SEQ ID NO: 13603 - protein, 6 aa, synthetic construct
GSSPAP

SEQ ID NO: 13604 - protein, 15 aa, synthetic construct
EAAAKGGGGSEAAAK

SEQ ID NO: 13605 - protein, 10 aa, synthetic construct
EAAAKEAAAK

SEQ ID NO: 13606 - protein, 9 aa, synthetic construct
GGGGSSGGS

SEQ ID NO: 13607 - protein, 11 aa, synthetic construct
PAPGGSEAAAK

SEQ ID NO: 13608 - protein, 11 aa, synthetic construct
EAAAKGGSPAP

SEQ ID NO: 13609 - protein, 9 aa, synthetic construct
GSSGGSGGG

SEQ ID NO: 13610 - protein, 6 aa, synthetic construct
GSSGGS

SEQ ID NO: 13611 - protein, 9 aa, synthetic construct
PAPGGSGSS

SEQ ID NO: 13612 - protein, 11 aa, synthetic construct
EAAAKGGSGSS

SEQ ID NO: 13613 - protein, 5 aa, synthetic construct
PAPAP

SEQ ID NO: 13614 - protein, 11 aa, synthetic construct
EAAAKGSSPAP

SEQ ID NO: 13615 - protein, 11 aa, synthetic construct
EAAAKPAPGGG

SEQ ID NO: 13616 - protein, 30 aa, synthetic construct; identical to SEQ ID NO: 5112

SEQ ID NO: 13617 - protein, 11 aa, synthetic construct
EAAAKGGGGSS

SEQ ID NO: 13618 - protein, 8 aa, synthetic construct
PAPEAAAK

SEQ ID NO: 13619 - protein, 11 aa, synthetic construct
EAAAKPAPGSS

SEQ ID NO: 13620 - protein, 6 aa, synthetic construct
GGSPAP

SEQ ID NO: 13621 - protein, 6 aa, synthetic construct
GGSGGS

SEQ ID NO: 13622 - protein, 11 aa, synthetic construct
PAPEAAAKGSS

SEQ ID NO: 13623 - protein, 6 aa, synthetic construct
PAPGSS

SEQ ID NO: 13624 - protein, 11 aa, synthetic construct
PAPAPAPAPAP

SEQ ID NO: 13625 - skipped

SEQ ID NO: 13626 - protein, 6 aa, synthetic construct
GGGPAP

SEQ ID NO: 13627 - protein, 11 aa, synthetic construct
GSSPAPEAAAK

SEQ ID NO: 13628 - skipped

SEQ ID NO: 13629 - protein, 6 aa, synthetic construct
GGSPAP

SEQ ID NO: 13630 - protein, 11 aa, synthetic construct
PAPEAAAKGGS

SEQ ID NO: 13631 - protein, 9 aa, synthetic construct
PAPGSSGGS

SEQ ID NO: 13632 - protein, 13 aa, synthetic construct
PAPAPAPAPAPAP

SEQ ID NO: 13633 - protein, 15 aa, synthetic construct
EAAAKEAAAKEAAAK

SEQ ID NO: 13634 - protein, 15 aa, synthetic construct
GGSGGSGGSGGSGGS

SEQ ID NO: 13635 - protein, 11 aa, synthetic construct
EAAAKPAPGGS

SEQ ID NO: 13636 - protein, 6 aa, synthetic construct
GGSGGS

SEQ ID NO: 13637 - protein, 8 aa, synthetic construct
EAAAKPAP

SEQ ID NO: 13638 - protein, 8 aa, synthetic construct
GGSEAAAK

SEQ ID NO: 13639 - protein, 6 aa, synthetic construct
GGSGGG

SEQ ID NO: 13640 - protein, 11 aa, synthetic construct
GGSGGGEAAAK

SEQ ID NO: 13641 - protein, 11 aa, synthetic construct
PAPEAAAKGGG

SEQ ID NO: 13642 - protein, 5 aa, synthetic construct
PAPAP

SEQ ID NO: 13643 - skipped

SEQ ID NO: 13644 - protein, 11 aa, synthetic construct
EAAAKGSSGGG

SEQ ID NO: 13645 - protein, 9 aa, synthetic construct
GGSPAPGSS

SEQ ID NO: 13646 - protein, 8 aa, synthetic construct
PAPEAAAK

SEQ ID NO: 13647 - protein, 11 aa, synthetic construct
EAAAKGGSPAP

SEQ ID NO: 13648 - protein, 9 aa, synthetic construct
PAPAPAPAP

SEQ ID NO: 13649 - protein, 11 aa, synthetic construct
PAPGGSEAAAK

SEQ ID NO: 13650 - protein, 12 aa, synthetic construct
GGSGGSGGSGGS

SEQ ID NO: 13651 - protein, 9 aa, synthetic construct
GGGGGSGSS

SEQ ID NO: 13652 - protein, 9 aa, synthetic construct
PAPGGSGGG

SEQ ID NO: 13653 - skipped

SEQ ID NO: 13654 - protein, 5 aa, synthetic construct
EAAAK

SEQ ID NO: 13655 - protein, 11 aa, synthetic construct
GGGEAAAKGSS

SEQ ID NO: 13656 - protein, 9 aa, synthetic construct
GGSPAPGSS

SEQ ID NO: 13657 - protein, 11 aa, synthetic construct
GGSEAAAKPAP

SEQ ID NO: 13658 - protein, 25 aa, synthetic construct
GGGGSGGGGSGGGGSGGGGSGGGGS

SEQ ID NO: 13659 - protein, 6 aa, synthetic construct
GGSGSS

SEQ ID NO: 13660 - protein, 11 aa, synthetic construct
GGGEAAAKGSS

SEQ ID NO: 13661 - protein, 11 aa, synthetic construct
EAAAKGGSPAP

SEQ ID NO: 13662 - protein, 11 aa, synthetic construct
GSSPAPEAAAK

SEQ ID NO: 13663 - protein, 12 aa, synthetic construct
GGSGGSGGSGGS

SEQ ID NO: 13664 - protein, 11 aa, synthetic construct
GSSPAPEAAAK

SEQ ID NO: 13665 - protein, 12 aa, synthetic construct
GSSGSSGSSGSS

SEQ ID NO: 13666 - protein, 11 aa, synthetic construct
GGSGSSEAAAK

SEQ ID NO: 13667 - protein, 6 aa, synthetic construct
GGSGGG

SEQ ID NO: 13668 - protein, 9 aa, synthetic construct
GGSPAPGGG

SEQ ID NO: 13669 - protein, 9 aa, synthetic construct
GGSGGSGGS

SEQ ID NO: 13670 - protein, 11 aa, synthetic construct
GGGGSSEAAAK

SEQ ID NO: 13671 - protein, 9 aa, synthetic construct
GGSPAPGSS

SEQ ID NO: 13672 - protein, 11 aa, synthetic construct
EAAAKPAPGSS

SEQ ID NO: 13673 - protein, 9 aa, synthetic construct
GGGGSSGGS

SEQ ID NO: 13674 - protein, 11 aa, synthetic construct
GGSPAPEAAAK

SEQ ID NO: 13675 - protein, 8 aa, synthetic construct
GGSEAAAK

SEQ ID NO: 13676 - protein, 12 aa, synthetic construct
GSSGSSGSSGSS

SEQ ID NO: 13677 - protein, 25 aa, synthetic construct
EAAAKEAAAKEAAAKEAAAKEAAAK

SEQ ID NO: 13678 - protein, 5 aa, synthetic construct
GGGGG

SEQ ID NO: 13679 - protein, 11 aa, synthetic construct
GGSEAAAKGSS

SEQ ID NO: 13680 - protein, 6 aa, synthetic construct
GSSGGG

SEQ ID NO: 13681 - protein, 9 aa, synthetic construct
PAPGSSGGG

SEQ ID NO: 13682 - protein, 6 aa, synthetic construct
GGSGGS

SEQ ID NO: 13683 - protein, 11 aa, synthetic construct
EAAAKGGGGGS

SEQ ID NO: 13684 - protein, 9 aa, synthetic construct
GGSGSSPAP

SEQ ID NO: 13685 - protein, 9 aa, synthetic construct
PAPGSSGGG

SEQ ID NO: 13686 - protein, 9 aa, synthetic construct
PAPGGSGGG

SEQ ID NO: 13687 - protein, 4 aa, synthetic construct
GGGG

SEQ ID NO: 13688 - protein, 11 aa, synthetic construct
EAAAKGGSPAP

SEQ ID NO: 13689 - protein, 6 aa, synthetic construct
GSSGSS

SEQ ID NO: 13690 - protein, 11 aa, synthetic construct
GGSEAAAKPAP

SEQ ID NO: 13691 - protein, 11 aa, synthetic construct
EAAAKGSSGGS

SEQ ID NO: 13692 - protein, 46 aa, synthetic construct; identical to SEQ ID NO: 5217

SEQ ID NO: 13693 - protein, 11 aa, synthetic construct
EAAAKGGSGSS

SEQ ID NO: 13694 - protein, 5 aa, synthetic construct
GGGGG

SEQ ID NO: 13695 - protein, 8 aa, synthetic construct
GGGEAAAK

SEQ ID NO: 13696 - protein, 12 aa, synthetic construct
GGSGGSGGSGGS

SEQ ID NO: 13697 - protein, 30 aa, synthetic construct; identical to SEQ ID NO: 5130

SEQ ID NO: 13698 - protein, 11 aa, synthetic construct
PAPAPAPAPAP

SEQ ID NO: 13699 - protein, 10 aa, synthetic construct
EAAAKEAAAK

SEQ ID NO: 13700 - protein, 11 aa, synthetic construct
GSSGGSEAAAK

SEQ ID NO: 13701 - protein, 11 aa, synthetic construct
PAPGGSEAAAK

SEQ ID NO: 13702 - protein, 11 aa, synthetic construct
EAAAKGGGPAP

SEQ ID NO: 13703 - protein, 9 aa, synthetic construct
PAPGGSGSS

SEQ ID NO: 13704 - protein, 16 aa, synthetic construct
SGSETPGTSESATPES

SEQ ID NO: 13705 - protein, 6 aa, synthetic construct
GGSGGS

SEQ ID NO: 13706 - protein, 8 aa, synthetic construct
EAAAKGGS

SEQ ID NO: 13707 - protein, 9 aa, synthetic construct
GGSPAPGSS

SEQ ID NO: 13708 - protein, 20 aa, synthetic construct
EAAAKEAAAKEAAAKEAAAK

SEQ ID NO: 13709 - protein, 9 aa, synthetic construct
GSSGGSGGG

SEQ ID NO: 13710 - protein, 11 aa, synthetic construct
PAPGSSEAAAK

SEQ ID NO: 13711 - protein, 13 aa, synthetic construct
PAPAPAPAPAPAP

SEQ ID NO: 13712 - protein, 6 aa, synthetic construct
GGGGSS

SEQ ID NO: 13713 - protein, 15 aa, synthetic construct
GGGGSEAAAKGGGGS

SEQ ID NO: 13714 - protein, 11 aa, synthetic construct
GSSPAPEAAAK

SEQ ID NO: 13715 - protein, 11 aa, synthetic construct
PAPEAAAKGGG

SEQ ID NO: 13716 - protein, 10 aa, synthetic construct
EAAAKEAAAK

SEQ ID NO: 13717 - protein, 5 aa, synthetic construct
EAAAK

SEQ ID NO: 13718 - protein, 9 aa, synthetic construct
GSSGGSGGG

SEQ ID NO: 13719 - protein, 11 aa, synthetic construct
GGGEAAAKPAP

SEQ ID NO: 13720 - protein, 6 aa, synthetic construct
GGSGGS

SEQ ID NO: 13721 - protein, 30 aa, synthetic construct; identical to SEQ ID NO: 5130

SEQ ID NO: 13722 - protein, 5 aa, synthetic construct
GGGGG

SEQ ID NO: 13723 - protein, 11 aa, synthetic construct
GSSGGSEAAAK

SEQ ID NO: 13724 - protein, 33 aa, synthetic construct; identical to SEQ ID NO: 5006

SEQ ID NO: 13725 - protein, 9 aa, synthetic construct
GGSGGGPAP

SEQ ID NO: 13726 - protein, 6 aa, synthetic construct
GGSGSS

SEQ ID NO: 13727 - protein, 16 aa, synthetic construct
SGSETPGTSESATPES

SEQ ID NO: 13728 - protein, 11 aa, synthetic construct
EAAAKGGSPAP

SEQ ID NO: 13729 - protein, 5 aa, synthetic construct
PAPAP

SEQ ID NO: 13730 - protein, 46 aa, synthetic construct; identical to SEQ ID NO: 5217

SEQ ID NO: 13731 - protein, 6 aa, synthetic construct
GGGGGS

SEQ ID NO: 13732 - protein, 10 aa, synthetic construct
EAAAKEAAAK

SEQ ID NO: 13733 - protein, 11 aa, synthetic construct
GSSGGSEAAAK

SEQ ID NO: 13734 - protein, 8 aa, synthetic construct
GGGEAAAK

SEQ ID NO: 13735 - protein, 11 aa, synthetic construct
GSSGGGEAAAK

SEQ ID NO: 13736 - skipped

SEQ ID NO: 13737 - protein, 15 aa, synthetic construct
GGGGSEAAAKGGGGS

SEQ ID NO: 13738 - protein, 4 aa, synthetic construct
GGGG

SEQ ID NO: 13739 - protein, 6 aa, synthetic construct
GGSGGS

SEQ ID NO: 13740 - protein, 9 aa, synthetic construct
GGSGGGGSS

SEQ ID NO: 13741 - protein, 9 aa, synthetic construct
GSSPAPGGS

SEQ ID NO: 13742 - protein, 11 aa, synthetic construct
GSSPAPEAAAK

SEQ ID NO: 13743 - protein, 8 aa, synthetic construct
EAAAKGGS

SEQ ID NO: 13744 - protein, 12 aa, synthetic construct
GGSGGSGGSGGS

SEQ ID NO: 13745 - protein, 11 aa, synthetic construct
GGGGSSEAAAK

SEQ ID NO: 13746 - protein, 13 aa, synthetic construct
PAPAPAPAPAPAP

SEQ ID NO: 13747 - protein, 11 aa, synthetic construct
EAAAKGSSGGG

SEQ ID NO: 13748 - protein, 5 aa, synthetic construct
GGGGG

SEQ ID NO: 13749 - protein, 46 aa, synthetic construct; identical to SEQ ID NO: 5217

SEQ ID NO: 13750 - protein, 33 aa, synthetic construct; identical to SEQ ID NO: 5006

SEQ ID NO: 13751 - protein, 9 aa, synthetic construct
GGSPAPGGG

SEQ ID NO: 13752 - protein, 11 aa, synthetic construct
GGGEAAAKGGS

SEQ ID NO: 13753 - protein, 8 aa, synthetic construct
GGGEAAAK

SEQ ID NO: 13754 - protein, 11 aa, synthetic construct
PAPEAAAKGGG

SEQ ID NO: 13755 - protein, 18 aa, synthetic construct
GSSGSSGSSGSSGSSGSS

SEQ ID NO: 13756 - protein, 46 aa, synthetic construct; identical to SEQ ID NO: 5217

SEQ ID NO: 13757 - protein, 11 aa, synthetic construct
EAAAKGGSPAP

SEQ ID NO: 13758 - protein, 10 aa, synthetic construct
EAAAKEAAAK

SEQ ID NO: 13759 - protein, 30 aa, synthetic construct; identical to SEQ ID NO: 5112

SEQ ID NO: 13760 - protein, 12 aa, synthetic construct
GGSGGSGGSGGS

SEQ ID NO: 13761 - protein, 25 aa, synthetic construct
EAAAKEAAAKEAAAKEAAAKEAAAK

SEQ ID NO: 13762 - protein, 18 aa, synthetic construct
GSSGSSGSSGSSGSSGSS

SEQ ID NO: 13763 - protein, 5 aa, synthetic construct
GGGGS

SEQ ID NO: 13764 - protein, 46 aa, synthetic construct; identical to SEQ ID NO: 5217

SEQ ID NO: 13765 - protein, 10 aa, synthetic construct
GGGGSGGGGS

SEQ ID NO: 13766 - protein, 10 aa, synthetic construct
GGGGSGGGGS

SEQ ID NO: 13767 - protein, 6 aa, synthetic construct
GGSGSS

SEQ ID NO: 13768 - protein, 9 aa, synthetic construct
GSSPAPGGG

SEQ ID NO: 13769 - protein, 9 aa, synthetic construct
GSSGGSPAP

SEQ ID NO: 13770 - protein, 6 aa, synthetic construct
PAPGGS

SEQ ID NO: 13771 - protein, 11 aa, synthetic construct
GGSPAPEAAAK

SEQ ID NO: 13772 - protein, 9 aa, synthetic construct
GGGPAPGGS

SEQ ID NO: 13773 - protein, 9 aa, synthetic construct
PAPGSSGGG

SEQ ID NO: 13774 - protein, 11 aa, synthetic construct
GSSGGGEAAAK

SEQ ID NO: 13775 - protein, 6 aa, synthetic construct
GSSGGG

SEQ ID NO: 13776 - protein, 6 aa, synthetic construct
GSSGSS

SEQ ID NO: 13777 - protein, 6 aa, synthetic construct
GSSGGG

SEQ ID NO: 13778 - protein, 9 aa, synthetic construct
PAPGGGGGS

SEQ ID NO: 13779 - protein, 8 aa, synthetic construct
GSSEAAAK

SEQ ID NO: 13780 - protein, 6 aa, synthetic construct
PAPGGG

SEQ ID NO: 13781 - protein, 10 aa, synthetic construct
GGGGSGGGGS

SEQ ID NO: 13782 - protein, 6 aa, synthetic construct
GSSGGS

SEQ ID NO: 13783 - protein, 10 aa, synthetic construct
GGGGSGGGGS

SEQ ID NO: 13784 - protein, 11 aa, synthetic construct
EAAAKGGSGSS

SEQ ID NO: 13785 - protein, 11 aa, synthetic construct
GSSEAAAKGGS

SEQ ID NO: 13786 - protein, 11 aa, synthetic construct
PAPGSSEAAAK

SEQ ID NO: 13787 - protein, 10 aa, synthetic construct
GGGGSGGGGS

SEQ ID NO: 13788 - protein, 11 aa, synthetic construct
PAPGSSEAAAK

SEQ ID NO: 13789 - protein, 11 aa, synthetic construct
PAPGSSEAAAK

SEQ ID NO: 13790 - protein, 9 aa, synthetic construct
GGSPAPGGG

SEQ ID NO: 13791 - protein, 6 aa, synthetic construct
GGGGGS

SEQ ID NO: 13792 - protein, 9 aa, synthetic construct
GGGGSSGGS

SEQ ID NO: 13793 - protein, 9 aa, synthetic construct
PAPAPAPAP

SEQ ID NO: 13794 - protein, 6 aa, synthetic construct
GGSGGS

SEQ ID NO: 13795 - protein, 9 aa, synthetic construct
GGGPAPGGS

SEQ ID NO: 13796 - protein, 15 aa, synthetic construct
GGSGGSGGSGGSGGS

SEQ ID NO: 13797 - protein, 6 aa, synthetic construct
GGSGGG

SEQ ID NO: 13798 - protein, 10 aa, synthetic construct
EAAAKEAAAK

SEQ ID NO: 13799 - protein, 6 aa, synthetic construct
PAPGSS

SEQ ID NO: 13800 - protein, 8 aa, synthetic construct
GSSEAAAK

SEQ ID NO: 13801 - protein, 9 aa, synthetic construct
GGSPAPGGG

SEQ ID NO: 13802 - protein, 8 aa, synthetic construct
EAAAKGGG

SEQ ID NO: 13803 - protein, 11 aa, synthetic construct
GSSEAAAKGGS

SEQ ID NO: 13804 - protein, 9 aa, synthetic construct
GSSGGSPAP

SEQ ID NO: 13805 - protein, 6 aa, synthetic construct
GGGGGS

SEQ ID NO: 13806 - protein, 6 aa, synthetic construct
GSSGGG

SEQ ID NO: 13807 - protein, 6 aa, synthetic construct
GSSGSS

SEQ ID NO: 13808 - protein, 11 aa, synthetic construct
GGSEAAAKPAP

SEQ ID NO: 13809 - protein, 11 aa, synthetic construct
EAAAKGGGGSS

SEQ ID NO: 13810 - protein, 11 aa, synthetic construct
EAAAKPAPGGS

SEQ ID NO: 13811 - protein, 15 aa, synthetic construct
GSSGSSGSSGSSGSS

SEQ ID NO: 13812 - protein, 15 aa, synthetic construct
GGGGSEAAAKGGGGS

SEQ ID NO: 13813 - protein, 6 aa, synthetic construct
GGSGSS

SEQ ID NO: 13814 - skipped

SEQ ID NO: 13815 - protein, 5 aa, synthetic construct
PAPAP

SEQ ID NO: 13816 - protein, 8 aa, synthetic construct
EAAAKPAP

SEQ ID NO: 13817 - protein, 25 aa, synthetic construct
EAAAKEAAAKEAAAKEAAAKEAAAK

SEQ ID NO: 13818 - protein, 7 aa, synthetic construct
GGGGGGG

SEQ ID NO: 13819 - protein, 5 aa, synthetic construct
GGGGS

SEQ ID NO: 13820 - protein, 6 aa, synthetic construct
GSSGGG

SEQ ID NO: 13821 - protein, 11 aa, synthetic construct
PAPAPAPAPAP

SEQ ID NO: 13822 - protein, 15 aa, synthetic construct
EAAAKEAAAKEAAAK

SEQ ID NO: 13823 - protein, 6 aa, synthetic construct
GSSGGS

SEQ ID NO: 13824 - protein, 11 aa, synthetic construct
EAAAKPAPGGG

SEQ ID NO: 13825 - protein, 9 aa, synthetic construct
GSSPAPGGS

SEQ ID NO: 13826 - protein, 9 aa, synthetic construct
PAPGSSGGG

SEQ ID NO: 13827 - protein, 6 aa, synthetic construct
GSSGGG

SEQ ID NO: 13828 - protein, 9 aa, synthetic construct
PAPGGSGSS

SEQ ID NO: 13829 - protein, 6 aa, synthetic construct
PAPGSS

SEQ ID NO: 13830 - protein, 9 aa, synthetic construct
GGGGGSGSS

SEQ ID NO: 13831 - protein, 11 aa, synthetic construct
EAAAKGGGGSS

SEQ ID NO: 13832 - protein, 7 aa, synthetic construct
GGGGGGG

SEQ ID NO: 13833 - protein, 11 aa, synthetic construct
PAPEAAAKGSS

SEQ ID NO: 13834 - protein, 11 aa, synthetic construct
GGSGGGEAAAK

SEQ ID NO: 13835 - protein, 11 aa, synthetic construct
EAAAKGGGGGS

SEQ ID NO: 13836 - protein, 6 aa, synthetic construct
PAPGGS

SEQ ID NO: 13837 - protein, 4 aa, synthetic construct
GGGG

SEQ ID NO: 13838 - protein, 11 aa, synthetic construct
EAAAKGGSGSS

SEQ ID NO: 13839 - protein, 9 aa, synthetic construct
GGGGSSGGS

SEQ ID NO: 13840 - protein, 8 aa, synthetic construct
GGGGGGGG

SEQ ID NO: 13841 - protein, 9 aa, synthetic construct
GGSGSSGGG

SEQ ID NO: 13842 - protein, 11 aa, synthetic construct
GSSEAAAKGGS

SEQ ID NO: 13843 - protein, 11 aa, synthetic construct
EAAAKPAPGSS

SEQ ID NO: 13844 - protein, 9 aa, synthetic construct
GGSPAPGSS

SEQ ID NO: 13845 - protein, 9 aa, synthetic construct
PAPGSSGGG

SEQ ID NO: 13846 - protein, 11 aa, synthetic construct
EAAAKPAPGSS

SEQ ID NO: 13847 - protein, 11 aa, synthetic construct
GGSPAPEAAAK

SEQ ID NO: 13848 - protein, 6 aa, synthetic construct
GSSPAP

SEQ ID NO: 13849 - skipped

SEQ ID NO: 13850 - protein, 11 aa, synthetic construct
EAAAKPAPGGS

SEQ ID NO: 13851 - protein, 9 aa, synthetic construct
GGSGSSPAP

SEQ ID NO: 13852 - protein, 9 aa, synthetic construct
PAPGSSGGS

SEQ ID NO: 13853 - protein, 12 aa, synthetic construct
GSAGSAAGSGEF

SEQ ID NO: 13854 - protein, 11 aa, synthetic construct
GSSGGSEAAAK

SEQ ID NO: 13855 - protein, 6 aa, synthetic construct
GSSGGS

SEQ ID NO: 13856 - protein, 15 aa, synthetic construct
EAAAKGGGGSEAAAK

SEQ ID NO: 13857 - protein, 6 aa, synthetic construct
GSSGGS

SEQ ID NO: 13858 - protein, 11 aa, synthetic construct
GGSPAPEAAAK

SEQ ID NO: 13859 - protein, 11 aa, synthetic construct
GGSEAAAKGSS

SEQ ID NO: 13860 - protein, 11 aa, synthetic construct
GSSPAPEAAAK

SEQ ID NO: 13861 - protein, 9 aa, synthetic construct
GGSGSSGGG

SEQ ID NO: 13862 - protein, 4 aa, synthetic construct
GGGG

SEQ ID NO: 13863 - protein, 11 aa, synthetic construct
GGSEAAAKPAP

SEQ ID NO: 13864 - protein, 9 aa, synthetic construct
GSSGGSPAP

SEQ ID NO: 13865 - protein, 11 aa, synthetic construct
GSSGGSEAAAK

SEQ ID NO: 13866 - protein, 11 aa, synthetic construct
PAPEAAAKGGS

SEQ ID NO: 13867 - protein, 6 aa, synthetic construct
GGSPAP

SEQ ID NO: 13868 - protein, 8 aa, synthetic construct
GGSEAAAK

SEQ ID NO: 13869 - protein, 15 aa, synthetic construct
EAAAKGGGGSEAAAK

SEQ ID NO: 13870 - protein, 33 aa, synthetic construct; identical to SEQ ID NO: 5006

SEQ ID NO: 13871 - protein, 8 aa, synthetic construct
GSSEAAAK

SEQ ID NO: 13872 - skipped

SEQ ID NO: 13873 - protein, 11 aa, synthetic construct
GGSEAAAKGSS

SEQ ID NO: 13874 - protein, 11 aa, synthetic construct
GGSEAAAKGSS

SEQ ID NO: 13875 - protein, 11 aa, synthetic construct
GGSPAPEAAAK

SEQ ID NO: 13876 - protein, 11 aa, synthetic construct
GGSGGGEAAAK

SEQ ID NO: 13877 - protein, 11 aa, synthetic construct
GGSEAAAKPAP

SEQ ID NO: 13878 - protein, 11 aa, synthetic construct
EAAAKGGSGSS

SEQ ID NO: 13879 - protein, 11 aa, synthetic construct
GGGEAAAKGGS

SEQ ID NO: 13880 - protein, 15 aa, synthetic construct
EAAAKGGGGSEAAAK

SEQ ID NO: 13881 - protein, 6 aa, synthetic construct
GGSPAP

SEQ ID NO: 13882 - protein, 9 aa, synthetic construct
GGGGSSGGS

SEQ ID NO: 13883-13884 - skipped (2 entries)

SEQ ID NO: 13885 - protein, 10 aa, synthetic construct
GGGGSGGGGS

SEQ ID NO: 13886 - protein, 11 aa, synthetic construct
GGGEAAAKGGS

SEQ ID NO: 13887 - protein, 18 aa, synthetic construct
GSSGSSGSSGSSGSSGSS

SEQ ID NO: 13888 - protein, 6 aa, synthetic construct
PAPGSS

SEQ ID NO: 13889 - protein, 9 aa, synthetic construct
GGSGGSGGS

SEQ ID NO: 13890 - protein, 9 aa, synthetic construct
PAPGGSGGG

SEQ ID NO: 13891 - protein, 15 aa, synthetic construct
GGGGSGGGGSGGGGS

SEQ ID NO: 13892 - protein, 9 aa, synthetic construct
GGSGSSGGG

SEQ ID NO: 13893 - protein, 9 aa, synthetic construct
GGSGGSGGS

SEQ ID NO: 13894 - protein, 11 aa, synthetic construct
GGGEAAAKGGS

SEQ ID NO: 13895 - protein, 16 aa, synthetic construct
SGSETPGTSESATPES

SEQ ID NO: 13896 - protein, 11 aa, synthetic construct
EAAAKGGGGGS

SEQ ID NO: 13897 - protein, 11 aa, synthetic construct
EAAAKGSSPAP

SEQ ID NO: 13898 - protein, 4 aa, synthetic construct
GGGG

SEQ ID NO: 13899 - protein, 25 aa, synthetic construct
GGGGSGGGGSGGGGSGGGGSGGGGS

SEQ ID NO: 13900 - protein, 9 aa, synthetic construct
GSSGGSGGG

SEQ ID NO: 13901 - protein, 6 aa, synthetic construct
GGSGSS

SEQ ID NO: 13902 - protein, 8 aa, synthetic construct
EAAAKGGS

SEQ ID NO: 13903 - protein, 11 aa, synthetic construct
GSSEAAAKGGS

SEQ ID NO: 13904 - protein, 11 aa, synthetic construct
EAAAKPAPGGG

SEQ ID NO: 13905 - protein, 9 aa, synthetic construct
PAPGSSGGG

SEQ ID NO: 13906 - protein, 11 aa, synthetic construct
GGGGSSEAAAK

SEQ ID NO: 13907 - protein, 11 aa, synthetic construct
GSSEAAAKPAP

SEQ ID NO: 13908 - protein, 11 aa, synthetic construct
PAPGGGEAAAK

SEQ ID NO: 13909 - protein, 11 aa, synthetic construct
GGSGGGEAAAK

SEQ ID NO: 13910 - protein, 30 aa, synthetic construct; identical to SEQ ID NO: 5112

SEQ ID NO: 13911 - protein, 11 aa, synthetic construct
EAAAKGGGGGS

SEQ ID NO: 13912 - protein, 9 aa, synthetic construct
GGSPAPGGG

SEQ ID NO: 13913 - protein, 9 aa, synthetic construct
GSSGSSGSS

SEQ ID NO: 13914 - protein, 5 aa, synthetic construct
EAAAK

SEQ ID NO: 13915 - protein, 9 aa, synthetic construct
GGGGSSGGS

SEQ ID NO: 13916 - protein, 9 aa, synthetic construct
GGSGSSPAP

SEQ ID NO: 13917 - protein, 20 aa, synthetic construct
EAAAKEAAAKEAAAKEAAAK

SEQ ID NO: 13918 - protein, 9 aa, synthetic construct
GGGPAPGSS

SEQ ID NO: 13919 - protein, 9 aa, synthetic construct
GSSPAPGGS

SEQ ID NO: 13920 - protein, 5 aa, synthetic construct
PAPAP

SEQ ID NO: 13921 - protein, 9 aa, synthetic construct
PAPAPAPAP

SEQ ID NO: 13922 - protein, 11 aa, synthetic construct
GGGGGSEAAAK

SEQ ID NO: 13923 - protein, 9 aa, synthetic construct
GGGGGSGSS

SEQ ID NO: 13924 - protein, 11 aa, synthetic construct
GGGEAAAKGSS

SEQ ID NO: 13925 - protein, 9 aa, synthetic construct
GGGGGSPAP

SEQ ID NO: 13926 - protein, 11 aa, synthetic construct
GGGGGSEAAAK

SEQ ID NO: 13927 - skipped

SEQ ID NO: 13928 - protein, 7 aa, synthetic construct
GGGGGGG

SEQ ID NO: 13929 - protein, 16 aa, synthetic construct
SGSETPGTSESATPES

SEQ ID NO: 13930 - protein, 11 aa, synthetic construct
EAAAKGGSGGG

SEQ ID NO: 13931 - protein, 5 aa, synthetic construct
GGGGS

SEQ ID NO: 13932 - protein, 11 aa, synthetic construct
EAAAKGSSGGG

SEQ ID NO: 13933 - protein, 11 aa, synthetic construct
EAAAKPAPGGS

SEQ ID NO: 13934 - protein, 33 aa, synthetic construct; identical to SEQ ID NO: 5006

SEQ ID NO: 13935 - protein, 9 aa, synthetic construct
GGSPAPGGG

SEQ ID NO: 13936 - protein, 12 aa, synthetic construct
GSAGSAAGSGEF

SEQ ID NO: 13937 - protein, 9 aa, synthetic construct
GGGGSSGGS

SEQ ID NO: 13938 - protein, 7 aa, synthetic construct
GGGGGGG

SEQ ID NO: 13939 - protein, 8 aa, synthetic construct
GSSEAAAK

SEQ ID NO: 13940 - protein, 6 aa, synthetic construct
PAPGSS

SEQ ID NO: 13941 - protein, 6 aa, synthetic construct
GSSGGG

SEQ ID NO: 13942 - protein, 6 aa, synthetic construct
PAPGGG

SEQ ID NO: 13943 - protein, 9 aa, synthetic construct
GGGGGSPAP

SEQ ID NO: 13944 - protein, 8 aa, synthetic construct
GGSEAAAK

SEQ ID NO: 13945 - protein, 6 aa, synthetic construct
GSSGGG

SEQ ID NO: 13946 - protein, 12 aa, synthetic construct
GGSGGSGGSGGS

SEQ ID NO: 13947 - protein, 5 aa, synthetic construct
PAPAP

SEQ ID NO: 13948 - protein, 8 aa, synthetic construct
GGSEAAAK

SEQ ID NO: 13949 - protein, 5 aa, synthetic construct
GGGGS

SEQ ID NO: 13950 - protein, 4 aa, synthetic construct
GGGG

SEQ ID NO: 13951 - protein, 11 aa, synthetic construct
EAAAKGGGGSS

SEQ ID NO: 13952 - protein, 15 aa, synthetic construct
EAAAKEAAAKEAAAK

SEQ ID NO: 13953 - protein, 11 aa, synthetic construct
PAPGGGEAAAK

SEQ ID NO: 13954 - protein, 11 aa, synthetic construct
EAAAKGGSPAP

SEQ ID NO: 13955 - protein, 11 aa, synthetic construct
GGSGSSEAAAK

SEQ ID NO: 13956 - protein, 11 aa, synthetic construct
GGSPAPEAAAK

SEQ ID NO: 13957 - protein, 7 aa, synthetic construct
GGGGGGG

SEQ ID NO: 13958 - protein, 30 aa, synthetic construct; identical to SEQ ID NO: 5130

SEQ ID NO: 13959 - protein, 11 aa, synthetic construct
EAAAKGSSGGS

SEQ ID NO: 13960 - protein, 11 aa, synthetic construct
GSSEAAAKPAP

SEQ ID NO: 13961 - protein, 6 aa, synthetic construct
GGGGSS

SEQ ID NO: 13962 - protein, 11 aa, synthetic construct
EAAAKGGSGGG

SEQ ID NO: 13963 - protein, 6 aa, synthetic construct
GGSGGS

SEQ ID NO: 13964 - protein, 9 aa, synthetic construct
GGGGGSPAP

SEQ ID NO: 13965 - protein, 15 aa, synthetic construct
EAAAKEAAAKEAAAK

SEQ ID NO: 13966 - protein, 11 aa, synthetic construct
PAPEAAAKGGS

SEQ ID NO: 13967 - protein, 11 aa, synthetic construct
GSSGGSEAAAK

SEQ ID NO: 13968 - protein, 11 aa, synthetic construct
EAAAKGGSGGG

SEQ ID NO: 13969 - protein, 9 aa, synthetic construct
GGSGGGPAP

SEQ ID NO: 13970 - skipped

SEQ ID NO: 13971 - protein, 11 aa, synthetic construct
GGSEAAAKPAP

SEQ ID NO: 13972 - protein, 8 aa, synthetic construct
EAAAKGGG

SEQ ID NO: 13973 - protein, 12 aa, synthetic construct
GSSGSSGSSGSS

SEQ ID NO: 13974 - protein, 9 aa, synthetic construct
GGSGSSPAP

SEQ ID NO: 13975 - protein, 8 aa, synthetic construct
GGGEAAAK

SEQ ID NO: 13976 - protein, 9 aa, synthetic construct
GSSPAPGGS

SEQ ID NO: 13977 - protein, 11 aa, synthetic construct
GSSEAAAKGGG

SEQ ID NO: 13978 - protein, 11 aa, synthetic construct
EAAAKPAPGGS

SEQ ID NO: 13979 - protein, 11 aa, synthetic construct
GGSGGGEAAAK

SEQ ID NO: 13980 - protein, 6 aa, synthetic construct
GGSGSS

SEQ ID NO: 13981 - protein, 11 aa, synthetic construct
GGSGGGEAAAK

SEQ ID NO: 13982 - protein, 18 aa, synthetic construct
GGSGGSGGSGGSGGSGGS

SEQ ID NO: 13983 - protein, 11 aa, synthetic construct
PAPEAAAKGSS

SEQ ID NO: 13984 - protein, 11 aa, synthetic construct
EAAAKGSSGGS

SEQ ID NO: 13985 - protein, 11 aa, synthetic construct
GGSGSSEAAAK

SEQ ID NO: 13986 - protein, 11 aa, synthetic construct
GGSGSSEAAAK

SEQ ID NO: 13987 - protein, 9 aa, synthetic construct
GSSGGSGGG

SEQ ID NO: 13988 - protein, 11 aa, synthetic construct
EAAAKGGSGGG

SEQ ID NO: 13989 - protein, 6 aa, synthetic construct
GGSGGS

SEQ ID NO: 13990 - protein, 12 aa, synthetic construct
GSAGSAAGSGEF

SEQ ID NO: 13991 - protein, 6 aa, synthetic construct
GGSGSS

SEQ ID NO: 13992 - protein, 4 aa, synthetic construct
GGGG

SEQ ID NO: 13993 - protein, 20 aa, synthetic construct
GGGGSGGGGSGGGGSGGGGS

SEQ ID NO: 13994 - protein, 16 aa, synthetic construct
SGSETPGTSESATPES

SEQ ID NO: 13995 - protein, 20 aa, synthetic construct
EAAAKEAAAKEAAAKEAAAK

SEQ ID NO: 13996 - protein, 11 aa, synthetic construct
GGGEAAAKGGS

SEQ ID NO: 13997 - protein, 11 aa, synthetic construct
GSSGGSEAAAK

SEQ ID NO: 13998 - protein, 11 aa, synthetic construct
EAAAKGGGGSS

SEQ ID NO: 13999 - protein, 11 aa, synthetic construct
PAPGGSEAAAK

SEQ ID NO: 14000 - protein, 5 aa, synthetic construct
EAAAK

SEQ ID NO: 14001 - protein, 18 aa, synthetic construct
GSSGSSGSSGSSGSSGSS

SEQ ID NO: 14002 - protein, 4 aa, synthetic construct
GGGG

SEQ ID NO: 14003 - protein, 6 aa, synthetic construct
GSSGSS

SEQ ID NO: 14004 - protein, 9 aa, synthetic construct
GSSGGSPAP

SEQ ID NO: 14005 - protein, 9 aa, synthetic construct
GGSGGSGGS

SEQ ID NO: 14006 - protein, 11 aa, synthetic construct
EAAAKGGGPAP

SEQ ID NO: 14007 - protein, 10 aa, synthetic construct
GGGGSGGGGS

SEQ ID NO: 14008 - protein, 11 aa, synthetic construct
GGSEAAAKGSS

SEQ ID NO: 14009 - protein, 30 aa, synthetic construct; identical to SEQ ID NO: 5130

SEQ ID NO: 14010 - protein, 11 aa, synthetic construct
GGSGSSEAAAK

SEQ ID NO: 14011 - protein, 20 aa, synthetic construct
EAAAKEAAAKEAAAKEAAAK

SEQ ID NO: 14012 - protein, 11 aa, synthetic construct
GSSEAAAKGGS

SEQ ID NO: 14013 - protein, 6 aa, synthetic construct
GGSGSS

SEQ ID NO: 14014 - protein, 11 aa, synthetic construct
GGSGSSEAAAK

SEQ ID NO: 14015 - protein, 9 aa, synthetic construct
GSSGSSGSS

SEQ ID NO: 14016 - protein, 11 aa, synthetic construct
EAAAKGSSPAP

SEQ ID NO: 14017 - protein, 8 aa, synthetic construct
EAAAKPAP

SEQ ID NO: 14018 - protein, 11 aa, synthetic construct
GGSGSSEAAAK

SEQ ID NO: 14019 - protein, 30 aa, synthetic construct; identical to SEQ ID NO: 5112

SEQ ID NO: 14020 - protein, 15 aa, synthetic construct
GGGGSGGGGSGGGGS

SEQ ID NO: 14021 - protein, 7 aa, synthetic construct
GGGGGGG

SEQ ID NO: 14022 - protein, 8 aa, synthetic construct
EAAAKGSS

SEQ ID NO: 14023 - protein, 11 aa, synthetic construct
EAAAKGGGPAP

SEQ ID NO: 14024 - protein, 6 aa, synthetic construct
GSSGSS

SEQ ID NO: 14025 - protein, 11 aa, synthetic construct
EAAAKGGGGGS

SEQ ID NO: 14026 - protein, 11 aa, synthetic construct
GGSGGGEAAAK

SEQ ID NO: 14027 - protein, 6 aa, synthetic construct
PAPGSS

SEQ ID NO: 14028 - protein, 6 aa, synthetic construct
PAPGSS

SEQ ID NO: 14029 - protein, 9 aa, synthetic construct
GGSPAPGSS

SEQ ID NO: 14030 - protein, 11 aa, synthetic construct
GGGGSSEAAAK

SEQ ID NO: 14031 - protein, 9 aa, synthetic construct
GSSGGGGGS

SEQ ID NO: 14032 - protein, 11 aa, synthetic construct
EAAAKGSSPAP

SEQ ID NO: 14033 - protein, 9 aa, synthetic construct
GSSPAPGGS

SEQ ID NO: 14034 - protein, 6 aa, synthetic construct
GGGGGG

SEQ ID NO: 14035 - protein, 11 aa, synthetic construct
EAAAKGGGGSS

SEQ ID NO: 14036 - protein, 11 aa, synthetic construct
PAPGGSEAAAK

SEQ ID NO: 14037 - protein, 33 aa, synthetic construct; identical to SEQ ID NO: 5006

SEQ ID NO: 14038 - protein, 12 aa, synthetic construct
GSSGSSGSSGSS

SEQ ID NO: 14039 - protein, 11 aa, synthetic construct
EAAAKGSSGGG

SEQ ID NO: 14040 - protein, 11 aa, synthetic construct
GGSEAAAKPAP

SEQ ID NO: 14041 - protein, 15 aa, synthetic construct
GSSGSSGSSGSSGSS

SEQ ID NO: 14042 - protein, 11 aa, synthetic construct
GGGEAAAKPAP

SEQ ID NO: 14043 - protein, 9 aa, synthetic construct
PAPGSSGGG

SEQ ID NO: 14044 - protein, 6 aa, synthetic construct
GSSGSS

SEQ ID NO: 14045 - protein, 8 aa, synthetic construct
PAPEAAAK

SEQ ID NO: 14046 - protein, 9 aa, synthetic construct
GGGPAPGSS

SEQ ID NO: 14047 - protein, 9 aa, synthetic construct
GSSGGSPAP

SEQ ID NO: 14048 - protein, 6 aa, synthetic construct
GGGGSS

SEQ ID NO: 14049 - protein, 11 aa, synthetic construct
PAPEAAAKGSS

SEQ ID NO: 14050 - protein, 9 aa, synthetic construct
GGSGGGPAP

SEQ ID NO: 14051 - protein, 6 aa, synthetic construct
PAPGGS

SEQ ID NO: 14052 - protein, 11 aa, synthetic construct
EAAAKGGGGGS

SEQ ID NO: 14053 - protein, 9 aa, synthetic construct
GSSGGSPAP

SEQ ID NO: 14054 - protein, 9 aa, synthetic construct
GSSGGGGGS

SEQ ID NO: 14055 - protein, 11 aa, synthetic construct
GGGEAAAKGGS

SEQ ID NO: 14056 - protein, 11 aa, synthetic construct
GGGEAAAKGSS

SEQ ID NO: 14057 - protein, 11 aa, synthetic construct
PAPEAAAKGSS

SEQ ID NO: 14058 - protein, 15 aa, synthetic construct
GSSGSSGSSGSSGSS

SEQ ID NO: 14059 - protein, 9 aa, synthetic construct
GGSPAPGSS

SEQ ID NO: 14060 - protein, 11 aa, synthetic construct
EAAAKGSSPAP

SEQ ID NO: 14061 - protein, 18 aa, synthetic construct
GGSGGSGGSGGSGGSGGS

SEQ ID NO: 14062 - protein, 11 aa, synthetic construct
GGGGSSEAAAK

SEQ ID NO: 14063 - protein, 9 aa, synthetic construct
GGGGSSPAP

SEQ ID NO: 14064 - protein, 9 aa, synthetic construct
GSSGGSPAP

SEQ ID NO: 14065 - protein, 9 aa, synthetic construct
GGGPAPGSS

SEQ ID NO: 14066 - protein, 9 aa, synthetic construct
PAPGSSGGS

SEQ ID NO: 14067 - protein, 9 aa, synthetic construct
GGGGGSPAP

SEQ ID NO: 14068 - protein, 16 aa, synthetic construct
SGSETPGTSESATPES

SEQ ID NO: 14069 - protein, 15 aa, synthetic construct
GSSGSSGSSGSSGSS

SEQ ID NO: 14070 - protein, 9 aa, synthetic construct
GSSPAPGGG

SEQ ID NO: 14071 - protein, 13 aa, synthetic construct
PAPAPAPAPAPAP

SEQ ID NO: 14072 - protein, 9 aa, synthetic construct
GGGPAPGGS

SEQ ID NO: 14073 - protein, 11 aa, synthetic construct
PAPGGSEAAAK

SEQ ID NO: 14074 - protein, 11 aa, synthetic construct
GGGGSSEAAAK

SEQ ID NO: 14075 - protein, 9 aa, synthetic construct
GGSPAPGGG

SEQ ID NO: 14076 - protein, 11 aa, synthetic construct
GSSPAPEAAAK

SEQ ID NO: 14077 - protein, 8 aa, synthetic construct
GGGEAAAK

SEQ ID NO: 14078 - protein, 11 aa, synthetic construct
PAPEAAAKGGG

SEQ ID NO: 14079 - protein, 9 aa, synthetic construct
GGSPAPGGG

SEQ ID NO: 14080 - protein, 9 aa, synthetic construct
GGSGGGGSS

SEQ ID NO: 14081 - protein, 11 aa, synthetic construct
GSSPAPEAAAK

SEQ ID NO: 14082 - protein, 9 aa, synthetic construct
GGSPAPGGG

SEQ ID NO: 14083 - protein, 9 aa, synthetic construct
PAPGGSGSS

SEQ ID NO: 14084 - protein, 6 aa, synthetic construct
GSSPAP

SEQ ID NO: 14085 - protein, 16 aa, synthetic construct
SGSETPGTSESATPES

SEQ ID NO: 14086 - protein, 9 aa, synthetic construct
GSSGSSGSS

SEQ ID NO: 14087 - protein, 9 aa, synthetic construct
PAPGSSGGS

SEQ ID NO: 14088 - protein, 6 aa, synthetic construct
PAPGGS

SEQ ID NO: 14089 - protein, 11 aa, synthetic construct
PAPEAAAKGGG

SEQ ID NO: 14090 - protein, 9 aa, synthetic construct
GGSGGSGGS

SEQ ID NO: 14091 - protein, 6 aa, synthetic construct
PAPGGS

SEQ ID NO: 14092 - protein, 9 aa, synthetic construct
GSSGGSPAP

SEQ ID NO: 14093 - protein, 9 aa, synthetic construct
GSSGGGGGS

SEQ ID NO: 14094 - protein, 9 aa, synthetic construct
GGGGGSPAP

SEQ ID NO: 14095 - protein, 11 aa, synthetic construct
EAAAKPAPGSS

SEQ ID NO: 14096 - protein, 11 aa, synthetic construct
EAAAKGGSPAP

SEQ ID NO: 14097 - protein, 11 aa, synthetic construct
GGGPAPEAAAK

SEQ ID NO: 14098 - protein, 11 aa, synthetic construct
GGSEAAAKGSS

SEQ ID NO: 14099 - protein, 11 aa, synthetic construct
PAPEAAAKGSS

SEQ ID NO: 14100 - protein, 11 aa, synthetic construct
PAPEAAAKGGS

SEQ ID NO: 14101 - protein, 6 aa, synthetic construct
GSSGGG

SEQ ID NO: 14102 - protein, 11 aa, synthetic construct
EAAAKGGGGSS

SEQ ID NO: 14103 - protein, 11 aa, synthetic construct
EAAAKGGSPAP

SEQ ID NO: 14104 - protein, 9 aa, synthetic construct
GGGGSSGGS

SEQ ID NO: 14105 - protein, 11 aa, synthetic construct
PAPEAAAKGSS

SEQ ID NO: 14106 - protein, 11 aa, synthetic construct
EAAAKGGGGGS

SEQ ID NO: 14107 - protein, 9 aa, synthetic construct
GSSGGGGGS

SEQ ID NO: 14108 - protein, 9 aa, synthetic construct
PAPAPAPAP

SEQ ID NO: 14109 - protein, 12 aa, synthetic construct
GGSGGSGGSGGS

SEQ ID NO: 14110 - protein, 9 aa, synthetic construct
PAPAPAPAP

SEQ ID NO: 14111 - protein, 11 aa, synthetic construct
GSSEAAAKPAP

SEQ ID NO: 14112 - protein, 11 aa, synthetic construct
GGSGGGEAAAK

SEQ ID NO: 14113 - protein, 9 aa, synthetic construct
GSSGGSGGG

SEQ ID NO: 14114 - protein, 9 aa, synthetic construct
GGGGGSPAP

SEQ ID NO: 14115 - protein, 11 aa, synthetic construct
GGGEAAAKGSS

SEQ ID NO: 14116 - protein, 9 aa, synthetic construct
GGGGSSPAP

SEQ ID NO: 14117 - protein, 6 aa, synthetic construct
GGSGGG

SEQ ID NO: 14118 - protein, 6 aa, synthetic construct
GGGGSS

SEQ ID NO: 14119 - protein, 11 aa, synthetic construct
EAAAKGSSGGS

SEQ ID NO: 14120 - protein, 9 aa, synthetic construct
GSSGGGGGS

SEQ ID NO: 14121 - protein, 11 aa, synthetic construct
EAAAKGSSGGS

SEQ ID NO: 14122 - protein, 10 aa, synthetic construct
EAAAKEAAAK

SEQ ID NO: 14123 - protein, 11 aa, synthetic construct
GSSGGGEAAAK

SEQ ID NO: 14124 - protein, 9 aa, synthetic construct
GSSPAPGGG

SEQ ID NO: 14125 - protein, 15 aa, synthetic construct
GGGGSGGGGSGGGGS

SEQ ID NO: 14126 - protein, 20 aa, synthetic construct
EAAAKEAAAKEAAAKEAAAK

SEQ ID NO: 14127 - protein, 11 aa, synthetic construct
EAAAKGGSGSS

SEQ ID NO: 14128 - protein, 8 aa, synthetic construct
PAPEAAAK

SEQ ID NO: 14129 - protein, 6 aa, synthetic construct
GSSGGG

SEQ ID NO: 14130 - protein, 11 aa, synthetic construct
GGSGGGEAAAK

SEQ ID NO: 14131 - protein, 5 aa, synthetic construct
EAAAK

SEQ ID NO: 14132 - protein, 9 aa, synthetic construct
GGGGSSPAP

SEQ ID NO: 14133 - skipped

SEQ ID NO: 14134 - protein, 11 aa, synthetic construct
PAPEAAAKGSS

SEQ ID NO: 14135 - protein, 9 aa, synthetic construct
GGGGGSPAP

SEQ ID NO: 14136 - protein, 9 aa, synthetic construct
GSSGSSGSS

SEQ ID NO: 14137 - protein, 20 aa, synthetic construct
GGGGSGGGGSGGGGSGGGGS

SEQ ID NO: 14138 - protein, 11 aa, synthetic construct
GGGGSSEAAAK

SEQ ID NO: 14139 - protein, 20 aa, synthetic construct
GGGGSGGGGSGGGGSGGGGS

SEQ ID NO: 14140 - protein, 11 aa, synthetic construct
PAPGSSEAAAK

SEQ ID NO: 14141 - protein, 9 aa, synthetic construct
GGGGGSGSS

SEQ ID NO: 14142 - protein, 11 aa, synthetic construct
GGSEAAAKGGG

SEQ ID NO: 14143 - protein, 9 aa, synthetic construct
PAPGSSGGG

SEQ ID NO: 14144 - skipped

SEQ ID NO: 14145 - protein, 11 aa, synthetic construct
EAAAKGGSGSS

SEQ ID NO: 14146 - protein, 8 aa, synthetic construct
GGGEAAAK

SEQ ID NO: 14147 - protein, 11 aa, synthetic construct
GGSEAAAKPAP

SEQ ID NO: 14148 - protein, 16 aa, synthetic construct
SGSETPGTSESATPES

SEQ ID NO: 14149 - protein, 11 aa, synthetic construct
EAAAKPAPGGS

SEQ ID NO: 14150 - protein, 11 aa, synthetic construct
EAAAKGGGGGS

SEQ ID NO: 14151 - protein, 5 aa, synthetic construct
GGGGS

SEQ ID NO: 14152 - protein, 11 aa, synthetic construct
GGSEAAAKGSS

SEQ ID NO: 14153 - protein, 11 aa, synthetic construct
GGSEAAAKGGG

SEQ ID NO: 14154 - protein, 18 aa, synthetic construct
GGSGGSGGSGGSGGSGGS

SEQ ID NO: 14155 - protein, 11 aa, synthetic construct
GGSEAAAKGSS

SEQ ID NO: 14156 - protein, 11 aa, synthetic construct
GGGEAAAKPAP

SEQ ID NO: 14157 - protein, 8 aa, synthetic construct
GGSEAAAK

SEQ ID NO: 14158 - protein, 9 aa, synthetic construct
GGSPAPGSS

SEQ ID NO: 14159 - protein, 11 aa, synthetic construct
GSSPAPEAAAK

SEQ ID NO: 14160 - protein, 6 aa, synthetic construct
GGSGSS

SEQ ID NO: 14161 - protein, 9 aa, synthetic construct
PAPGGGGGS

SEQ ID NO: 14162 - protein, 11 aa, synthetic construct
PAPEAAAKGSS

SEQ ID NO: 14163 - protein, 11 aa, synthetic construct
GGSGGGEAAAK

SEQ ID NO: 14164 - protein, 6 aa, synthetic construct
PAPGGG

SEQ ID NO: 14165 - protein, 8 aa, synthetic construct
EAAAKGGG

SEQ ID NO: 14166 - protein, 12 aa, synthetic construct
GSSGSSGSSGSS

SEQ ID NO: 14167 - protein, 11 aa, synthetic construct
EAAAKGGSGGG

SEQ ID NO: 14168 - protein, 9 aa, synthetic construct
GSSPAPGGS

SEQ ID NO: 14169 - protein, 9 aa, synthetic construct
GSSPAPGGS

SEQ ID NO: 14170 - protein, 6 aa, synthetic construct
GGGPAP

SEQ ID NO: 14171 - protein, 6 aa, synthetic construct
GGGPAP

SEQ ID NO: 14172 - protein, 9 aa, synthetic construct
GGSPAPGSS

SEQ ID NO: 14173 - protein, 5 aa, synthetic construct
PAPAP

SEQ ID NO: 14174 - protein, 7 aa, synthetic construct
GGGGGGG

SEQ ID NO: 14175 - protein, 5 aa, synthetic construct
GGGGG

SEQ ID NO: 14176 - protein, 12 aa, synthetic construct
GSAGSAAGSGEF

SEQ ID NO: 14177 - protein, 5 aa, synthetic construct
PAPAP

SEQ ID NO: 14178 - protein, 11 aa, synthetic construct
GGSEAAAKGGG

SEQ ID NO: 14179 - protein, 5 aa, synthetic construct
PAPAP

SEQ ID NO: 14180 - protein, 15 aa, synthetic construct
GGGGSGGGGSGGGGS

SEQ ID NO: 14181 - protein, 6 aa, synthetic construct
PAPGGS

SEQ ID NO: 14182 - protein, 11 aa, synthetic construct
GGGEAAAKPAP

SEQ ID NO: 14183 - protein, 6 aa, synthetic construct
GGGGGS

SEQ ID NO: 14184 - protein, 11 aa, synthetic construct
GSSEAAAKGGG

SEQ ID NO: 14185 - protein, 11 aa, synthetic construct
EAAAKGGGGSS

SEQ ID NO: 14186 - protein, 6 aa, synthetic construct
GSSGGS

SEQ ID NO: 14187 - protein, 6 aa, synthetic construct
GSSGGG

SEQ ID NO: 14188 - protein, 7 aa, synthetic construct
PAPAPAP

SEQ ID NO: 14189 - protein, 4 aa, synthetic construct
GGGG

SEQ ID NO: 14190 - protein, 11 aa, synthetic construct
EAAAKPAPGGS

SEQ ID NO: 14191 - protein, 10 aa, synthetic construct
GGGGSGGGGS

SEQ ID NO: 14192 - protein, 8 aa, synthetic construct
EAAAKGGG

SEQ ID NO: 14193 - protein, 9 aa, synthetic construct
GGGGSSPAP

SEQ ID NO: 14194 - protein, 11 aa, synthetic construct
GSSEAAAKGGG

SEQ ID NO: 14195 - protein, 5 aa, synthetic construct
GGGGG

SEQ ID NO: 14196 - protein, 11 aa, synthetic construct
GGGEAAAKGSS

SEQ ID NO: 14197 - protein, 9 aa, synthetic construct
GSSGSSGSS

SEQ ID NO: 14198 - protein, 9 aa, synthetic construct
GSSGGSPAP

SEQ ID NO: 14199 - protein, 8 aa, synthetic construct
EAAAKGGS

SEQ ID NO: 14200 - protein, 11 aa, synthetic construct
GGSPAPEAAAK

SEQ ID NO: 14201 - protein, 8 aa, synthetic construct
GGSEAAAK

SEQ ID NO: 14202 - protein, 6 aa, synthetic construct
GSSGGS

SEQ ID NO: 14203 - protein, 11 aa, synthetic construct
GGGPAPEAAAK

SEQ ID NO: 14204 - protein, 6 aa, synthetic construct
PAPGSS

SEQ ID NO: 14205 - protein, 11 aa, synthetic construct
GGSEAAAKGSS

SEQ ID NO: 14206 - protein, 25 aa, synthetic construct
EAAAKEAAAKEAAAKEAAAKEAAAK

SEQ ID NO: 14207 - protein, 11 aa, synthetic construct
GSSEAAAKGGG

SEQ ID NO: 14208 - protein, 15 aa, synthetic construct
GGGGSEAAAKGGGGS

SEQ ID NO: 14209 - protein, 9 aa, synthetic construct
GGSGGSGGS

SEQ ID NO: 14210 - protein, 9 aa, synthetic construct
GGGGGSGSS

SEQ ID NO: 14211 - protein, 20 aa, synthetic construct
GGGGSGGGGSGGGGSGGGGS

SEQ ID NO: 14212 - protein, 8 aa, synthetic construct
EAAAKGGG

SEQ ID NO: 14213 - protein, 11 aa, synthetic construct
GGSEAAAKGGG

SEQ ID NO: 14214 - protein, 9 aa, synthetic construct
GSSGGSGGG

SEQ ID NO: 14215 - protein, 6 aa, synthetic construct
GGGGGS

SEQ ID NO: 14216 - protein, 12 aa, synthetic construct
GSAGSAAGSGEF

SEQ ID NO: 14217 - protein, 11 aa, synthetic construct
PAPEAAAKGSS

SEQ ID NO: 14218 - protein, 9 aa, synthetic construct
GSSPAPGGG

SEQ ID NO: 14219 - protein, 9 aa, synthetic construct
GGGGSSPAP

SEQ ID NO: 14220 - protein, 9 aa, synthetic construct
PAPGGSGGG

SEQ ID NO: 14221 - protein, 6 aa, synthetic construct
GSSPAP

SEQ ID NO: 14222 - protein, 6 aa, synthetic construct
PAPGSS

SEQ ID NO: 14223 - protein, 9 aa, synthetic construct
GGSGGGGSS

SEQ ID NO: 14224 - protein, 6 aa, synthetic construct
GSSGGS

SEQ ID NO: 14225 - protein, 11 aa, synthetic construct
EAAAKGGGGGS

SEQ ID NO: 14226 - protein, 5 aa, synthetic construct
GGGGG

SEQ ID NO: 14227 - protein, 8 aa, synthetic construct
EAAAKGSS

SEQ ID NO: 14228 - protein, 25 aa, synthetic construct
EAAAKEAAAKEAAAKEAAAKEAAAK

SEQ ID NO: 14229 - protein, 20 aa, synthetic construct
EAAAKEAAAKEAAAKEAAAK

SEQ ID NO: 14230 - protein, 12 aa, synthetic construct
GSAGSAAGSGEF

SEQ ID NO: 14231 - protein, 9 aa, synthetic construct
GGGPAPGGS

SEQ ID NO: 14232 - protein, 11 aa, synthetic construct
GGSEAAAKGGG

SEQ ID NO: 14233 - protein, 11 aa, synthetic construct
PAPGGGEAAAK

SEQ ID NO: 14234 - protein, 11 aa, synthetic construct
EAAAKPAPGSS

SEQ ID NO: 14235 - protein, 8 aa, synthetic construct
GGSEAAAK

SEQ ID NO: 14236 - protein, 6 aa, synthetic construct
GGSGSS

SEQ ID NO: 14237 - protein, 11 aa, synthetic construct
GGSPAPEAAAK

SEQ ID NO: 14238 - protein, 5 aa, synthetic construct
GGGGS

SEQ ID NO: 14239 - protein, 9 aa, synthetic construct
GGSPAPGGG

SEQ ID NO: 14240 - protein, 11 aa, synthetic construct
EAAAKPAPGGS

SEQ ID NO: 14241 - protein, 6 aa, synthetic construct
GSSPAP

SEQ ID NO: 14242 - protein, 9 aa, synthetic construct
GGSGSSGGG

SEQ ID NO: 14243 - protein, 6 aa, synthetic construct
PAPGGG

SEQ ID NO: 14244 - protein, 11 aa, synthetic construct
GSSGGSEAAAK

SEQ ID NO: 14245 - protein, 8 aa, synthetic construct
GGSEAAAK

SEQ ID NO: 14246 - protein, 9 aa, synthetic construct
GGGPAPGGS

SEQ ID NO: 14247 - protein, 12 aa, synthetic construct
GSAGSAAGSGEF

SEQ ID NO: 14248 - protein, 11 aa, synthetic construct
EAAAKPAPGGS

SEQ ID NO: 14249 - protein, 6 aa, synthetic construct
PAPGGG

SEQ ID NO: 14250 - protein, 11 aa, synthetic construct
GSSPAPEAAAK

SEQ ID NO: 14251 - protein, 8 aa, synthetic construct
PAPEAAAK

SEQ ID NO: 14252 - protein, 9 aa, synthetic construct
PAPGGGGGS

SEQ ID NO: 14253 - protein, 11 aa, synthetic construct
GGSEAAAKPAP

SEQ ID NO: 14254 - protein, 8 aa, synthetic construct
EAAAKGSS

SEQ ID NO: 14255 - protein, 8 aa, synthetic construct
GGGEAAAK

SEQ ID NO: 14256 - protein, 15 aa, synthetic construct
EAAAKEAAAKEAAAK

SEQ ID NO: 14257 - protein, 11 aa, synthetic construct
PAPEAAAKGGG

SEQ ID NO: 14258 - protein, 7 aa, synthetic construct
PAPAPAP

SEQ ID NO: 14259 - protein, 11 aa, synthetic construct
EAAAKPAPGGS

SEQ ID NO: 14260 - protein, 10 aa, synthetic construct
GGGGSGGGGS

SEQ ID NO: 14261 - protein, 15 aa, synthetic construct
GGGGSEAAAKGGGGS

SEQ ID NO: 14262 - protein, 5 aa, synthetic construct
EAAAK

SEQ ID NO: 14263 - protein, 7 aa, synthetic construct
PAPAPAP

SEQ ID NO: 14264 - protein, 15 aa, synthetic construct
GGGGSEAAAKGGGGS

SEQ ID NO: 14265 - protein, 11 aa, synthetic construct
GGSPAPEAAAK

SEQ ID NO: 14266 - protein, 9 aa, synthetic construct
GGSGSSGGG

SEQ ID NO: 14267 - protein, 9 aa, synthetic construct
GGSPAPGSS

SEQ ID NO: 14268 - protein, 33 aa, synthetic construct; identical to SEQ ID NO: 5006

SEQ ID NO: 14269 - protein, 11 aa, synthetic construct
EAAAKGGGPAP

SEQ ID NO: 14270 - protein, 11 aa, synthetic construct
GSSGGSEAAAK

SEQ ID NO: 14271 - protein, 16 aa, synthetic construct
SGSETPGTSESATPES

SEQ ID NO: 14272 - protein, 25 aa, synthetic construct
EAAAKEAAAKEAAAKEAAAKEAAAK

SEQ ID NO: 14273 - protein, 9 aa, synthetic construct
GSSGSSGSS

SEQ ID NO: 14274 - protein, 9 aa, synthetic construct
GSSPAPGGG

SEQ ID NO: 14275 - protein, 11 aa, synthetic construct
GSSGGGEAAAK

SEQ ID NO: 14276 - protein, 9 aa, synthetic construct
GGSGGGGSS

SEQ ID NO: 14277 - protein, 11 aa, synthetic construct
GSSGGGEAAAK

SEQ ID NO: 14278 - protein, 11 aa, synthetic construct
GSSEAAAKGGG

SEQ ID NO: 14279 - protein, 9 aa, synthetic construct
GGSGGGGSS

SEQ ID NO: 14280 - protein, 9 aa, synthetic construct
GGSGSSPAP

SEQ ID NO: 14281 - protein, 6 aa, synthetic construct
GSSPAP

SEQ ID NO: 14282 - protein, 11 aa, synthetic construct
GGGGSSEAAAK

SEQ ID NO: 14283 - skipped

SEQ ID NO: 14284 - protein, 10 aa, synthetic construct
EAAAKEAAAK

SEQ ID NO: 14285 - protein, 9 aa, synthetic construct
PAPAPAPAP

SEQ ID NO: 14286 - protein, 11 aa, synthetic construct
GGSEAAAKGGG

SEQ ID NO: 14287 - protein, 6 aa, synthetic construct
PAPGGG

SEQ ID NO: 14288 - protein, 8 aa, synthetic construct
EAAAKGSS

SEQ ID NO: 14289 - protein, 10 aa, synthetic construct
GGGGSGGGGS

SEQ ID NO: 14290 - protein, 9 aa, synthetic construct
GGSGGSGGS

SEQ ID NO: 14291 - protein, 5 aa, synthetic construct
EAAAK

SEQ ID NO: 14292 - protein, 9 aa, synthetic construct
GGGGSSGGS

SEQ ID NO: 14293 - protein, 11 aa, synthetic construct
GGGPAPEAAAK

SEQ ID NO: 14294 - protein, 15 aa, synthetic construct
EAAAKEAAAKEAAAK

SEQ ID NO: 14295 - protein, 11 aa, synthetic construct
GSSEAAAKGGG

SEQ ID NO: 14296 - protein, 9 aa, synthetic construct
GGGPAPGGS

SEQ ID NO: 14297 - protein, 11 aa, synthetic construct
GGSEAAAKGGG

SEQ ID NO: 14298 - protein, 11 aa, synthetic construct
EAAAKGGGGGS

SEQ ID NO: 14299 - protein, 11 aa, synthetic construct
EAAAKGGSGGG

SEQ ID NO: 14300 - protein, 11 aa, synthetic construct
GGSEAAAKGGG

SEQ ID NO: 14301 - protein, 5 aa, synthetic construct
GGGGS

SEQ ID NO: 14302 - protein, 6 aa, synthetic construct
GSSGGS

SEQ ID NO: 14303 - protein, 6 aa, synthetic construct
GSSGSS

SEQ ID NO: 14304 - protein, 9 aa, synthetic construct
GGSPAPGGG

SEQ ID NO: 14305 - protein, 9 aa, synthetic construct
GSSGGGGGS

SEQ ID NO: 14306 - protein, 9 aa, synthetic construct
PAPAPAPAP

SEQ ID NO: 14307 - protein, 5 aa, synthetic construct
PAPAP

SEQ ID NO: 14308 - protein, 9 aa, synthetic construct
PAPGSSGGS

SEQ ID NO: 14309 - protein, 9 aa, synthetic construct
PAPGSSGGG

SEQ ID NO: 14310 - protein, 8 aa, synthetic construct
GGGEAAAK

SEQ ID NO: 14311 - protein, 15 aa, synthetic construct
GGSGGSGGSGGSGGS

SEQ ID NO: 14312 - protein, 6 aa, synthetic construct
GGSGGG

SEQ ID NO: 14313 - protein, 11 aa, synthetic construct
PAPEAAAKGGG

SEQ ID NO: 14314 - skipped

SEQ ID NO: 14315 - protein, 9 aa, synthetic construct
PAPGGSGSS

SEQ ID NO: 14316 - protein, 30 aa, synthetic construct; identical to SEQ ID NO: 5130

SEQ ID NO: 14317 - protein, 12 aa, synthetic construct
GSSGSSGSSGSS

SEQ ID NO: 14318 - protein, 15 aa, synthetic construct
GSSGSSGSSGSSGSS

SEQ ID NO: 14319 - protein, 11 aa, synthetic construct
GGGEAAAKPAP

SEQ ID NO: 14320 - protein, 9 aa, synthetic construct
PAPGSSGGG

SEQ ID NO: 14321 - protein, 9 aa, synthetic construct
PAPGGSGSS

SEQ ID NO: 14322 - protein, 11 aa, synthetic construct
PAPAPAPAPAP

SEQ ID NO: 14323 - protein, 11 aa, synthetic construct
GGSGGGEAAAK

SEQ ID NO: 14324 - protein, 6 aa, synthetic construct
GSSPAP

SEQ ID NO: 14325 - protein, 8 aa, synthetic construct
EAAAKPAP

SEQ ID NO: 14326 - protein, 20 aa, synthetic construct
GGGGSGGGGSGGGGSGGGGS

SEQ ID NO: 14327 - protein, 6 aa, synthetic construct
GGSGGG

SEQ ID NO: 14328 - protein, 9 aa, synthetic construct
GGSGGSGGS

SEQ ID NO: 14329 - protein, 8 aa, synthetic construct
GGGGGGGG

SEQ ID NO: 14330 - protein, 6 aa, synthetic construct
GGGGSS

SEQ ID NO: 14331 - protein, 9 aa, synthetic construct
GSSGGGGGS

SEQ ID NO: 14332 - protein, 30 aa, synthetic construct; identical to SEQ ID NO: 5130

SEQ ID NO: 14333 - protein, 9 aa, synthetic construct
GSSGSSGSS

SEQ ID NO: 14334 - protein, 9 aa, synthetic construct
GSSPAPGGS

SEQ ID NO: 14335 - protein, 7 aa, synthetic construct
PAPAPAP

SEQ ID NO: 14336 - protein, 20 aa, synthetic construct
EAAAKEAAAKEAAAKEAAAK

SEQ ID NO: 14337 - protein, 9 aa, synthetic construct
PAPAPAPAP

SEQ ID NO: 14338 - protein, 6 aa, synthetic construct
GGGGSS

SEQ ID NO: 14339 - protein, 15 aa, synthetic construct
GSSGSSGSSGSSGSS

SEQ ID NO: 14340 - protein, 6 aa, synthetic construct
PAPGGS

SEQ ID NO: 14341 - protein, 11 aa, synthetic construct
GSSEAAAKGGG

SEQ ID NO: 14342 - protein, 9 aa, synthetic construct
GSSGGSPAP

SEQ ID NO: 14343 - protein, 18 aa, synthetic construct
GSSGSSGSSGSSGSSGSS

SEQ ID NO: 14344 - protein, 9 aa, synthetic construct
GGSGSSGGG

SEQ ID NO: 14345 - protein, 9 aa, synthetic construct
GGGPAPGSS

SEQ ID NO: 14346 - protein, 11 aa, synthetic construct
GSSEAAAKGGS

SEQ ID NO: 14347 - protein, 11 aa, synthetic construct
GSSEAAAKGGG

SEQ ID NO: 14348 - protein, 9 aa, synthetic construct
GGSGGGPAP

SEQ ID NO: 14349 - protein, 6 aa, synthetic construct
GSSGSS

SEQ ID NO: 14350 - protein, 9 aa, synthetic construct
PAPGGGGGS

SEQ ID NO: 14351 - protein, 11 aa, synthetic construct
EAAAKPAPGGS

SEQ ID NO: 14352 - protein, 6 aa, synthetic construct
GSSGSS

SEQ ID NO: 14353 - protein, 11 aa, synthetic construct
EAAAKPAPGGS

SEQ ID NO: 14354 - protein, 11 aa, synthetic construct
GGGPAPEAAAK

SEQ ID NO: 14355 - protein, 11 aa, synthetic construct
GSSEAAAKGGG

SEQ ID NO: 14356 - protein, 11 aa, synthetic construct
GGGEAAAKGGS

SEQ ID NO: 14357 - protein, 6 aa, synthetic construct
GSSGSS

SEQ ID NO: 14358 - protein, 15 aa, synthetic construct
EAAAKEAAAKEAAAK

SEQ ID NO: 14359 - protein, 9 aa, synthetic construct
PAPGSSGGS

SEQ ID NO: 14360 - protein, 11 aa, synthetic construct
PAPAPAPAPAP

SEQ ID NO: 14361 - protein, 8 aa, synthetic construct
GSSEAAAK

SEQ ID NO: 14362 - skipped

SEQ ID NO: 14363 - protein, 11 aa, synthetic construct
GGSEAAAKGGG

SEQ ID NO: 14364 - protein, 9 aa, synthetic construct
GGSGGGPAP

SEQ ID NO: 14365 - protein, 6 aa, synthetic construct
GSSGSS

SEQ ID NO: 14366 - protein, 8 aa, synthetic construct
GGSEAAAK

SEQ ID NO: 14367 - protein, 11 aa, synthetic construct
GSSEAAAKGGS

SEQ ID NO: 14368 - protein, 9 aa, synthetic construct
PAPGGGGGS

SEQ ID NO: 14369 - protein, 6 aa, synthetic construct
GSSGGG

SEQ ID NO: 14370 - protein, 6 aa, synthetic construct
GSSGGS

SEQ ID NO: 14371 - protein, 6 aa, synthetic construct
PAPGGG

SEQ ID NO: 14372 - protein, 9 aa, synthetic construct
PAPGSSGGG

SEQ ID NO: 14373 - protein, 8 aa, synthetic construct
GGSEAAAK

SEQ ID NO: 14374 - protein, 11 aa, synthetic construct
GSSPAPEAAAK

SEQ ID NO: 14375 - protein, 9 aa, synthetic construct
GSSGGSPAP

SEQ ID NO: 14376 - protein, 9 aa, synthetic construct
GGSPAPGSS

SEQ ID NO: 14377 - protein, 9 aa, synthetic construct
GGSGGSGGS

SEQ ID NO: 14378 - protein, 9 aa, synthetic construct
GGSGGGPAP

SEQ ID NO: 14379 - protein, 11 aa, synthetic construct
GGGPAPEAAAK

SEQ ID NO: 14380 - protein, 5 aa, synthetic construct
GGGGS

SEQ ID NO: 14381 - protein, 9 aa, synthetic construct
GSSGGSGGG

SEQ ID NO: 14382 - protein, 11 aa, synthetic construct
EAAAKGGGGSS

SEQ ID NO: 14383 - protein, 9 aa, synthetic construct
GGSGSSGGG

SEQ ID NO: 14384 - protein, 9 aa, synthetic construct
GGSGGSGGS

SEQ ID NO: 14385 - protein, 11 aa, synthetic construct
GGGPAPEAAAK

SEQ ID NO: 14386 - protein, 11 aa, synthetic construct
GSSGGGEAAAK

SEQ ID NO: 14387 - skipped

SEQ ID NO: 14388 - protein, 12 aa, synthetic construct
GSAGSAAGSGEF

SEQ ID NO: 14389 - protein, 9 aa, synthetic construct
GSSGGGPAP

SEQ ID NO: 14390 - protein, 6 aa, synthetic construct
GGGGSS

SEQ ID NO: 14391 - protein, 11 aa, synthetic construct
GGGGSSEAAAK

SEQ ID NO: 14392 - protein, 9 aa, synthetic construct
PAPGGSGGG

SEQ ID NO: 14393 - protein, 15 aa, synthetic construct
GSSGSSGSSGSSGSS

SEQ ID NO: 14394 - protein, 9 aa, synthetic construct
GSSGGSPAP

SEQ ID NO: 14395 - protein, 8 aa, synthetic construct
GGSEAAAK

SEQ ID NO: 14396 - protein, 10 aa, synthetic construct
GGGGSGGGGS

SEQ ID NO: 14397 - protein, 11 aa, synthetic construct
GSSEAAAKGGG

SEQ ID NO: 14398 - protein, 11 aa, synthetic construct
EAAAKPAPGGG

SEQ ID NO: 14399 - protein, 11 aa, synthetic construct
EAAAKGGSPAP

SEQ ID NO: 14400 - protein, 11 aa, synthetic construct
GSSEAAAKPAP

SEQ ID NO: 14401 - protein, 9 aa, synthetic construct
GGGPAPGGS

SEQ ID NO: 14402 - skipped

SEQ ID NO: 14403 - protein, 15 aa, synthetic construct
EAAAKGGGGSEAAAK

SEQ ID NO: 14404 - protein, 9 aa, synthetic construct
GGSGSSGGG

SEQ ID NO: 14405 - protein, 12 aa, synthetic construct
GSAGSAAGSGEF

SEQ ID NO: 14406 - protein, 8 aa, synthetic construct
GGGEAAAK

SEQ ID NO: 14407 - protein, 11 aa, synthetic construct
PAPEAAAKGGS

SEQ ID NO: 14408 - protein, 13 aa, synthetic construct
PAPAPAPAPAPAP

SEQ ID NO: 14409 - protein, 9 aa, synthetic construct
GGSGGGGSS

SEQ ID NO: 14410 - protein, 9 aa, synthetic construct
PAPGSSGGS

SEQ ID NO: 14411 - protein, 8 aa, synthetic construct
PAPEAAAK

SEQ ID NO: 14412 - protein, 18 aa, synthetic construct
GSSGSSGSSGSSGSSGSS

SEQ ID NO: 14413 - protein, 9 aa, synthetic construct
GGGGGSGSS

SEQ ID NO: 14414 - protein, 8 aa, synthetic construct
GGGGGGGG

SEQ ID NO: 14415 - protein, 6 aa, synthetic construct
GGGGGG

SEQ ID NO: 14416 - protein, 9 aa, synthetic construct
GSSGGSGGG

SEQ ID NO: 14417 - protein, 6 aa, synthetic construct
GGGGSS

SEQ ID NO: 14418 - protein, 9 aa, synthetic construct
GGSGGGPAP

SEQ ID NO: 14419 - protein, 6 aa, synthetic construct
GSSGSS

SEQ ID NO: 14420 - protein, 25 aa, synthetic construct
EAAAKEAAAKEAAAKEAAAKEAAAK

SEQ ID NO: 14421 - protein, 10 aa, synthetic construct
EAAAKEAAAK

SEQ ID NO: 14422 - protein, 11 aa, synthetic construct
GSSPAPEAAAK

SEQ ID NO: 14423 - protein, 11 aa, synthetic construct
GGSEAAAKPAP

SEQ ID NO: 14424 - protein, 11 aa, synthetic construct
GGSGGGEAAAK

SEQ ID NO: 14425 - protein, 11 aa, synthetic construct
EAAAKGSSPAP

SEQ ID NO: 14426 - protein, 11 aa, synthetic construct
GGSGSSEAAAK

SEQ ID NO: 14427 - skipped

SEQ ID NO: 14428 - protein, 9 aa, synthetic construct
GGGGGSGSS

SEQ ID NO: 14429 - protein, 11 aa, synthetic construct
GGSGGGEAAAK

SEQ ID NO: 14430 - protein, 9 aa, synthetic construct
GSSGGSGGG

SEQ ID NO: 14431 - protein, 11 aa, synthetic construct
EAAAKPAPGGG

SEQ ID NO: 14432 - protein, 9 aa, synthetic construct
PAPGGSGGG

SEQ ID NO: 14433 - protein, 7 aa, synthetic construct
PAPAPAP

SEQ ID NO: 14434 - protein, 11 aa, synthetic construct
GSSEAAAKPAP

SEQ ID NO: 14435 - protein, 33 aa, synthetic construct; identical to SEQ ID NO: 5006

SEQ ID NO: 14436 - protein, 9 aa, synthetic construct
GSSGGSGGG

SEQ ID NO: 14437 - protein, 18 aa, synthetic construct
GSSGSSGSSGSSGSSGSS

SEQ ID NO: 14438 - protein, 9 aa, synthetic construct
GSSGGGPAP

SEQ ID NO: 14439 - protein, 13 aa, synthetic construct
PAPAPAPAPAPAP

SEQ ID NO: 14440 - protein, 9 aa, synthetic construct
GGGGGSPAP

SEQ ID NO: 14441 - protein, 6 aa, synthetic construct
PAPGSS

SEQ ID NO: 14442 - protein, 11 aa, synthetic construct
PAPEAAAKGGS

SEQ ID NO: 14443 - protein, 9 aa, synthetic construct
GGGGSSPAP

SEQ ID NO: 14444 - protein, 8 aa, synthetic construct
GGSEAAAK

SEQ ID NO: 14445 - protein, 11 aa, synthetic construct
EAAAKPAPGGS

SEQ ID NO: 14446 - protein, 6 aa, synthetic construct
PAPGSS

SEQ ID NO: 14447 - protein, 9 aa, synthetic construct
PAPGSSGGG

SEQ ID NO: 14448 - protein, 15 aa, synthetic construct
EAAAKEAAAKEAAAK

SEQ ID NO: 14449 - skipped

SEQ ID NO: 14450 - protein, 5 aa, synthetic construct
GGGGS

SEQ ID NO: 14451 - protein, 9 aa, synthetic construct
GGSGGGGSS

SEQ ID NO: 14452 - protein, 6 aa, synthetic construct
GGSGGG

SEQ ID NO: 14453 - protein, 11 aa, synthetic construct
GGGEAAAKPAP

SEQ ID NO: 14454 - protein, 25 aa, synthetic construct
EAAAKEAAAKEAAAKEAAAKEAAAK

SEQ ID NO: 14455 - protein, 9 aa, synthetic construct
PAPGGSGGG

SEQ ID NO: 14456 - protein, 18 aa, synthetic construct
GSSGSSGSSGSSGSSGSS

SEQ ID NO: 14457 - protein, 11 aa, synthetic construct
GGGEAAAKPAP

SEQ ID NO: 14458 - protein, 9 aa, synthetic construct
GSSGGSPAP

SEQ ID NO: 14459 - protein, 11 aa, synthetic construct
PAPAPAPAPAP

SEQ ID NO: 14460 - protein, 11 aa, synthetic construct
GSSGGSEAAAK

SEQ ID NO: 14461 - protein, 9 aa, synthetic construct
GGSPAPGSS

SEQ ID NO: 14462 - protein, 9 aa, synthetic construct
GGSGGSGGS

SEQ ID NO: 14463 - protein, 11 aa, synthetic construct
PAPEAAAKGSS

SEQ ID NO: 14464 - protein, 8 aa, synthetic construct
EAAAKGGS

SEQ ID NO: 14465 - protein, 15 aa, synthetic construct
EAAAKGGGGSEAAAK

SEQ ID NO: 14466 - protein, 9 aa, synthetic construct
GGGGSSPAP

SEQ ID NO: 14467 - protein, 5 aa, synthetic construct
EAAAK

SEQ ID NO: 14468 - protein, 11 aa, synthetic construct
EAAAKGGGGSS

SEQ ID NO: 14469 - protein, 11 aa, synthetic construct
GGGGGSEAAAK

SEQ ID NO: 14470 - protein, 4 aa, synthetic construct
GGGG

SEQ ID NO: 14471 - protein, 11 aa, synthetic construct
GGGGGSEAAAK

SEQ ID NO: 14472 - protein, 11 aa, synthetic construct
EAAAKGGGPAP

SEQ ID NO: 14473 - protein, 20 aa, synthetic construct
GGGGSGGGGSGGGGSGGGGS

SEQ ID NO: 14474 - protein, 9 aa, synthetic construct
GSSGGSGGG

SEQ ID NO: 14475 - protein, 15 aa, synthetic construct
GGGGSGGGGSGGGGS

SEQ ID NO: 14476 - protein, 11 aa, synthetic construct
GGSGGGEAAAK

SEQ ID NO: 14477 - protein, 11 aa, synthetic construct
PAPEAAAKGGG

SEQ ID NO: 14478 - protein, 10 aa, synthetic construct
GGGGSGGGGS

SEQ ID NO: 14479 - protein, 11 aa, synthetic construct
GSSGGGEAAAK

SEQ ID NO: 14480 - protein, 5 aa, synthetic construct
GGGGG

SEQ ID NO: 14481 - protein, 6 aa, synthetic construct
GGSGSS

SEQ ID NO: 14482 - protein, 13 aa, synthetic construct
PAPAPAPAPAPAP

SEQ ID NO: 14483 - protein, 11 aa, synthetic construct
GGSEAAAKPAP

SEQ ID NO: 14484 - protein, 6 aa, synthetic construct
GGGGGG

SEQ ID NO: 14485 - protein, 11 aa, synthetic construct
GSSGGGEAAAK

SEQ ID NO: 14486 - protein, 33 aa, synthetic construct; identical to SEQ ID NO: 5006

SEQ ID NO: 14487 - protein, 9 aa, synthetic construct
GGSPAPGSS

SEQ ID NO: 14488 - protein, 9 aa, synthetic construct
GGGGSSPAP

SEQ ID NO: 14489 - protein, 15 aa, synthetic construct
GGGGSEAAAKGGGGS

SEQ ID NO: 14490 - protein, 8 aa, synthetic construct
GGGGGGGG

SEQ ID NO: 14491 - protein, 5 aa, synthetic construct
PAPAP

SEQ ID NO: 14492 - protein, 8 aa, synthetic construct
GGGEAAAK

SEQ ID NO: 14493 - protein, 9 aa, synthetic construct
GSSPAPGGG

SEQ ID NO: 14494 - protein, 15 aa, synthetic construct
GGSGGSGGSGGSGGS

SEQ ID NO: 14495 - protein, 6 aa, synthetic construct
GGGGGS

SEQ ID NO: 14496 - protein, 9 aa, synthetic construct
PAPGGGGSS

SEQ ID NO: 14497 - protein, 8 aa, synthetic construct
GGGEAAAK

SEQ ID NO: 14498 - protein, 11 aa, synthetic construct
PAPEAAAKGGG

SEQ ID NO: 14499 - protein, 8 aa, synthetic construct
GSSEAAAK

SEQ ID NO: 14500 - protein, 10 aa, synthetic construct
EAAAKEAAAK

SEQ ID NO: 14501 - protein, 11 aa, synthetic construct
EAAAKGGGGGS

SEQ ID NO: 14502 - protein, 11 aa, synthetic construct
GGGEAAAKGGS

SEQ ID NO: 14503 - protein, 11 aa, synthetic construct
PAPAPAPAPAP

SEQ ID NO: 14504 - protein, 11 aa, synthetic construct
PAPGSSEAAAK

SEQ ID NO: 14505 - protein, 15 aa, synthetic construct
EAAAKEAAAKEAAAK

SEQ ID NO: 14506 - protein, 9 aa, synthetic construct
GGSPAPGSS

SEQ ID NO: 14507 - protein, 9 aa, synthetic construct
PAPGSSGGS

SEQ ID NO: 14508 - protein, 20 aa, synthetic construct
EAAAKEAAAKEAAAKEAAAK

SEQ ID NO: 14509 - protein, 8 aa, synthetic construct
EAAAKGGG

SEQ ID NO: 14510 - protein, 11 aa, synthetic construct
EAAAKGGSGGG

SEQ ID NO: 14511 - protein, 6 aa, synthetic construct
GGGGGS

SEQ ID NO: 14512 - protein, 9 aa, synthetic construct
PAPGGSGGG

SEQ ID NO: 14513 - protein, 9 aa, synthetic construct
GGGPAPGGS

SEQ ID NO: 14514 - skipped

SEQ ID NO: 14515 - protein, 9 aa, synthetic construct
GGSGGSGGS

SEQ ID NO: 14516 - protein, 5 aa, synthetic construct
GGGGS

SEQ ID NO: 14517 - protein, 4 aa, synthetic construct
GGGG

SEQ ID NO: 14518 - protein, 11 aa, synthetic construct
GGSEAAAKPAP

SEQ ID NO: 14519 - protein, 9 aa, synthetic construct
PAPAPAPAP

SEQ ID NO: 14520 - skipped

SEQ ID NO: 14521 - protein, 15 aa, synthetic construct
EAAAKEAAAKEAAAK

SEQ ID NO: 14522 - protein, 8 aa, synthetic construct
EAAAKGSS

SEQ ID NO: 14523 - protein, 8 aa, synthetic construct
EAAAKGGG

SEQ ID NO: 14524 - protein, 11 aa, synthetic construct
PAPEAAAKGGG

SEQ ID NO: 14525 - protein, 11 aa, synthetic construct
GSSGGGEAAAK

SEQ ID NO: 14526 - protein, 11 aa, synthetic construct
PAPGGGEAAAK

SEQ ID NO: 14527 - protein, 20 aa, synthetic construct
GGGGSGGGGSGGGGSGGGGS

SEQ ID NO: 14528 - protein, 6 aa, synthetic construct
GSSGGG

SEQ ID NO: 14529 - protein, 20 aa, synthetic construct
GGGGSGGGGSGGGGSGGGGS

SEQ ID NO: 14530 - protein, 6 aa, synthetic construct
GGSGSS

SEQ ID NO: 14531 - protein, 11 aa, synthetic construct
GGSGSSEAAAK

SEQ ID NO: 14532 - protein, 7 aa, synthetic construct
PAPAPAP

SEQ ID NO: 14533 - protein, 9 aa, synthetic construct
GSSGGSPAP

SEQ ID NO: 14534 - protein, 6 aa, synthetic construct
GGSPAP

SEQ ID NO: 14535 - protein, 9 aa, synthetic construct
GGSGGGPAP

SEQ ID NO: 14536 - protein, 8 aa, synthetic construct
GSSEAAAK

SEQ ID NO: 14537 - protein, 9 aa, synthetic construct
GSSGGGPAP

SEQ ID NO: 14538 - protein, 11 aa, synthetic construct
GGGGSSEAAAK

SEQ ID NO: 14539 - protein, 11 aa, synthetic construct
GGSEAAAKPAP

SEQ ID NO: 14540 - protein, 9 aa, synthetic construct
GGSGGGPAP

SEQ ID NO: 14541 - protein, 20 aa, synthetic construct
GGGGSGGGGSGGGGSGGGGS

SEQ ID NO: 14542 - protein, 9 aa, synthetic construct
GGGGSSPAP

SEQ ID NO: 14543 - protein, 8 aa, synthetic construct
EAAAKGGS

SEQ ID NO: 14544 - protein, 11 aa, synthetic construct
GGSEAAAKGSS

SEQ ID NO: 14545 - protein, 11 aa, synthetic construct
GGGGSSEAAAK

SEQ ID NO: 14546 - protein, 11 aa, synthetic construct
EAAAKGGSGGG

SEQ ID NO: 14547 - protein, 6 aa, synthetic construct
GGSGGS

SEQ ID NO: 14548 - protein, 8 aa, synthetic construct
EAAAKGGG

SEQ ID NO: 14549 - protein, 15 aa, synthetic construct
GSSGSSGSSGSSGSS

SEQ ID NO: 14550 - protein, 9 aa, synthetic construct
GSSGGGPAP

SEQ ID NO: 14551 - protein, 11 aa, synthetic construct
PAPGGSEAAAK

SEQ ID NO: 14552 - protein, 6 aa, synthetic construct
GGSPAP

SEQ ID NO: 14553 - protein, 11 aa, synthetic construct
EAAAKPAPGSS

SEQ ID NO: 14554 - protein, 16 aa, synthetic construct
SGSETPGTSESATPES

SEQ ID NO: 14555 - protein, 6 aa, synthetic construct
GSSPAP

SEQ ID NO: 14556 - protein, 9 aa, synthetic construct
GSSPAPGGG

SEQ ID NO: 14557 - protein, 11 aa, synthetic construct
GGGEAAAKGSS

SEQ ID NO: 14558 - protein, 9 aa, synthetic construct
GGGPAPGGS

SEQ ID NO: 14559 - protein, 8 aa, synthetic construct
EAAAKGGG

SEQ ID NO: 14560 - protein, 6 aa, synthetic construct
GSSGGG

SEQ ID NO: 14561 - protein, 11 aa, synthetic construct
GGSPAPEAAAK

SEQ ID NO: 14562 - protein, 11 aa, synthetic construct
EAAAKGSSPAP

SEQ ID NO: 14563 - protein, 15 aa, synthetic construct
EAAAKGGGGSEAAAK

SEQ ID NO: 14564 - protein, 15 aa, synthetic construct
GSSGSSGSSGSSGSS

SEQ ID NO: 14565 - protein, 11 aa, synthetic construct
EAAAKGGSPAP

SEQ ID NO: 14566 - protein, 6 aa, synthetic construct
GGSGGS

SEQ ID NO: 14567 - protein, 11 aa, synthetic construct
EAAAKGSSGGS

SEQ ID NO: 14568 - protein, 9 aa, synthetic construct
GSSGGGPAP

SEQ ID NO: 14569 - protein, 11 aa, synthetic construct
PAPEAAAKGGS

SEQ ID NO: 14570 - protein, 11 aa, synthetic construct
EAAAKPAPGGG

SEQ ID NO: 14571 - protein, 6 aa, synthetic construct
GGSPAP

SEQ ID NO: 14572 - protein, 10 aa, synthetic construct
GGGGSGGGGS

SEQ ID NO: 14573 - protein, 6 aa, synthetic construct
GGGGSS

SEQ ID NO: 14574 - protein, 9 aa, synthetic construct
GGSPAPGGG

SEQ ID NO: 14575 - protein, 11 aa, synthetic construct
EAAAKPAPGSS

SEQ ID NO: 14576 - protein, 8 aa, synthetic construct
EAAAKPAP

SEQ ID NO: 14577 - protein, 11 aa, synthetic construct
PAPEAAAKGSS

SEQ ID NO: 14578 - protein, 11 aa, synthetic construct
EAAAKGGSGSS

SEQ ID NO: 14579 - protein, 11 aa, synthetic construct
GGGEAAAKGSS

SEQ ID NO: 14580 - protein, 15 aa, synthetic construct
GGGGSEAAAKGGGGS

SEQ ID NO: 14581 - protein, 9 aa, synthetic construct
PAPGGSGSS

SEQ ID NO: 14582 - protein, 11 aa, synthetic construct
GGSEAAAKPAP

SEQ ID NO: 14583 - protein, 15 aa, synthetic construct
GGSGGSGGSGGSGGS

SEQ ID NO: 14584 - protein, 11 aa, synthetic construct
GSSGGSEAAAK

SEQ ID NO: 14585 - skipped

SEQ ID NO: 14586 - protein, 11 aa, synthetic construct
PAPGGSEAAAK

SEQ ID NO: 14587 - protein, 11 aa, synthetic construct
PAPEAAAKGGS

SEQ ID NO: 14588 - protein, 9 aa, synthetic construct
GGSGSSPAP

SEQ ID NO: 14589 - protein, 6 aa, synthetic construct
GSSPAP

SEQ ID NO: 14590 - protein, 8 aa, synthetic construct
GGGEAAAK

SEQ ID NO: 14591 - protein, 6 aa, synthetic construct
GGGGSS

SEQ ID NO: 14592 - protein, 9 aa, synthetic construct
GGSPAPGSS

SEQ ID NO: 14593 - protein, 6 aa, synthetic construct
PAPGGS

SEQ ID NO: 14594 - protein, 11 aa, synthetic construct
EAAAKGSSPAP

SEQ ID NO: 14595 - protein, 9 aa, synthetic construct
GGGGSSGGS

SEQ ID NO: 14596 - protein, 13 aa, synthetic construct
PAPAPAPAPAPAP

SEQ ID NO: 14597 - protein, 11 aa, synthetic construct
GGSEAAAKGGG

SEQ ID NO: 14598 - protein, 6 aa, synthetic construct
GGSGGS

SEQ ID NO: 14599 - protein, 9 aa, synthetic construct
GSSGGGGGS

SEQ ID NO: 14600 - protein, 11 aa, synthetic construct
EAAAKGGGPAP

SEQ ID NO: 14601 - protein, 20 aa, synthetic construct
EAAAKEAAAKEAAAKEAAAK

SEQ ID NO: 14602 - protein, 9 aa, synthetic construct
GGGPAPGSS

SEQ ID NO: 14603 - protein, 20 aa, synthetic construct
GGGGSGGGGSGGGGSGGGGS

SEQ ID NO: 14604 - protein, 20 aa, synthetic construct
EAAAKEAAAKEAAAKEAAAK

SEQ ID NO: 14605 - protein, 9 aa, synthetic construct
PAPGSSGGS

SEQ ID NO: 14606 - protein, 11 aa, synthetic construct
PAPGSSEAAAK

SEQ ID NO: 14607 - protein, 11 aa, synthetic construct
GSSPAPEAAAK

SEQ ID NO: 14608 - protein, 15 aa, synthetic construct
EAAAKGGGGSEAAAK

SEQ ID NO: 14609 - protein, 6 aa, synthetic construct
GGSPAP

SEQ ID NO: 14610 - protein, 11 aa, synthetic construct
GGSGSSEAAAK

SEQ ID NO: 14611 - protein, 11 aa, synthetic construct
GGSEAAAKGGG

SEQ ID NO: 14612 - protein, 9 aa, synthetic construct
PAPGGGGSS

SEQ ID NO: 14613 - protein, 12 aa, synthetic construct
GGSGGSGGSGGS

SEQ ID NO: 14614 - protein, 9 aa, synthetic construct
GGGGSSGGS

SEQ ID NO: 14615 - protein, 33 aa, synthetic construct; identical to SEQ ID NO: 5006

SEQ ID NO: 14616 - protein, 6 aa, synthetic construct
GGGPAP

SEQ ID NO: 14617 - protein, 20 aa, synthetic construct
GGGGSGGGGSGGGGSGGGGS

SEQ ID NO: 14618 - protein, 8 aa, synthetic construct
GSSEAAAK

SEQ ID NO: 14619 - protein, 11 aa, synthetic construct
GGSPAPEAAAK

SEQ ID NO: 14620 - protein, 11 aa, synthetic construct
GGGGGSEAAAK

SEQ ID NO: 14621 - protein, 9 aa, synthetic construct
GSSPAPGGS

SEQ ID NO: 14622 - skipped

SEQ ID NO: 14623 - protein, 8 aa, synthetic construct
EAAAKPAP

SEQ ID NO: 14624 - protein, 8 aa, synthetic construct
EAAAKGGG

SEQ ID NO: 14625 - protein, 8 aa, synthetic construct
GGGEAAAK

SEQ ID NO: 14626 - protein, 9 aa, synthetic construct
PAPGSSGGG

SEQ ID NO: 14627 - protein, 11 aa, synthetic construct
EAAAKGGSPAP

SEQ ID NO: 14628 - protein, 9 aa, synthetic construct
GSSGGSGGG

SEQ ID NO: 14629 - protein, 11 aa, synthetic construct
GSSGGGEAAAK

SEQ ID NO: 14630 - protein, 9 aa, synthetic construct
GGGPAPGSS

SEQ ID NO: 14631 - protein, 11 aa, synthetic construct
PAPGGGEAAAK

SEQ ID NO: 14632 - protein, 12 aa, synthetic construct
GSSGSSGSSGSS

SEQ ID NO: 14633 - protein, 8 aa, synthetic construct
GGSEAAAK

SEQ ID NO: 14634 - protein, 11 aa, synthetic construct
GGGEAAAKPAP

SEQ ID NO: 14635 - protein, 11 aa, synthetic construct
EAAAKGGGPAP

SEQ ID NO: 14636 - protein, 9 aa, synthetic construct
GGGGSSPAP

SEQ ID NO: 14637 - protein, 11 aa, synthetic construct
EAAAKPAPGSS

SEQ ID NO: 14638 - protein, 9 aa, synthetic construct
GGGGSSPAP

SEQ ID NO: 14639 - protein, 6 aa, synthetic construct
GSSGSS

SEQ ID NO: 14640 - protein, 25 aa, synthetic construct
GGGGSGGGGSGGGGSGGGGSGGGGS

SEQ ID NO: 14641 - protein, 9 aa, synthetic construct
GGGGSSGGS

SEQ ID NO: 14642 - protein, 11 aa, synthetic construct
EAAAKGGSGSS

SEQ ID NO: 14643 - protein, 8 aa, synthetic construct
EAAAKPAP

SEQ ID NO: 14644 - protein, 11 aa, synthetic construct
GSSGGGEAAAK

SEQ ID NO: 14645 - protein, 9 aa, synthetic construct
PAPGGSGGG

SEQ ID NO: 14646 - protein, 11 aa, synthetic construct
EAAAKGGGPAP

SEQ ID NO: 14647 - protein, 9 aa, synthetic construct
GSSGSSGSS

SEQ ID NO: 14648 - protein, 6 aa, synthetic construct
GSSGGS

SEQ ID NO: 14649 - protein, 11 aa, synthetic construct
GGSEAAAKGGG

SEQ ID NO: 14650 - protein, 8 aa, synthetic construct
EAAAKGGS

SEQ ID NO: 14651 - protein, 9 aa, synthetic construct
GGSGSSGGG

SEQ ID NO: 14652 - protein, 5 aa, synthetic construct
EAAAK

SEQ ID NO: 14653 - protein, 9 aa, synthetic construct
GSSGGSPAP

SEQ ID NO: 14654 - protein, 9 aa, synthetic construct
GGGGSSGGS

SEQ ID NO: 14655 - protein, 9 aa, synthetic construct
PAPGGSGGG

SEQ ID NO: 14656 - protein, 9 aa, synthetic construct
GGGPAPGGS

SEQ ID NO: 14657 - protein, 11 aa, synthetic construct
GSSPAPEAAAK

SEQ ID NO: 14658 - protein, 9 aa, synthetic construct
GGSGSSPAP

SEQ ID NO: 14659 - protein, 11 aa, synthetic construct
GSSEAAAKGGS

SEQ ID NO: 14660 - protein, 6 aa, synthetic construct
PAPGGG

SEQ ID NO: 14661 - protein, 16 aa, synthetic construct
SGSETPGTSESATPES

SEQ ID NO: 14662 - protein, 5 aa, synthetic construct
GGGGS

SEQ ID NO: 14663 - protein, 11 aa, synthetic construct
GSSGGGEAAAK

SEQ ID NO: 14664 - protein, 15 aa, synthetic construct
EAAAKGGGGSEAAAK

SEQ ID NO: 14665 - protein, 11 aa, synthetic construct
GSSEAAAKPAP

SEQ ID NO: 14666 - protein, 6 aa, synthetic construct
GGGGGG

SEQ ID NO: 14667 - protein, 15 aa, synthetic construct
EAAAKEAAAKEAAAK

SEQ ID NO: 14668 - protein, 11 aa, synthetic construct
EAAAKPAPGSS

SEQ ID NO: 14669 - protein, 11 aa, synthetic construct
GGSGSSEAAAK

SEQ ID NO: 14670 - protein, 8 aa, synthetic construct
GGSEAAAK

SEQ ID NO: 14671 - protein, 11 aa, synthetic construct
GGSPAPEAAAK

SEQ ID NO: 14672 - protein, 9 aa, synthetic construct
GGGPAPGSS

SEQ ID NO: 14673 - protein, 11 aa, synthetic construct
GGGGGSEAAAK

SEQ ID NO: 14674 - protein, 11 aa, synthetic construct
EAAAKPAPGSS

SEQ ID NO: 14675 - protein, 12 aa, synthetic construct
GSSGSSGSSGSS

SEQ ID NO: 14676 - protein, 8 aa, synthetic construct
EAAAKPAP

SEQ ID NO: 14677 - protein, 8 aa, synthetic construct
GGGEAAAK

SEQ ID NO: 14678 - protein, 6 aa, synthetic construct
GGSGGS

SEQ ID NO: 14679 - protein, 11 aa, synthetic construct
EAAAKGSSGGS

SEQ ID NO: 14680 - protein, 16 aa, synthetic construct
SGSETPGTSESATPES

SEQ ID NO: 14681 - protein, 11 aa, synthetic construct
EAAAKGSSGGG

SEQ ID NO: 14682 - protein, 30 aa, synthetic construct; identical to SEQ ID NO: 5130

SEQ ID NO: 14683 - protein, 9 aa, synthetic construct
GGSGGGPAP

SEQ ID NO: 14684 - protein, 9 aa, synthetic construct
PAPAPAPAP

SEQ ID NO: 14685 - protein, 11 aa, synthetic construct
GGGEAAAKGGS

SEQ ID NO: 14686 - protein, 9 aa, synthetic construct
GSSGGSGGG

SEQ ID NO: 14687 - protein, 11 aa, synthetic construct
PAPEAAAKGGS

SEQ ID NO: 14688 - protein, 11 aa, synthetic construct
GGGEAAAKGSS

SEQ ID NO: 14689 - protein, 20 aa, synthetic construct
GGGGSGGGGSGGGGSGGGGS

SEQ ID NO: 14690 - protein, 9 aa, synthetic construct
PAPGSSGGG

SEQ ID NO: 14691 - protein, 9 aa, synthetic construct
GGSGSSGGG

SEQ ID NO: 14692 - protein, 11 aa, synthetic construct
EAAAKPAPGSS

SEQ ID NO: 14693 - protein, 11 aa, synthetic construct
GSSEAAAKGGG

SEQ ID NO: 14694 - protein, 15 aa, synthetic construct
GGSGGSGGSGGSGGS

SEQ ID NO: 14695 - protein, 11 aa, synthetic construct
GGSEAAAKPAP

SEQ ID NO: 14696 - protein, 11 aa, synthetic construct
EAAAKGGSPAP

SEQ ID NO: 14697 - protein, 11 aa, synthetic construct
EAAAKGGGGGS

SEQ ID NO: 14698 - protein, 11 aa, synthetic construct
GSSPAPEAAAK

SEQ ID NO: 14699 - protein, 5 aa, synthetic construct
PAPAP

SEQ ID NO: 14700 - protein, 11 aa, synthetic construct
PAPGGSEAAAK

SEQ ID NO: 14701 - protein, 6 aa, synthetic construct
GGSGSS

SEQ ID NO: 14702 - protein, 11 aa, synthetic construct
GGSEAAAKPAP

SEQ ID NO: 14703 - skipped

SEQ ID NO: 14704 - protein, 33 aa, synthetic construct; identical to SEQ ID NO: 5006

SEQ ID NO: 14705 - protein, 11 aa, synthetic construct
PAPGGGEAAAK

SEQ ID NO: 14706 - protein, 9 aa, synthetic construct
PAPGGGGGS

SEQ ID NO: 14707 - protein, 9 aa, synthetic construct
PAPGGSGSS

SEQ ID NO: 14708 - protein, 11 aa, synthetic construct
GSSGGGEAAAK

SEQ ID NO: 14709 - protein, 11 aa, synthetic construct
GGSEAAAKPAP

SEQ ID NO: 14710 - protein, 5 aa, synthetic construct
GGGGG

SEQ ID NO: 14711 - protein, 11 aa, synthetic construct
GGGEAAAKGSS

SEQ ID NO: 14712 - protein, 15 aa, synthetic construct
GSSGSSGSSGSSGSS

SEQ ID NO: 14713 - protein, 16 aa, synthetic construct
SGSETPGTSESATPES

SEQ ID NO: 14714 - protein, 9 aa, synthetic construct
PAPGSSGGG

SEQ ID NO: 14715 - protein, 9 aa, synthetic construct
GGGGSSPAP

SEQ ID NO: 14716 - protein, 8 aa, synthetic construct
GGGEAAAK

SEQ ID NO: 14717 - protein, 6 aa, synthetic construct
GGSGGG

SEQ ID NO: 14718 - protein, 11 aa, synthetic construct
EAAAKGSSGGG

SEQ ID NO: 14719 - protein, 11 aa, synthetic construct
GSSPAPEAAAK

SEQ ID NO: 14720 - protein, 9 aa, synthetic construct
GGGPAPGSS

SEQ ID NO: 14721 - protein, 11 aa, synthetic construct
EAAAKGSSGGG

SEQ ID NO: 14722 - protein, 11 aa, synthetic construct
GGGGGSEAAAK

SEQ ID NO: 14723 - protein, 11 aa, synthetic construct
EAAAKPAPGGS

SEQ ID NO: 14724 - protein, 11 aa, synthetic construct
EAAAKGSSPAP

SEQ ID NO: 14725 - protein, 7 aa, synthetic construct
GGGGGGG

SEQ ID NO: 14726 - protein, 15 aa, synthetic construct
EAAAKEAAAKEAAAK

SEQ ID NO: 14727 - protein, 9 aa, synthetic construct
GSSPAPGGS

SEQ ID NO: 14728 - protein, 11 aa, synthetic construct
GGGGSSEAAAK

SEQ ID NO: 14729 - protein, 11 aa, synthetic construct
GGSEAAAKGSS

SEQ ID NO: 14730 - protein, 11 aa, synthetic construct
GGSEAAAKGSS

SEQ ID NO: 14731 - protein, 11 aa, synthetic construct
EAAAKPAPGGG

SEQ ID NO: 14732 - protein, 18 aa, synthetic construct
GSSGSSGSSGSSGSSGSS

SEQ ID NO: 14733 - protein, 15 aa, synthetic construct
GGGGSEAAAKGGGGS

SEQ ID NO: 14734 - protein, 9 aa, synthetic construct
GSSPAPGGS

SEQ ID NO: 14735 - protein, 10 aa, synthetic construct
GGGGSGGGGS

SEQ ID NO: 14736 - protein, 9 aa, synthetic construct
GSSGGSPAP

SEQ ID NO: 14737 - protein, 6 aa, synthetic construct
GGSGGS

SEQ ID NO: 14738 - protein, 11 aa, synthetic construct
PAPGSSEAAAK

SEQ ID NO: 14739 - protein, 9 aa, synthetic construct
PAPGGGGSS

SEQ ID NO: 14740 - protein, 9 aa, synthetic construct
GGGGSSGGS

SEQ ID NO: 14741 - protein, 10 aa, synthetic construct
GGGGSGGGGS

SEQ ID NO: 14742 - protein, 20 aa, synthetic construct
GGGGSGGGGSGGGGSGGGGS

SEQ ID NO: 14743 - protein, 11 aa, synthetic construct
GGSGSSEAAAK

SEQ ID NO: 14744 - protein, 9 aa, synthetic construct
GGSGGGGSS

SEQ ID NO: 14745 - protein, 11 aa, synthetic construct
GGSEAAAKPAP

SEQ ID NO: 14746 - protein, 11 aa, synthetic construct
EAAAKGGSPAP

SEQ ID NO: 14747 - protein, 9 aa, synthetic construct
PAPAPAPAP

SEQ ID NO: 14748 - protein, 9 aa, synthetic construct
GSSGGSPAP

SEQ ID NO: 14749 - protein, 9 aa, synthetic construct
GGGGGSPAP

SEQ ID NO: 14750 - protein, 11 aa, synthetic construct
EAAAKGGGPAP

SEQ ID NO: 14751 - protein, 9 aa, synthetic construct
GSSGGSPAP

SEQ ID NO: 14752 - protein, 5 aa, synthetic construct
GGGGG

SEQ ID NO: 14753 - protein, 6 aa, synthetic construct
GGGGGS

SEQ ID NO: 14754 - protein, 15 aa, synthetic construct
EAAAKEAAAKEAAAK

SEQ ID NO: 14755 - protein, 6 aa, synthetic construct
PAPGGG

SEQ ID NO: 14756 - protein, 11 aa, synthetic construct
GSSGGSEAAAK

SEQ ID NO: 14757 - protein, 9 aa, synthetic construct
GGSPAPGGG

SEQ ID NO: 14758 - protein, 18 aa, synthetic construct
GSSGSSGSSGSSGSSGSS

SEQ ID NO: 14759 - protein, 11 aa, synthetic construct
GGSPAPEAAAK

SEQ ID NO: 14760 - protein, 9 aa, synthetic construct
PAPGGGGSS

SEQ ID NO: 14761 - protein, 11 aa, synthetic construct
GGGGSSEAAAK

SEQ ID NO: 14762 - protein, 6 aa, synthetic construct
PAPGGS

SEQ ID NO: 14763 - protein, 15 aa, synthetic construct
GGSGGSGGSGGSGGS

SEQ ID NO: 14764 - protein, 12 aa, synthetic construct
GSAGSAAGSGEF

SEQ ID NO: 14765 - protein, 6 aa, synthetic construct
GSSGGS

SEQ ID NO: 14766 - protein, 9 aa, synthetic construct
GGSGGGGSS

SEQ ID NO: 14767 - protein, 9 aa, synthetic construct
GGSGGGGSS

SEQ ID NO: 14768 - protein, 11 aa, synthetic construct
PAPEAAAKGSS

SEQ ID NO: 14769 - protein, 12 aa, synthetic construct
GSSGSSGSSGSS

SEQ ID NO: 14770 - protein, 13 aa, synthetic construct
PAPAPAPAPAPAP

SEQ ID NO: 14771 - protein, 9 aa, synthetic construct
PAPGSSGGG

SEQ ID NO: 14772 - protein, 9 aa, synthetic construct
GGSGSSPAP

SEQ ID NO: 14773 - protein, 9 aa, synthetic construct
GGSGGGPAP

SEQ ID NO: 14774 - protein, 9 aa, synthetic construct
PAPGGGGGS

SEQ ID NO: 14775 - protein, 11 aa, synthetic construct
EAAAKGSSPAP

SEQ ID NO: 14776 - protein, 9 aa, synthetic construct
GGSGSSPAP

SEQ ID NO: 14777 - protein, 8 aa, synthetic construct
EAAAKGSS

SEQ ID NO: 14778 - protein, 11 aa, synthetic construct
GGGGGSEAAAK

SEQ ID NO: 14779 - protein, 8 aa, synthetic construct
GGGGGGGG

SEQ ID NO: 14780 - protein, 10 aa, synthetic construct
EAAAKEAAAK

SEQ ID NO: 14781 - protein, 11 aa, synthetic construct
GGGEAAAKGGS

SEQ ID NO: 14782 - protein, 11 aa, synthetic construct
EAAAKGGSPAP

SEQ ID NO: 14783 - protein, 8 aa, synthetic construct
GSSEAAAK

SEQ ID NO: 14784 - protein, 11 aa, synthetic construct
PAPGGGEAAAK

SEQ ID NO: 14785 - protein, 6 aa, synthetic construct
GGSPAP

SEQ ID NO: 14786 - protein, 9 aa, synthetic construct
GSSPAPGGG

SEQ ID NO: 14787 - protein, 9 aa, synthetic construct
GGSGSSPAP

SEQ ID NO: 14788 - skipped

SEQ ID NO: 14789 - protein, 9 aa, synthetic construct
GGSGGGGSS

SEQ ID NO: 14790 - protein, 20 aa, synthetic construct
GGGGSGGGGSGGGGSGGGGS

SEQ ID NO: 14791 - protein, 11 aa, synthetic construct
EAAAKGGGPAP

SEQ ID NO: 14792 - protein, 11 aa, synthetic construct
GSSGGGEAAAK

SEQ ID NO: 14793 - protein, 33 aa, synthetic construct; identical to SEQ ID NO: 5006

SEQ ID NO: 14794 - protein, 46 aa, synthetic construct; identical to SEQ ID NO: 5217

SEQ ID NO: 14795 - protein, 10 aa, synthetic construct
EAAAKEAAAK

SEQ ID NO: 14796 - protein, 11 aa, synthetic construct
GSSPAPEAAAK

SEQ ID NO: 14797 - protein, 11 aa, synthetic construct
EAAAKPAPGGS

SEQ ID NO: 14798 - protein, 9 aa, synthetic construct
GSSGGSPAP

SEQ ID NO: 14799 - protein, 11 aa, synthetic construct
GGGPAPEAAAK

SEQ ID NO: 14800 - protein, 11 aa, synthetic construct
GGGEAAAKPAP

SEQ ID NO: 14801 - protein, 11 aa, synthetic construct
GGGGGSEAAAK

SEQ ID NO: 14802 - protein, 9 aa, synthetic construct
GGGPAPGSS

SEQ ID NO: 14803 - protein, 11 aa, synthetic construct
GGSEAAAKPAP

SEQ ID NO: 14804 - protein, 18 aa, synthetic construct
GSSGSSGSSGSSGSSGSS

SEQ ID NO: 14805 - protein, 11 aa, synthetic construct
EAAAKGSSGGS

SEQ ID NO: 14806 - protein, 6 aa, synthetic construct
GGGGGG

SEQ ID NO: 14807 - protein, 9 aa, synthetic construct
GSSPAPGGS

SEQ ID NO: 14808 - protein, 9 aa, synthetic construct
GGSGSSPAP

SEQ ID NO: 14809 - protein, 11 aa, synthetic construct
GGGPAPEAAAK

SEQ ID NO: 14810 - protein, 11 aa, synthetic construct
GGSGGGEAAAK

SEQ ID NO: 14811 - protein, 12 aa, synthetic construct
GSAGSAAGSGEF

SEQ ID NO: 14812 - protein, 11 aa, synthetic construct
GSSGGGEAAAK

SEQ ID NO: 14813 - skipped

SEQ ID NO: 14814 - protein, 9 aa, synthetic construct
PAPGSSGGS

SEQ ID NO: 14815 - protein, 9 aa, synthetic construct
GGGGSSPAP

SEQ ID NO: 14816 - protein, 33 aa, synthetic construct; identical to SEQ ID NO: 5006

SEQ ID NO: 14817 - protein, 7 aa, synthetic construct
GGGGGGG

SEQ ID NO: 14818 - protein, 11 aa, synthetic construct
PAPAPAPAPAP

SEQ ID NO: 14819 - protein, 20 aa, synthetic construct
GGGGSGGGGSGGGGSGGGGS

SEQ ID NO: 14820 - protein, 9 aa, synthetic construct
GGSGGGPAP

SEQ ID NO: 14821 - protein, 6 aa, synthetic construct
GGGGGG

SEQ ID NO: 14822 - protein, 11 aa, synthetic construct
EAAAKPAPGSS

SEQ ID NO: 14823 - protein, 9 aa, synthetic construct
GGGGSSGGS

SEQ ID NO: 14824 - protein, 11 aa, synthetic construct
PAPGSSEAAAK

SEQ ID NO: 14825 - protein, 9 aa, synthetic construct
GGGGSSPAP

SEQ ID NO: 14826 - protein, 9 aa, synthetic construct
PAPGSSGGS

SEQ ID NO: 14827 - protein, 46 aa, synthetic construct; identical to SEQ ID NO: 5217

SEQ ID NO: 14828 - protein, 7 aa, synthetic construct
PAPAPAP

SEQ ID NO: 14829 - protein, 9 aa, synthetic construct
PAPGGGGGS

SEQ ID NO: 14830 - protein, 6 aa, synthetic construct
GGGGSS

SEQ ID NO: 14831 - protein, 20 aa, synthetic construct
EAAAKEAAAKEAAAKEAAAK

SEQ ID NO: 14832 - protein, 15 aa, synthetic construct
GGSGGSGGSGGSGGS

SEQ ID NO: 14833 - protein, 7 aa, synthetic construct
GGGGGGG

SEQ ID NO: 14834 - protein, 11 aa, synthetic construct
PAPGGGEAAAK

SEQ ID NO: 14835 - protein, 6 aa, synthetic construct
PAPGSS

SEQ ID NO: 14836 - protein, 10 aa, synthetic construct
GGGGSGGGGS

SEQ ID NO: 14837 - protein, 9 aa, synthetic construct
GSSGGSGGG

SEQ ID NO: 14838 - protein, 30 aa, synthetic construct; identical to SEQ ID NO: 5112

SEQ ID NO: 14839 - protein, 11 aa, synthetic construct
GSSEAAAKGGG

SEQ ID NO: 14840 - protein, 11 aa, synthetic construct
GGSEAAAKPAP

SEQ ID NO: 14841 - protein, 9 aa, synthetic construct
GSSGGSGGG

SEQ ID NO: 14842 - protein, 11 aa, synthetic construct
EAAAKGGGGSS

SEQ ID NO: 14843 - protein, 6 aa, synthetic construct
GGGGGG

SEQ ID NO: 14844 - protein, 5 aa, synthetic construct
GGGGG

SEQ ID NO: 14845 - protein, 11 aa, synthetic construct
PAPEAAAKGGG

SEQ ID NO: 14846 - protein, 11 aa, synthetic construct
EAAAKGGSPAP

SEQ ID NO: 14847 - protein, 11 aa, synthetic construct
GGGEAAAKPAP

SEQ ID NO: 14848 - protein, 18 aa, synthetic construct
GSSGSSGSSGSSGSSGSS

SEQ ID NO: 14849 - protein, 20 aa, synthetic construct
EAAAKEAAAKEAAAKEAAAK

SEQ ID NO: 14850 - protein, 11 aa, synthetic construct
PAPGSSEAAAK

SEQ ID NO: 14851 - protein, 9 aa, synthetic construct
GSSGSSGSS

SEQ ID NO: 14852 - protein, 9 aa, synthetic construct
GSSGGGPAP

SEQ ID NO: 14853 - protein, 11 aa, synthetic construct
GGGPAPEAAAK

SEQ ID NO: 14854 - protein, 8 aa, synthetic construct
GGGEAAAK

SEQ ID NO: 14855 - protein, 12 aa, synthetic construct
GSSGSSGSSGSS

SEQ ID NO: 14856 - protein, 11 aa, synthetic construct
PAPAPAPAPAP

SEQ ID NO: 14857 - protein, 11 aa, synthetic construct
GGSPAPEAAAK

SEQ ID NO: 14858 - protein, 18 aa, synthetic construct
GSSGSSGSSGSSGSSGSS

SEQ ID NO: 14859 - protein, 25 aa, synthetic construct
EAAAKEAAAKEAAAKEAAAKEAAAK

SEQ ID NO: 14860 - protein, 11 aa, synthetic construct
GGGPAPEAAAK

SEQ ID NO: 14861 - protein, 9 aa, synthetic construct
PAPGGSGGG

SEQ ID NO: 14862 - protein, 9 aa, synthetic construct
PAPGGSGGG

SEQ ID NO: 14863 - protein, 11 aa, synthetic construct
GGGEAAAKGGS

SEQ ID NO: 14864 - protein, 12 aa, synthetic construct
GSAGSAAGSGEF

SEQ ID NO: 14865 - protein, 9 aa, synthetic construct
GSSPAPGGG

SEQ ID NO: 14866 - protein, 18 aa, synthetic construct
GSSGSSGSSGSSGSSGSS

SEQ ID NO: 14867 - protein, 9 aa, synthetic construct
GGSGGGGSS

SEQ ID NO: 14868 - protein, 11 aa, synthetic construct
PAPEAAAKGSS

SEQ ID NO: 14869 - skipped

SEQ ID NO: 14870 - protein, 11 aa, synthetic construct
EAAAKGGGGSS

SEQ ID NO: 14871 - protein, 30 aa, synthetic construct; identical to SEQ ID NO: 5130

SEQ ID NO: 14872 - protein, 30 aa, synthetic construct; identical to SEQ ID NO: 5112

SEQ ID NO: 14873 - protein, 11 aa, synthetic construct
GGGEAAAKGGS

SEQ ID NO: 14874 - protein, 6 aa, synthetic construct
GSSGSS

SEQ ID NO: 14875 - protein, 9 aa, synthetic construct
GSSGGGGGS

SEQ ID NO: 14876 - protein, 11 aa, synthetic construct
GGGGSSEAAAK

SEQ ID NO: 14877 - protein, 11 aa, synthetic construct
EAAAKGSSGGS

SEQ ID NO: 14878 - protein, 11 aa, synthetic construct
GSSEAAAKGGS

SEQ ID NO: 14879 - protein, 11 aa, synthetic construct
EAAAKGSSPAP

SEQ ID NO: 14880 - protein, 11 aa, synthetic construct
EAAAKPAPGSS

SEQ ID NO: 14881 - protein, 9 aa, synthetic construct
PAPGSSGGG

SEQ ID NO: 14882 - protein, 30 aa, synthetic construct; identical to SEQ ID NO: 5112

SEQ ID NO: 14883 - protein, 25 aa, synthetic construct
EAAAKEAAAKEAAAKEAAAKEAAAK

SEQ ID NO: 14884 - protein, 11 aa, synthetic construct
GGGGSSEAAAK

SEQ ID NO: 14885 - protein, 11 aa, synthetic construct
EAAAKGGSPAP

SEQ ID NO: 14886 - protein, 11 aa, synthetic construct
PAPEAAAKGSS

SEQ ID NO: 14887 - protein, 9 aa, synthetic construct
GSSGGGGGS

SEQ ID NO: 14888 - protein, 9 aa, synthetic construct
GGGGSSPAP

SEQ ID NO: 14889 - protein, 11 aa, synthetic construct
EAAAKGGGGSS

SEQ ID NO: 14890 - protein, 9 aa, synthetic construct
PAPAPAPAP

SEQ ID NO: 14891 - protein, 11 aa, synthetic construct
GGSEAAAKGSS

SEQ ID NO: 14892 - protein, 9 aa, synthetic construct
GSSPAPGGG

SEQ ID NO: 14893 - protein, 6 aa, synthetic construct
GGGGGG

SEQ ID NO: 14894 - protein, 9 aa, synthetic construct
GGSGGSGGS

SEQ ID NO: 14895 - protein, 13 aa, synthetic construct
PAPAPAPAPAPAP

SEQ ID NO: 14896 - protein, 6 aa, synthetic construct
GSSPAP

SEQ ID NO: 14897 - protein, 9 aa, synthetic construct
GGGGGSGSS

SEQ ID NO: 14898 - protein, 11 aa, synthetic construct
EAAAKGSSGGS

SEQ ID NO: 14899 - protein, 5 aa, synthetic construct
EAAAK

SEQ ID NO: 14900 - protein, 8 aa, synthetic construct
PAPEAAAK

SEQ ID NO: 14901 - protein, 11 aa, synthetic construct
EAAAKGGSGSS

SEQ ID NO: 14902 - protein, 9 aa, synthetic construct
GGSGGSGGS

SEQ ID NO: 14903 - protein, 11 aa, synthetic construct
GSSGGGEAAAK

SEQ ID NO: 14904 - protein, 33 aa, synthetic construct; identical to SEQ ID NO: 5006

SEQ ID NO: 14905 - protein, 18 aa, synthetic construct
GGSGGSGGSGGSGGSGGS

SEQ ID NO: 14906 - protein, 8 aa, synthetic construct
GGGEAAAK

SEQ ID NO: 14907 - protein, 9 aa, synthetic construct
GGGGGSGSS

SEQ ID NO: 14908 - protein, 9 aa, synthetic construct
GSSPAPGGS

SEQ ID NO: 14909 - protein, 8 aa, synthetic construct
EAAAKGSS

SEQ ID NO: 14910 - protein, 9 aa, synthetic construct
GSSGGSGGG

SEQ ID NO: 14911 - protein, 9 aa, synthetic construct
GGSGGGGSS

SEQ ID NO: 14912 - protein, 9 aa, synthetic construct
GGSPAPGSS

SEQ ID NO: 14913 - protein, 18 aa, synthetic construct
GGSGGSGGSGGSGGSGGS

SEQ ID NO: 14914 - protein, 11 aa, synthetic construct
GSSEAAAKGGG

SEQ ID NO: 14915 - protein, 9 aa, synthetic construct
GGSGGSGGS

SEQ ID NO: 14916 - protein, 18 aa, synthetic construct
GSSGSSGSSGSSGSSGSS

SEQ ID NO: 14917 - protein, 15 aa, synthetic construct
GSSGSSGSSGSSGSS

SEQ ID NO: 14918 - protein, 8 aa, synthetic construct
PAPEAAAK

SEQ ID NO: 14919 - protein, 15 aa, synthetic construct
GSSGSSGSSGSSGSS

SEQ ID NO: 14920 - protein, 15 aa, synthetic construct
EAAAKGGGGSEAAAK

SEQ ID NO: 14921 - protein, 11 aa, synthetic construct
GGSPAPEAAAK

SEQ ID NO: 14922 - protein, 6 aa, synthetic construct
GSSGSS

SEQ ID NO: 14923 - skipped

SEQ ID NO: 14924 - protein, 15 aa, synthetic construct
GGGGSGGGGSGGGGS

SEQ ID NO: 14925 - protein, 30 aa, synthetic construct; identical to SEQ ID NO: 5130

SEQ ID NO: 14926 - protein, 9 aa, synthetic construct
GGSGSSPAP

SEQ ID NO: 14927 - protein, 8 aa, synthetic construct
GGGGGGGG

SEQ ID NO: 14928 - protein, 11 aa, synthetic construct
PAPGSSEAAAK

SEQ ID NO: 14929 - protein, 9 aa, synthetic construct
GGGGSSPAP

SEQ ID NO: 14930 - protein, 9 aa, synthetic construct
GSSGGSPAP

SEQ ID NO: 14931 - protein, 9 aa, synthetic construct
GSSGGGGGS

SEQ ID NO: 14932 - protein, 25 aa, synthetic construct
EAAAKEAAAKEAAAKEAAAKEAAAK

SEQ ID NO: 14933 - protein, 9 aa, synthetic construct
GSSGGGGGS

SEQ ID NO: 14934 - protein, 15 aa, synthetic construct
GGGGSEAAAKGGGGS

SEQ ID NO: 14935 - protein, 11 aa, synthetic construct
GGGEAAAKPAP

SEQ ID NO: 14936 - protein, 11 aa, synthetic construct
PAPGGGEAAAK

SEQ ID NO: 14937 - protein, 11 aa, synthetic construct
GGSGGGEAAAK

SEQ ID NO: 14938 - protein, 6 aa, synthetic construct
GSSGGG

SEQ ID NO: 14939 - protein, 11 aa, synthetic construct
EAAAKGSSGGS

SEQ ID NO: 14940 - protein, 5 aa, synthetic construct
GGGGG

SEQ ID NO: 14941 - protein, 6 aa, synthetic construct
GGGPAP

SEQ ID NO: 14942 - protein, 11 aa, synthetic construct
GSSGGSEAAAK

SEQ ID NO: 14943 - protein, 33 aa, synthetic construct; identical to SEQ ID NO: 5006

SEQ ID NO: 14944 - protein, 11 aa, synthetic construct
GSSGGGEAAAK

SEQ ID NO: 14945 - protein, 15 aa, synthetic construct
GSSGSSGSSGSSGSS

SEQ ID NO: 14946 - protein, 11 aa, synthetic construct
GGSEAAAKPAP

SEQ ID NO: 14947 - protein, 10 aa, synthetic construct
GGGGSGGGGS

SEQ ID NO: 14948 - protein, 11 aa, synthetic construct
GSSEAAAKPAP

SEQ ID NO: 14949 - protein, 15 aa, synthetic construct
GGGGSEAAAKGGGGS

SEQ ID NO: 14950 - protein, 11 aa, synthetic construct
PAPGSSEAAAK

SEQ ID NO: 14951 - protein, 11 aa, synthetic construct
EAAAKGGSGGG

SEQ ID NO: 14952 - protein, 9 aa, synthetic construct
GGGPAPGGS

SEQ ID NO: 14953 - protein, 11 aa, synthetic construct
GSSEAAAKGGS

SEQ ID NO: 14954 - protein, 11 aa, synthetic construct
EAAAKGGSGGG

SEQ ID NO: 14955 - protein, 9 aa, synthetic construct
GSSGGSPAP

SEQ ID NO: 14956 - protein, 5 aa, synthetic construct
PAPAP

SEQ ID NO: 14957 - protein, 9 aa, synthetic construct
PAPGGSGSS

SEQ ID NO: 14958 - protein, 11 aa, synthetic construct
EAAAKGGGGGS

SEQ ID NO: 14959 - protein, 11 aa, synthetic construct
PAPEAAAKGGS

SEQ ID NO: 14960 - protein, 11 aa, synthetic construct
GSSEAAAKPAP

SEQ ID NO: 14961 - protein, 6 aa, synthetic construct
GGSGGS

SEQ ID NO: 14962 - protein, 11 aa, synthetic construct
GSSEAAAKGGG

SEQ ID NO: 14963 - protein, 5 aa, synthetic construct
EAAAK

SEQ ID NO: 14964 - protein, 6 aa, synthetic construct
GSSPAP

SEQ ID NO: 14965 - protein, 11 aa, synthetic construct
EAAAKPAPGGG

SEQ ID NO: 14966 - protein, 15 aa, synthetic construct
GGGGSEAAAKGGGGS

SEQ ID NO: 14967 - protein, 11 aa, synthetic construct
EAAAKGSSGGS

SEQ ID NO: 14968 - protein, 12 aa, synthetic construct
GSAGSAAGSGEF

SEQ ID NO: 14969 - protein, 11 aa, synthetic construct
PAPEAAAKGGS

SEQ ID NO: 14970 - protein, 30 aa, synthetic construct; identical to SEQ ID NO: 5130

SEQ ID NO: 14971 - skipped

SEQ ID NO: 14972 - protein, 11 aa, synthetic construct
GGSEAAAKPAP

SEQ ID NO: 14973 - protein, 11 aa, synthetic construct
EAAAKGSSGGG

SEQ ID NO: 14974 - protein, 11 aa, synthetic construct
GGSEAAAKGGG

SEQ ID NO: 14975 - protein, 6 aa, synthetic construct
GGSGGS

SEQ ID NO: 14976 - protein, 11 aa, synthetic construct
GSSEAAAKGGS

SEQ ID NO: 14977 - protein, 11 aa, synthetic construct
PAPAPAPAPAP

SEQ ID NO: 14978 - protein, 11 aa, synthetic construct
GGSEAAAKGGG

SEQ ID NO: 14979 - protein, 9 aa, synthetic construct
PAPAPAPAP

SEQ ID NO: 14980 - protein, 25 aa, synthetic construct
GGGGSGGGGSGGGGSGGGGSGGGGS

SEQ ID NO: 14981 - protein, 11 aa, synthetic construct
PAPGGSEAAAK

SEQ ID NO: 14982 - protein, 9 aa, synthetic construct
GGSGGGPAP

SEQ ID NO: 14983 - protein, 18 aa, synthetic construct
GSSGSSGSSGSSGSSGSS

SEQ ID NO: 14984 - protein, 11 aa, synthetic construct
GGSEAAAKPAP

SEQ ID NO: 14985 - protein, 11 aa, synthetic construct
GGGEAAAKGSS

SEQ ID NO: 14986 - protein, 9 aa, synthetic construct
GGGPAPGGS

SEQ ID NO: 14987 - protein, 6 aa, synthetic construct
PAPGGG

SEQ ID NO: 14988 - protein, 11 aa, synthetic construct
GGSEAAAKGSS

SEQ ID NO: 14989 - protein, 11 aa, synthetic construct
GGGEAAAKGSS

SEQ ID NO: 14990 - protein, 11 aa, synthetic construct
GGGEAAAKGSS

SEQ ID NO: 14991 - protein, 20 aa, synthetic construct
EAAAKEAAAKEAAAKEAAAK

SEQ ID NO: 14992 - protein, 11 aa, synthetic construct
EAAAKGGGPAP

SEQ ID NO: 14993 - protein, 11 aa, synthetic construct
EAAAKGGGGSS

SEQ ID NO: 14994 - protein, 25 aa, synthetic construct
EAAAKEAAAKEAAAKEAAAKEAAAK

SEQ ID NO: 14995 - protein, 9 aa, synthetic construct
GSSGGGGGS

SEQ ID NO: 14996 - protein, 7 aa, synthetic construct
PAPAPAP

SEQ ID NO: 14997 - protein, 12 aa, synthetic construct
GGSGGSGGSGGS

SEQ ID NO: 14998 - protein, 8 aa, synthetic construct
GGGEAAAK

SEQ ID NO: 14999 - protein, 6 aa, synthetic construct
GGGGGS

SEQ ID NO: 15000 - protein, 6 aa, synthetic construct
GGSGGS

SEQ ID NO: 15001 - protein, 8 aa, synthetic construct
EAAAKGGS

SEQ ID NO: 15002 - protein, 1020 aa, synthetic construct
MDEYQRSLSRPLLTIMSINIEGLSLAKEELLAKMSEDISCDILCIQETHRDITMRRPKILGMQLAVERPHRQYGSAIFVRSGVAISATSLTEVNNIEILSVELDSCTVSSLYKPPGADFYFTPPTSCHNHEAHFVVGDFNSHSCVWGYDEDDRNGEAVLTWADNSRMSLLHDSKLPPSFNSGRWKRGYNPDLIFVKESISHQCTKRVLNPIPNTQHRPICCVAYAAVRPKSVPFRRRYNFNKANWTKFTETLEAAISDIEPSIENYDLFVEAVKRSSRLSIPRGCRTSYLPGLNEESLNQLQEYLRLFQENPYSDGTIAAGQKLSTALANAKKDRWIELLENLDMSKSSRKAWQLLRRLDSDPLVNPGHANVTPDQIAHQLIQNGKTNCSRIKMKINRVPELETHQLSSPLNLKELREAIKRCKTGKAPGLDDLMMEQIKHLGAKAENWLLKFYNQCLAHKQIPRAWRKTKIIAILKPGKDASNARNYRPISLLCHLYKVYERMLLNRLGPVIEPKLIAQQAGFRPGKNCTGQILHLTEHIEEGYEKGCITGTVFVDLTAAYDTVQHRKMLHKVYHITRDFDFTKTVQTLLENRSFYVEFQGQKSRWRRQKNGLPQGSVLAPTLFNIFTNDQPQPPLTKSFIYADDLGLTTQAKDFETVEKQLTNALKDLSSYYKENHLKPNPAKTQVCAFHLRNREANRKLKVTWEGQELEHCFHPKYLGVTLDRTLTYRKHCMNTKHKVAARNNILRKLTGSAWGADPQVIRTSALALSFSTAEYACPVWHKSAHAKQVDIALNETCRIITGCLKPTPVDKLYKLAGIAPPDVRREVAANGERKKVEHCESHPLHGYHPPPTRLKSRKGFMRTTTPLDVPPAAARVSLWAAKPGNSNWMAPQEGLPPGANQEWATWKSLNRLRSGVGRSKDNLARWHYLEESSTLCDCGAEQTTQHMYACPQCPASCTEEELFKATDNAVAVARFWSKTIGGGSPKKKRKVSGSETPGTSESATPESVSGWRLFKKIS

SEQ ID NO: 15003 - protein, 1137 aa, synthetic construct
MDSTAHPNQGRGLEKVSQTLPALQTPGQHTAAGGSSPLSGRNQRKNTKKLLLGAWNIRTLLDRENTPRPERRTALIGKELARYNIDIAALSETRLPEEGSLSEPTTGYTFFWKGRASNEDRIHGVGLAIKTSLLKQLPDLPVGISERLMKIRLPLSKDRYATIISAYAPTLTSTEETIEQFYSDLSAVLHSVPTNDKLILLGDFNARVGQDHERWKGVLGKHGVGKMNNNGLLLLSKCSEFELTITNTVFRMANKYKTTWMHPRSKQWHLIDYIIVRRRDIQDVKITRAMRGAECWTDHRLVRATLQMRIAPRHPKRAQTVRAFYNVSRLRDPSYLQTFQSCLDDKLSAKGPLTGSSTEKWNQFRDAVKETSKAVLGPKQRNHQDWFDENNTAIEDLLSKKNKAFMEWQNNPNSAPKKDRFKSLQATAQREIRKMQDRWWEKKAEEIQRFADMKNYKQFFSALKTVYGPLKPTTTPLLSSDGDTLIKDKKGISNRWKEHFSQLLNRPSSVDQSALDQIPQNRTIEQLDVPPSIEEVQKAIKQMSAGKAPGKDGIPTEVYKALNGKALQAFHIVLTSIWEEEDMPPELRDASIVALYKNKGSRAACDNYRGISLLSTAGKILARVILNRLLSSVSEQNLPESQCGFRPDRSTIDMVFTVRQMQEKCLEQNLSLYIVFIDLTKAFDTVNRDALWVILSKLGCPAKFVKLIQLFHVDMTGEVLSGGETSDRFNISNGVKQGCVLAPVLFNLFFTQVLRHAVMDLDLGVYIKYRLDGSLFDLRRLTAKTKTTERLILEALFADDCALMAHQENHLQTIVDRFSTATKLFGLTISLSKTEVLFQPAPGRPTNQPCITIDGTQLSNVNTFKYLGSTIANDGSLDHEINARIQKASQALGRLRCKVLQHRGVSTATKLKVYNAVVLSSLLYGCETWTLYRKHMKQLEQFHQRSLRSIMRIRWQDRITNQEVLDRANSTSIEVMVLKTQLRWSGHVIRMDPQRIPRQVFYGELSAGLRKQGRPKKRFKDQLKSNLKWAGITPKQLELAASDRSSWRTHINHAATTFEDERRRRLAAARERRHQATTAPPVTTGVPCPMCHKLCASAFGLQSHMRVHRRSGSETPGTSESATPESVSGWRLFKKIS

SEQ ID NO: 15004 - RNA, 123 nt, synthetic construct
  source 1..123: mol_type = other RNA
  modified_base 1: mod_base = OTHER; note = 2'-O-methyl modified nucleotide with phosphorothioate linkage
  modified_base 2: mod_base = OTHER; note = 2'-O-methyl modified nucleotide with phosphorothioate linkage
  modified_base 3: mod_base = OTHER; note = 2'-O-methyl modified nucleotide with phosphorothioate linkage
  modified_base 29: mod_base = OTHER; note = 2'-O-methyl modified nucleotide
  modified_base 30: mod_base = OTHER; note = 2'-O-methyl modified nucleotide
  modified_base 31: mod_base = OTHER; note = 2'-O-methyl modified nucleotide
  modified_base 32: mod_base = OTHER; note = 2'-O-methyl modified nucleotide
  modified_base 33: mod_base = OTHER; note = 2'-O-methyl modified nucleotide
  modified_base 34: mod_base = OTHER; note = 2'-O-methyl modified nucleotide
  modified_base 35: mod_base = OTHER; note = 2'-O-methyl modified nucleotide
  modified_base 36: mod_base = OTHER; note = 2'-O-methyl modified nucleotide
  modified_base 37: mod_base = OTHER; note = 2'-O-methyl modified nucleotide
  modified_base 38: mod_base = OTHER; note = 2'-O-methyl modified nucleotide
  modified_base 39: mod_base = OTHER; note = 2'-O-methyl modified nucleotide
  modified_base 40: mod_base = OTHER; note = 2'-O-methyl modified nucleotide
  modified_base 69: mod_base = OTHER; note = 2'-O-methyl modified nucleotide
  modified_base 70: mod_base = OTHER; note = 2'-O-methyl modified nucleotide
  modified_base 71: mod_base = OTHER; note = 2'-O-methyl modified nucleotide
  modified_base 72: mod_base = OTHER; note = 2'-O-methyl modified nucleotide
  modified_base 73: mod_base = OTHER; note = 2'-O-methyl modified nucleotide
  modified_base 74: mod_base = OTHER; note = 2'-O-methyl modified nucleotide
  modified_base 75: mod_base = OTHER; note = 2'-O-methyl modified nucleotide
  modified_base 76: mod_base = OTHER; note = 2'-O-methyl modified nucleotide
  modified_base 77: mod_base = OTHER; note = 2'-O-methyl modified nucleotide
  modified_base 78: mod_base = OTHER; note = 2'-O-methyl modified nucleotide
  modified_base 79: mod_base = OTHER; note = 2'-O-methyl modified nucleotide
  modified_base 80: mod_base = OTHER; note = 2'-O-methyl modified nucleotide
  modified_base 81: mod_base = OTHER; note = 2'-O-methyl modified nucleotide
  modified_base 82: mod_base = OTHER; note = 2'-O-methyl modified nucleotide
  modified_base 83: mod_base = OTHER; note = 2'-O-methyl modified nucleotide
  modified_base 84: mod_base = OTHER; note = 2'-O-methyl modified nucleotide
  modified_base 85: mod_base = OTHER; note = 2'-O-methyl modified nucleotide
  modified_base 86: mod_base = OTHER; note = 2'-O-methyl modified nucleotide
  modified_base 87: mod_base = OTHER; note = 2'-O-methyl modified nucleotide
  modified_base 88: mod_base = OTHER; note = 2'-O-methyl modified nucleotide
  modified_base 89: mod_base = OTHER; note = 2'-O-methyl modified nucleotide
  modified_base 90: mod_base = OTHER; note = 2'-O-methyl modified nucleotide
  modified_base 91: mod_base = OTHER; note = 2'-O-methyl modified nucleotide
  modified_base 92: mod_base = OTHER; note = 2'-O-methyl modified nucleotide
  modified_base 93: mod_base = OTHER; note = 2'-O-methyl modified nucleotide
  modified_base 94: mod_base = OTHER; note = 2'-O-methyl modified nucleotide
  modified_base 95: mod_base = OTHER; note = 2'-O-methyl modified nucleotide
  modified_base 96: mod_base = OTHER; note = 2'-O-methyl modified nucleotide
  modified_base 120: mod_base = OTHER; note = Nucleotide with phosphorothioate linkage
  modified_base 121: mod_base = OTHER; note = 2'-O-methyl modified nucleotide with phosphorothioate linkage
  modified_base 122: mod_base = OTHER; note = 2'-O-methyl modified nucleotide with phosphorothioate linkage
  modified_base 123: mod_base = OTHER; note = 2'-O-methyl modified nucleotide
gagaatcaaaatcggtgaatgttttagagctagaaatagcaagttaaaataaggctagtccgttatcaacttgaaaaagtggcaccgagtcggtgcctgtctgcctatttagtgcaccgattt

SEQ ID NO: 15005 - RNA, 125 nt, synthetic construct
  source 1..125: mol_type = other RNA
  modified_base 1: mod_base = OTHER; note = 2'-O-methyl modified nucleotide with phosphorothioate linkage
  modified_base 2: mod_base = OTHER; note = 2'-O-methyl modified nucleotide with phosphorothioate linkage
  modified_base 3: mod_base = OTHER; note = 2'-O-methyl modified nucleotide with phosphorothioate linkage
  modified_base 29: mod_base = OTHER; note = 2'-O-methyl modified nucleotide
  modified_base 30: mod_base = OTHER; note = 2'-O-methyl modified nucleotide
  modified_base 31: mod_base = OTHER; note = 2'-O-methyl modified nucleotide
  modified_base 32: mod_base = OTHER; note = 2'-O-methyl modified nucleotide
  modified_base 33: mod_base = OTHER; note = 2'-O-methyl modified nucleotide
  modified_base 34: mod_base = OTHER; note = 2'-O-methyl modified nucleotide
  modified_base 35: mod_base = OTHER; note = 2'-O-methyl modified nucleotide
  modified_base 36: mod_base = OTHER; note = 2'-O-methyl modified nucleotide
  modified_base 37: mod_base = OTHER; note = 2'-O-methyl modified nucleotide
  modified_base 38: mod_base = OTHER; note = 2'-O-methyl modified nucleotide
  modified_base 39: mod_base = OTHER; note = 2'-O-methyl modified nucleotide
  modified_base 40: mod_base = OTHER; note = 2'-O-methyl modified nucleotide
  modified_base 69: mod_base = OTHER; note = 2'-O-methyl modified nucleotide
  modified_base 70: mod_base = OTHER; note = 2'-O-methyl modified nucleotide
  modified_base 71: mod_base = OTHER; note = 2'-O-methyl modified nucleotide
  modified_base 72: mod_base = OTHER; note = 2'-O-methyl modified nucleotide
  modified_base 73: mod_base = OTHER; note = 2'-O-methyl modified nucleotide
  modified_base 74: mod_base = OTHER; note = 2'-O-methyl modified nucleotide
  modified_base 75: mod_base = OTHER; note = 2'-O-methyl modified nucleotide
  modified_base 76: mod_base = OTHER; note = 2'-O-methyl modified nucleotide
  modified_base 77: mod_base = OTHER; note = 2'-O-methyl modified nucleotide
  modified_base 78: mod_base = OTHER; note = 2'-O-methyl modified nucleotide
  modified_base 79: mod_base = OTHER; note = 2'-O-methyl modified nucleotide
  modified_base 80: mod_base = OTHER; note = 2'-O-methyl modified nucleotide
  modified_base 81: mod_base = OTHER; note = 2'-O-methyl modified nucleotide
  modified_base 82: mod_base = OTHER; note = 2'-O-methyl modified nucleotide
  modified_base 83: mod_base = OTHER; note = 2'-O-methyl modified nucleotide
  modified_base 84: mod_base = OTHER; note = 2'-O-methyl modified nucleotide
  modified_base 85: mod_base = OTHER; note = 2'-O-methyl modified nucleotide
  modified_base 86: mod_base = OTHER; note = 2'-O-methyl modified nucleotide
  modified_base 87: mod_base = OTHER; note = 2'-O-methyl modified nucleotide
  modified_base 88: mod_base = OTHER; note = 2'-O-methyl modified nucleotide
  modified_base 89: mod_base = OTHER; note = 2'-O-methyl modified nucleotide
  modified_base 90: mod_base = OTHER; note = 2'-O-methyl modified nucleotide
  modified_base 91: mod_base = OTHER; note = 2'-O-methyl modified nucleotide
  modified_base 92: mod_base = OTHER; note = 2'-O-methyl modified nucleotide
  modified_base 93: mod_base = OTHER; note = 2'-O-methyl modified nucleotide
  modified_base 94: mod_base = OTHER; note = 2'-O-methyl modified nucleotide
  modified_base 95: mod_base = OTHER; note = 2'-O-methyl modified nucleotide
  modified_base 96: mod_base = OTHER; note = 2'-O-methyl modified nucleotide
  modified_base 122: mod_base = OTHER; note = Nucleotide with phosphorothioate linkage
  modified_base 123: mod_base = OTHER; note = 2'-O-methyl modified nucleotide with phosphorothioate linkage
  modified_base 124: mod_base = OTHER; note = 2'-O-methyl modified nucleotide with phosphorothioate linkage
  modified_base 125: mod_base = OTHER; note = 2'-O-methyl modified nucleotide
actcacgctggatagcctccgttttagagctagaaatagcaagttaaaataaggctagtccgttatcaacttgaaaaagtggcaccgagtcggtgctttctggcctggatgatgggctatccagc

SEQ ID NO: 15006 - RNA, 123 nt, synthetic construct; identical to SEQ ID NO: 15004
  source 1..123: mol_type = other RNA

SEQ ID NO: 15007 - RNA, 125 nt, synthetic construct; identical to SEQ ID NO: 15005
  source 1..125: mol_type = other RNA

SEQ ID NO: 15008 - protein, 2122 aa, synthetic construct
MPAAKRVKLDGGDKKYSIGLDIGTNSVGWAVITDEYKVPSKKFKVLGNTDRHSIKKNLIGALLFDSGETAEATRLKRTARRRYTRRKNRICYLQEIFSNEMAKVDDSFFHRLEESFLVEEDKKHERHPIFGNIVDEVAYHEKYPTIYHLRKKLVDSTDKADLRLIYLALAHMIKFRGHFLIEGDLNPDNSDVDKLFIQLVQTYNQLFEENPINASGVDAKAILSARLSKSRRLENLIAQLPGEKKNGLFGNLIALSLGLTPNFKSNFDLAEDAKLQLSKDTYDDDLDNLLAQIGDQYADLFLAAKNLSDAILLSDILRVNTEITKAPLSASMIKRYDEHHQDLTLLKALVRQQLPEKYKEIFFDQSKNGYAGYIDGGASQEEFYKFIKPILEKMDGTEELLVKLNREDLLRKQRTFDNGSIPHQIHLGELHAILRRQEDFYPFLKDNREKIEKILTFRIPYYVGPLARGNSRFAWMTRKSEETITPWNFEEVVDKGASAQSFIERMTNFDKNLPNEKVLPKHSLLYEYFTVYNELTKVKYVTEGMRKPAFLSGEQKKAIVDLLFKTNRKVTVKQLKEDYFKKIECFDSVEISGVEDRFNASLGTYHDLLKIIKDKDFLDNEENEDILEDIVLTLTLFEDREMIEERLKTYAHLFDDKVMKQLKRRRYTGWGRLSRKLINGIRDKQSGKTILDFLKSDGFANRNFMQLIHDDSLTFKEDIQKAQVSGQGDSLHEHIANLAGSPAIKKGILQTVKVVDELVKVMGRHKPENIVIEMARENQTTQKGQKNSRERMKRIEEGIKELGSQILKEHPVENTQLQNEKLYLYYLQNGRDMYVDQELDINRLSDYDVDHIVPQSFLKDDSIDNKVLTRSDKARGKSDNVPSEEVVKKMKNYWRQLLNAKLITQRKFDNLTKAERGGLSELDKAGFIKRQLVETRQITKHVAQILDSRMNTKYDENDKLIREVKVITLKSKLVSDFRKDFQFYKVREINNYHHAHDAYLNAVVGTALIKKYPKLESEFVYGDYKVYDVRKMIAKSEQEIGKATAKYFFYSNIMNFFKTEITLANGEIRKRPLIETNGETGEIVWDKGRDFATVRKVLSMPQVNIVKKTEVQTGGFSKESILPKRNSDKLIARKKDWDPKKYGGFDSPTVAYSVLVVAKVEKGKSKKLKSVKELLGITIMERSSFEKNPIDFLEAKGYKEVKKDLIIKLPKYSLFELENGRKRMLASAGELQKGNELALPSKYVNFLYLASHYEKLKGSPEDNEQKQLFVEQHKHYLDEIIEQISEFSKRVILADANLDKVLSAYNKHRDKPIREQAENIIHLFTLTNLGAPAAFKYFDTTIDRKRYTSTKEVLDATLIHQSITGLYETRIDLSQLGGDSGGSSGGSSGSETPGTSESATPESSGGSSGGSSTLNIEDEYRLHETSKEPDVSLGSTWLSDFPQAWAETGGMGLAVRQAPLIIPLKATSTPVSIKQYPMSQEARLGIKPHIQRLLDQGILVPCQSPWNTPLLPVKKPGTNDYRPVQDLREVNKRVEDIHPTVPNPYNLLSGLPPSHQWYTVLDLKDAFFCLRLHPTSQPLFAFEWRDPEMGISGQLTWTRLPQGFKNSPTLFNEALHRDLADFRIQHPDLILLQYVDDLLLAATSELDCQQGTRALLQTLGNLGYRASAKKAQICQKQVKYLGYLLKEGQRWLTEARKETVMGQPTPKTPRQLREFLGKAGFCRLFIPGFAEMAAPLYPLTKPGTLFNWGPDQQKAYQEIKQALLTAPALGLPDLTKPFELFVDEKQGYAKGVLTQKLGPWRRPVAYLSKKLDPVAAGWPPCLRMVAAIAVLTKDAGKLTMGQPLVILAPHAVEALVKQPPDRWLSNARMTHYQALLLDTDRVQFGPVVALNPATLLPLPEEGLQHNCLDILAEAHGTRPDLTDQPLPDADHTWYTDGSSLLQEGQRKAGAAVTTETEVIWAKALPAGTSAQRAELIALTQALKMAEGKKLNVYTDSRYAFATAHIHGEIYRRRGWLTSEGKEIKNKDEILALLKALFLPKRLSIIHCPGHQKGHSAEARGNRMADQAARKAAITETPDTSTLLIENSSPSGGSKRTADGSEFEKRTADGSEFESPKKKAKVE

SEQ ID NO: 15009 - RNA, 1268 nt, synthetic construct
  source 1..1268: mol_type = other RNA
gggggacacggaaagagcctccccgaagattgagtgaattcagtcgggcgtcccctgggcaacgtttcttgtaagcggccgatctttccaccccaaaagcattggatgagtttacggatccgaattctcgacggatcgatccgaacaaacgacccaacacccgtgcgttttattctgtctttttattgccgatcccccggccgctttacttgtacagctcgtccatgccgagagtgatcccggcggcggtcacgaactccagcaggaccatgtgatcgcgcttctcgttggggtctttgctcagggcggactgggtgctcaggtagtggttgtcgggcagcagcacggggccgtcgccgatgggggtgttctgctggtagtggtcggcgagctgcacgctgccgtcctcgatgttgtggcggatcttgaagttcaccttgatgccgttcttctgcttgtcggccatgatatagacgttgtggctgttgtagttgtactccagcttgtgccccaggatgttgccgtcctccttgaagtcgatgcccttcagctcgatgcggttcaccagggtgtcgccctcgaacttcacctcggcgcgggtcttgtagttgccgtcgtccttgaagaagatggtgcgctcctggacgtagccttcgggcatggcggacttgaagaagtcgtgctgcttcatgtggtcggggtagcggctgaagcactgcacgccgtaggtcagggtggtcacgagggtgggccagggcacgggcagcttgccggtggtgcagatgaacttcagggtcagcttgccgtaggtggcatcgccctcgccctcgccggacacgctgaacttgtggccgtttacgtcgccgtccagctcgaccaggatgggcaccaccccggtgaacagctcctcgcccttgctcaccatggtggctttaccaacagtaccggaatgccaagcttgggtcctgtgttctggcggcaaacccgttgcgaaaaagaacgttcacggcgactactgcacttatatacggttctcccccaccctcgggaaaaaggcggagccagtacacgacatcactttcccagtttaccccgcgccaccttctctaggcaccggatcaattgccgacccctccccccaacttctcggggactgtgggcgatgtgcgctctgccctagttgcttgtgatttcttttcttttttattttatttccattatttgaaatgtatttgttgtagcaatgcttttgacacgaaataaataaa

SEQ ID NO: 15010 - RNA, 1829 nt, synthetic construct
  source 1..1829: mol_type = other RNA
gggtgtatggggtgctcagggaggggtagtatctctggtatggagggcttgtcgtgccctcctagggcagctctccagcctctgacccccacctgacacccagctctcacttgtggctcccagtagctgctagcatgtggcagcggccacaccccgggcaacggcttcgacaggccggctaaaccttgtgagggtagccatcgggtcatcgacccctggtgaaccagggctttgctcacccagcatgtgaagactgcttcggctgaacagacggaagaaaccaataagaaggttcaacggctgagagggcgacgcagcaaagcactgtggagtgcttagggcgtgttggagcacaaaggacaacacggccatccaatgcagctgaggaagtctccagatgtaacaatttttcgtgccactggacccaggcttccaacgccgagagagtgggactgtctctgtgcatcggcttttccacttaaatctctttcacgcacaagtatctttgtgcacactcatctatcctaaccccgtccaccctcttcaagacctgcggcgatgggggagtggcgacgcaacaggtggaggtgaccactggcagttgtagtcacgatcctgcacgtaggcggcccacggaccagtggtcgctcggccctgtgggcagcagggacgttcggcagcatcctgggcgactgagcagccctctctaggtttacggatccgaattctcgacggatcgatccgaacaaacgacccaacacccgtgcgttttattctgtctttttattgccgatcccccggccgctttacttgtacagctcgtccatgccgagagtgatcccggcggcggtcacgaactccagcaggaccatgtgatcgcgcttctcgttggggtctttgctcagggcggactgggtgctcaggtagtggttgtcgggcagcagcacggggccgtcgccgatgggggtgttctgctggtagtggtcggcgagctgcacgctgccgtcctcgatgttgtggcggatcttgaagttcaccttgatgccgttcttctgcttgtcggccatgatatagacgttgtggctgttgtagttgtactccagcttgtgccccaggatgttgccgtcctccttgaagtcgatgcccttcagctcgatgcggttcaccagggtgtcgccctcgaacttcacctcggcgcgggtcttgtagttgccgtcgtccttgaagaagatggtgcgctcctggacgtagccttcgggcatggcggacttgaagaagtcgtgctgcttcatgtggtcggggtagcggctgaagcactgcacgccgtaggtcagggtggtcacgagggtgggccagggcacgggcagcttgccggtggtgcagatgaacttcagggtcagcttgccgtaggtggcatcgccctcgccctcgccggacacgctgaacttgtggccgtttacgtcgccgtccagctcgaccaggatgggcaccaccccggtgaacagctcctcgcccttgctcaccatggtggctttaccaacagtaccggaatgccaagcttgggtcctgtgttctggcggcaaacccgttgcgaaaaagaacgttcacggcgactactgcacttatatacggttctcccccaccctcgggaaaaaggcggagccagtacacgacatcactttcccagtttaccccgcgccaccttctctaggcaccggatcaattgccgacccctccccccaacttctcggggactgtgggcgatgtgcgctctgccctgaaactgcacaaagacaatagtcattctcgatcaccgagagactaccact

SEQ ID NO: 15011 - RNA, 2766 nt, synthetic construct
  source 1..2766: mol_type = other RNA
gggtgtatggggtgctcagggaggggtagtatctctggtatggagggcttgtcgtgccctcctagggcagctctccagcctctgacccccacctgacacccagctctcacttgtggctcccagtagctgctagcatgtggcagcggccacaccccgggcaacggcttcgacaggccggctaaaccttgtgagggtagccatcgggtcatcgacccctggtgaaccagggctttgctcacccagcatgtgaagactgcttcggctgaacagacggaagaaaccaataagaaggttcaacggctgagagggcgacgcagcaaagcactgtggagtgcttagggcgtgttggagcacaaaggacaacacggccatccaatgcagctgaggaagtctccagatgtaacaatttttcgtgccactggacccaggcttccaacgccgagagagtgggactgtctctgtgcatcggcttttccacttaaatctctttcacgcacaagtatctttgtgcacactcatctatcctaaccccgtccaccctcttcaagacctgcggcgatgggggagtggcgacgcaacaggtggaggtgaccactggcagttgtagtcacgatcctgcacgtaggcggcccacggaccagtggtcgctcggccctgtgggcagcagggacgttcggcagcatcctgggcgactgagcagccctctctaggtttacggatccgaattctcgacggatcgatccgaacaaacgacccaacacccgtgcgttttattctgtctttttattgccgatcccccggccgctttagcggggtggcaaggcttgcatatgcaacgcatcataagtgtccttggtggctgtagagagaccctggtacagaccgtcatgccccttgcctctgcgtctttcgcctttcattccgatctcgctataggcttcagccatcttgtccttctgcagctcattgtacaacccctcctgaggattttttctccggggctttccccccatctcgggatccctgccccgtctcttgtccagaacatcgtactcttctcgcctgccgagattcaattcattgtagagctgattctgaccctgctgatatgcgggagcatcggcgcttctagaaaatttcaccctggagcgataggctgcgaagtcgcgtggtggggcatagggctggtaatgcttgcgggtgggcccggggcggcggggagtcatgttcatgtagtcactgtgcaggagcctgctcctcttactcctacaatacagagtgatcacaagggagagaagcaacaccccacatgttccggccaaaggggcccaaatataaatatcacacgcgaagtccaggcctcgcgtatggacggcgcctcctgctgcgggcctgcaagcttcaggtctgaggctcaatggttggctggctatagttggagcgggtgtggggggccttggagcaggtgttgtggtcttgatctccagtttggtcccctgaccgaaagtccaggggacgtgactggtctctgcacaatagtagacgccgacgtcctcagcctcgacccgactaatcttcagggtgaaatcggcaccgctacctgagccggaaaagcgatccgggaccccgctgaaacggttggaaaccttgtagatcaggagctgtggactttggcccggcttctgcagataccagtgcaggtaggtgttgccgttagagtggaccagactctgggaactcttgcaggagatgctcgccggctcaccaggggtcacagacagagacagtggagtctgggtcatcacgatatcgctgccaccccctccagagccacctccgccggagccaccgccaccggaagacactgtcaccatggtgccctggccccagacgtcgaagtaccagtcataatcatacagggaggcgcagaaatacacggcggtatcttcggacctgagactagacagctccatgtatgccgtagaacttgacgtgtcgcgggtcatggtaaccctgccggtgaacttctggttgtactcagagtttccgctcgcaaaatagatccaacccatccactcgagtccctgcccgggagcctgccgcacccaattgatatagtaatctgggaagctgtagccggaagccttacagctcactttcacgctggcgccaggcttttttacctccgcgccggactgaacaagctgcacctgcgggcgagcggcatgcaagagcagggcaagaggcagaagcagggcggtcaccggcagagccatggtggctttaccaacagtaccggaatgccaagcttgggtctgggctcttttattgagctcggggagcagaagcgcgcgaacagaagcgagaagcgaactgattggttagttcaaataaggcacagggtcatttcaggtccttggggcaccctggaaacatctgatggttctctagaaactgctgagggcgggaccgcatctggggaccatctgttcttggccctgagccggggcaggaactgcttaccacagatatcctgtttggcccatattctgctgttccaactgttcttggccctgagccggggcaggaactgcttaccacagatatcctgtttggcccatattctgctgtctctctgttcctaaccttgatcctagcttgccaaacctacaggtggggtctttcattcccccctttttctggagactaaataaatgaaactgcacaaagacaatagtcattctcgatcaccgagagactaccact

SEQ ID NO: 15012 - protein, 9 aa, synthetic construct
GSSGGSGGG

SEQ ID NO: 15013 - protein, 11 aa, synthetic construct
GGGEAAAKPAP

SEQ ID NO: 15014 - protein, 8 aa, synthetic construct
PAPEAAAK

SEQ ID NO: 15015 - protein, 12 aa, synthetic construct
GSSGSSGSSGSS

SEQ ID NO: 15016 - protein, 11 aa, synthetic construct
GSSEAAAKPAP

SEQ ID NO: 15017 - protein, 11 aa, synthetic construct
PAPEAAAKGGG

SEQ ID NO: 15018 - protein, 11 aa, synthetic construct
GGSEAAAKGSS

SEQ ID NO: 15019 - protein, 11 aa, synthetic construct
EAAAKPAPGGS

SEQ ID NO: 15020 - protein, 11 aa, synthetic construct
GSSGGSEAAAK

SEQ ID NO: 15021 - protein, 30 aa, synthetic construct; identical to SEQ ID NO: 5112

SEQ ID NO: 15022 - protein, 11 aa, synthetic construct
EAAAKGGGGSS

SEQ ID NO: 15023 - protein, 9 aa, synthetic construct
GGGGGSGSS

SEQ ID NO: 15024 - protein, 5 aa, synthetic construct
PAPAP

SEQ ID NO: 15025 - protein, 9 aa, synthetic construct
GGGGGSPAP

SEQ ID NO: 15026 - protein, 6 aa, synthetic construct
GGGPAP

SEQ ID NO: 15027 - protein, 15 aa, synthetic construct
EAAAKGGGGSEAAAK

SEQ ID NO: 15028 - protein, 11 aa, synthetic construct
GGSEAAAKGGG

SEQ ID NO: 15029 - protein, 9 aa, synthetic construct
GSSPAPGGS

SEQ ID NO: 15030 - protein, 7 aa, synthetic construct
GGGGGGG

SEQ ID NO: 15031 - protein, 8 aa, synthetic construct
EAAAKGSS

SEQ ID NO: 15032 - protein, 15 aa, synthetic construct
EAAAKGGGGSEAAAK

SEQ ID NO: 15033 - protein, 15 aa, synthetic construct
GGGGSEAAAKGGGGS

SEQ ID NO: 15034 - protein, 11 aa, synthetic construct
EAAAKGGGGSS

SEQ ID NO: 15035 - protein, 11 aa, synthetic construct
GGGEAAAKGGS

SEQ ID NO: 15036 - protein, 11 aa, synthetic construct
PAPEAAAKGGG

SEQ ID NO: 15037 - protein, 9 aa, synthetic construct
GGGGSSGGS

SEQ ID NO: 15038 - protein, 6 aa, synthetic construct
GGSGSS

SEQ ID NO: 15039 - protein, 13 aa, synthetic construct
PAPAPAPAPAPAP

SEQ ID NO: 15040 - protein, 8 aa, synthetic construct
EAAAKGGG

SEQ ID NO: 15041 - protein, 13 aa, synthetic construct
PAPAPAPAPAPAP

SEQ ID NO: 15042 - protein, 15 aa, synthetic construct
GSSGSSGSSGSSGSS

SEQ ID NO: 15043 - protein, 6 aa, synthetic construct
GGGGSS

SEQ ID NO: 15044 - protein, 11 aa, synthetic construct
PAPGGGEAAAK

SEQ ID NO: 15045 - protein, 11 aa, synthetic construct
GGSGGGEAAAK

SEQ ID NO: 15046 - protein, 11 aa, synthetic construct
PAPAPAPAPAP

SEQ ID NO: 15047 - protein, 11 aa, synthetic construct
GGGEAAAKGGS

SEQ ID NO: 15048 - protein, 11 aa, synthetic construct
GGGEAAAKGSS

SEQ ID NO: 15049 - protein, 11 aa, synthetic construct
GSSPAPEAAAK

SEQ ID NO: 15050 - protein, 25 aa, synthetic construct
EAAAKEAAAKEAAAKEAAAKEAAAK

SEQ ID NO: 15051 - protein, 6 aa, synthetic construct
PAPGGG

SEQ ID NO: 15052 - protein, 11 aa, synthetic construct
GSSEAAAKGGG

SEQ ID NO: 15053 - protein, 11 aa, synthetic construct
GGGGSSEAAAK

SEQ ID NO: 15054 - protein, 9 aa, synthetic construct
PAPGSSGGS

SEQ ID NO: 15055 - protein, 18 aa, synthetic construct
GSSGSSGSSGSSGSSGSS

SEQ ID NO: 15056 - protein, 11 aa, synthetic construct
EAAAKGSSGGG

SEQ ID NO: 15057 - protein, 9 aa, synthetic construct
PAPGGGGSS

SEQ ID NO: 15058 - protein, 6 aa, synthetic construct
GGSPAP

SEQ ID NO: 15059 - protein, 15 aa, synthetic construct
GGSGGSGGSGGSGGS

SEQ ID NO: 15060 - protein, 9 aa, synthetic construct
PAPAPAPAP

SEQ ID NO: 15061 - protein, 5 aa, synthetic construct
GGGGG

SEQ ID NO: 15062 - protein, 12 aa, synthetic construct
GGSGGSGGSGGS

SEQ ID NO: 15063 - protein, 15 aa, synthetic construct
GSSGSSGSSGSSGSS

SEQ ID NO: 15064 - protein, 11 aa, synthetic construct
PAPGGSEAAAK

SEQ ID NO: 15065 - protein, 9 aa, synthetic construct
PAPAPAPAP

SEQ ID NO: 15066 - protein, 9 aa, synthetic construct
PAPGGGGSS

SEQ ID NO: 15067 - protein, 6 aa, synthetic construct
GGSGSS

SEQ ID NO: 15068 - protein, 20 aa, synthetic construct
EAAAKEAAAKEAAAKEAAAK

SEQ ID NO: 15069 - protein, 11 aa, synthetic construct
EAAAKGGSGGG

SEQ ID NO: 15070 - protein, 9 aa, synthetic construct
PAPGGGGSS

SEQ ID NO: 15071 - protein, 11 aa, synthetic construct
EAAAKGGGGGS

SEQ ID NO: 15072 - protein, 6 aa, synthetic construct
GGGGGS

SEQ ID NO: 15073 - protein, 11 aa, synthetic construct
GGGEAAAKGGS

SEQ ID NO: 15074 - protein, 11 aa, synthetic construct
EAAAKPAPGGG

SEQ ID NO: 15075 - protein, 9 aa, synthetic construct
GGSGGGPAP

SEQ ID NO: 15076 - protein, 11 aa, synthetic construct
GSSEAAAKPAP

SEQ ID NO: 15077 - protein, 13 aa, synthetic construct
PAPAPAPAPAPAP

SEQ ID NO: 15078 - protein, 9 aa, synthetic construct
GGSPAPGGG

SEQ ID NO: 15079 - protein, 11 aa, synthetic construct
GGSGGGEAAAK

SEQ ID NO: 15080 - protein, 5 aa, synthetic construct
PAPAP

SEQ ID NO: 15081 - protein, 8 aa, synthetic construct
GSSEAAAK

SEQ ID NO: 15082 - protein, 15 aa, synthetic construct
GGGGSGGGGSGGGGS

SEQ ID NO: 15083 - protein, 9 aa, synthetic construct
GSSGSSGSS

SEQ ID NO: 15084 - protein, 11 aa, synthetic construct
EAAAKGGSGGG

SEQ ID NO: 15085 - protein, 6 aa, synthetic construct
GSSPAP

SEQ ID NO: 15086 - protein, 8 aa, synthetic construct
GGGEAAAK

SEQ ID NO: 15087 - protein, 46 aa, synthetic construct; identical to SEQ ID NO: 5217

SEQ ID NO: 15088 - protein, 6 aa, synthetic construct
PAPGGS

SEQ ID NO: 15089 - protein, 9 aa, synthetic construct
PAPGSSGGS

SEQ ID NO: 15090 - protein, 8 aa, synthetic construct
PAPEAAAK

SEQ ID NO: 15091 - protein, 5 aa, synthetic construct
PAPAP

SEQ ID NO: 15092 - protein, 8 aa, synthetic construct
EAAAKGGS

SEQ ID NO: 15093 - protein, 15 aa, synthetic construct
GGGGSEAAAKGGGGS

SEQ ID NO: 15094 - protein, 11 aa, synthetic construct
EAAAKGSSGGS

SEQ ID NO: 15095 - protein, 9 aa, synthetic construct
PAPGGSGSS

SEQ ID NO: 15096 - protein, 11 aa, synthetic construct
PAPGGSEAAAK

SEQ ID NO: 15097 - protein, 11 aa, synthetic construct
PAPGSSEAAAK

SEQ ID NO: 15098 - protein, 9 aa, synthetic construct
PAPGSSGGG

SEQ ID NO: 15099 - protein, 11 aa, synthetic construct
GSSGGGEAAAK

SEQ ID NO: 15100 - protein, 6 aa, synthetic construct
GGGGGG

SEQ ID NO: 15101 - protein, 11 aa, synthetic construct
PAPEAAAKGGG

SEQ ID NO: 15102 - protein, 11 aa, synthetic construct
GGGEAAAKGGS

SEQ ID NO: 15103 - protein, 11 aa, synthetic construct
PAPAPAPAPAP

SEQ ID NO: 15104 - protein, 18 aa, synthetic construct
GSSGSSGSSGSSGSSGSS

SEQ ID NO: 15105 - protein, 11 aa, synthetic construct
EAAAKGGGPAP

SEQ ID NO: 15106 - protein, 11 aa, synthetic construct
PAPAPAPAPAP

SEQ ID NO: 15107 - protein, 11 aa, synthetic construct
PAPGGSEAAAK

SEQ ID NO: 15108 - protein, 9 aa, synthetic construct
GSSGGGPAP

SEQ ID NO: 15109 - protein, 9 aa, synthetic construct
GGGGGSPAP

SEQ ID NO: 15110 - protein, 9 aa, synthetic construct
GSSGGSGGG

SEQ ID NO: 15111 - protein, 5 aa, synthetic construct
PAPAP

SEQ ID NO: 15112 - protein, 9 aa, synthetic construct
GSSGGGPAP

SEQ ID NO: 15113 - protein, 6 aa, synthetic construct
GGSGSS

SEQ ID NO: 15114 - protein, 11 aa, synthetic construct
GGSPAPEAAAK

SEQ ID NO: 15115 - protein, 11 aa, synthetic construct
EAAAKGGSGGG

SEQ ID NO: 15116 - protein, 11 aa, synthetic construct
GGGGSSEAAAK

SEQ ID NO: 15117 - protein, 9 aa, synthetic construct
GGGGGSGSS

SEQ ID NO: 15118 - protein, 9 aa, synthetic construct
GGGGSSGGS

SEQ ID NO: 15119 - protein, 15 aa, synthetic construct
EAAAKGGGGSEAAAK

SEQ ID NO: 15120 - protein, 11 aa, synthetic construct
PAPGGGEAAAK

SEQ ID NO: 15121 - protein, 11 aa, synthetic construct
PAPEAAAKGGG

SEQ ID NO: 15122 - protein, 46 aa, synthetic construct; identical to SEQ ID NO: 5217

SEQ ID NO: 15123 - protein, 11 aa, synthetic construct
GSSGGSEAAAK

SEQ ID NO: 15124 - protein, 6 aa, synthetic construct
GGSPAP

SEQ ID NO: 15125 - protein, 8 aa, synthetic construct
GSSEAAAK

SEQ ID NO: 15126 - protein, 8 aa, synthetic construct
GSSEAAAK

SEQ ID NO: 15127 - protein, 11 aa, synthetic construct
EAAAKGSSGGS

SEQ ID NO: 15128 - protein, 11 aa, synthetic construct
GGGEAAAKPAP

SEQ ID NO: 15129 - protein, 11 aa, synthetic construct
EAAAKGGSPAP

SEQ ID NO: 15130 - protein, 11 aa, synthetic construct
GSSEAAAKPAP

SEQ ID NO: 15131 - protein, 9 aa, synthetic construct
GSSGSSGSS

SEQ ID NO: 15132 - protein, 20 aa, synthetic construct
EAAAKEAAAKEAAAKEAAAK

SEQ ID NO: 15133 - protein, 5 aa, synthetic construct
EAAAK

SEQ ID NO: 15134 - protein, 6 aa, synthetic construct
PAPGSS

SEQ ID NO: 15135 - protein, 6 aa, synthetic construct
PAPGGS

SEQ ID NO: 15136 - protein, 6 aa, synthetic construct
GGSGGS

SEQ ID NO: 15137 - protein, 33 aa, synthetic construct; identical to SEQ ID NO: 5006

SEQ ID NO: 15138 - protein, 11 aa, synthetic construct
GGSGGGEAAAK

SEQ ID NO: 15139 - protein, 9 aa, synthetic construct
PAPGSSGGG

SEQ ID NO: 15140 - protein, 6 aa, synthetic construct
GGSGGS

SEQ ID NO: 15141 - protein, 6 aa, synthetic construct
GSSGSS

SEQ ID NO: 15142 - protein, 11 aa, synthetic construct
PAPGGSEAAAK

SEQ ID NO: 15143 - protein, 12 aa, synthetic construct
GSAGSAAGSGEF

SEQ ID NO: 15144 - protein, 6 aa, synthetic construct
PAPGGG

SEQ ID NO: 15145 - protein, 11 aa, synthetic construct
EAAAKGGSGSS

SEQ ID NO: 15146 - protein, 11 aa, synthetic construct
GSSGGGEAAAK

SEQ ID NO: 15147 - protein, 9 aa, synthetic construct
GGSGGGPAP

SEQ ID NO: 15148 - protein, 13 aa, synthetic construct
PAPAPAPAPAPAP

SEQ ID NO: 15149 - protein, 16 aa, synthetic construct
SGSETPGTSESATPES

SEQ ID NO: 15150 - protein, 9 aa, synthetic construct
GGSGGSGGS

SEQ ID NO: 15151 - protein, 6 aa, synthetic construct
GGGGSS

SEQ ID NO: 15152 - protein, 11 aa, synthetic construct
GGGGGSEAAAK

SEQ ID NO: 15153 - protein, 16 aa, synthetic construct
SGSETPGTSESATPES

SEQ ID NO: 15154 - protein, 7 aa, synthetic construct
PAPAPAP

SEQ ID NO: 15155 - protein, 11 aa, synthetic construct
PAPEAAAKGSS

SEQ ID NO: 15156 - protein, 15 aa, synthetic construct
GSSGSSGSSGSSGSS

SEQ ID NO: 15157 - protein, 9 aa, synthetic construct
GGGPAPGSS

SEQ ID NO: 15158 - protein, 9 aa, synthetic construct
GGSGGGGSS

SEQ ID NO: 15159 - protein, 16 aa, synthetic construct
SGSETPGTSESATPES

SEQ ID NO: 15160 - protein, 11 aa, synthetic construct
EAAAKGSSGGS

SEQ ID NO: 15161 - protein, 11 aa, synthetic construct
GSSPAPEAAAK

SEQ ID NO: 15162 - protein, 11 aa, synthetic construct
GSSPAPEAAAK

SEQ ID NO: 15163 - protein, 9 aa, synthetic construct
GGGGSSPAP

SEQ ID NO: 15164 - protein, 11 aa, synthetic construct
PAPGGGEAAAK

SEQ ID NO: 15165 - protein, 11 aa, synthetic construct
PAPEAAAKGGS

SEQ ID NO: 15166 - protein, 18 aa, synthetic construct
GSSGSSGSSGSSGSSGSS

SEQ ID NO: 15167 - protein, 9 aa, synthetic construct
GGSPAPGSS

SEQ ID NO: 15168 - protein, 9 aa, synthetic construct
GGGPAPGGS

SEQ ID NO: 15169 - protein, 9 aa, synthetic construct
GGGPAPGSS

SEQ ID NO: 15170 - protein, 8 aa, synthetic construct
EAAAKPAP

SEQ ID NO: 15171 - protein, 15 aa, synthetic construct
EAAAKEAAAKEAAAK

SEQ ID NO: 15172 - protein, 11 aa, synthetic construct
GSSGGSEAAAK

SEQ ID NO: 15173 - protein, 9 aa, synthetic construct
PAPGGGGGS

SEQ ID NO: 15174 - protein, 8 aa, synthetic construct
GGGEAAAK

SEQ ID NO: 15175 - protein, 11 aa, synthetic construct
EAAAKGGGPAP

SEQ ID NO: 15176 - protein, 9 aa, synthetic construct
GGSGSSGGG

SEQ ID NO: 15177 - protein, 11 aa, synthetic construct
PAPEAAAKGSS

SEQ ID NO: 15178 - protein, 9 aa, synthetic construct
PAPGGGGGS

SEQ ID NO: 15179 - protein, 11 aa, synthetic construct
EAAAKGGGGGS

SEQ ID NO: 15180 - protein, 6 aa, synthetic construct
GGGGGS

SEQ ID NO: 15181 - protein, 25 aa, synthetic construct
GGGGSGGGGSGGGGSGGGGSGGGGS

SEQ ID NO: 15182 - protein, 11 aa, synthetic construct
EAAAKGGSPAP

SEQ ID NO: 15183 - protein, 9 aa, synthetic construct
GGGGSSPAP

SEQ ID NO: 15184 - protein, 9 aa, synthetic construct
GGGGSSGGS

SEQ ID NO: 15185 - protein, 9 aa, synthetic construct
PAPGSSGGS

SEQ ID NO: 15186 - protein, 6 aa, synthetic construct
GGGGGS

SEQ ID NO: 15187 - protein, 9 aa, synthetic construct
GGSGSSGGG

SEQ ID NO: 15188 - protein, 11 aa, synthetic construct
GSSGGSEAAAK

SEQ ID NO: 15189 - protein, 20 aa, synthetic construct
EAAAKEAAAKEAAAKEAAAK

SEQ ID NO: 15190 - protein, 11 aa, synthetic construct
GGSEAAAKGGG

SEQ ID NO: 15191 - protein, 33 aa, synthetic construct; identical to SEQ ID NO: 5006

SEQ ID NO: 15192 - protein, 11 aa, synthetic construct
GSSEAAAKGGS

SEQ ID NO: 15193 - protein, 30 aa, synthetic construct; identical to SEQ ID NO: 5112

SEQ ID NO: 15194 - protein, 8 aa, synthetic construct
GGGEAAAK

SEQ ID NO: 15195 - protein, 9 aa, synthetic construct
PAPAPAPAP

SEQ ID NO: 15196 - protein, 9 aa, synthetic construct
PAPGSSGGG

SEQ ID NO: 15197 - protein, 15 aa, synthetic construct
GSSGSSGSSGSSGSS

SEQ ID NO: 15198 - protein, 6 aa, synthetic construct
GGSPAP

SEQ ID NO: 15199 - protein, 30 aa, synthetic construct; identical to SEQ ID NO: 5112

SEQ ID NO: 15200 - protein, 8 aa, synthetic construct
PAPEAAAK

SEQ ID NO: 15201 - protein, 9 aa, synthetic construct
PAPGSSGGG

SEQ ID NO: 15202 - protein, 11 aa, synthetic construct
GGGGGSEAAAK

SEQ ID NO: 15203 - protein, 11 aa, synthetic construct
PAPAPAPAPAP

SEQ ID NO: 15204 - protein, 11 aa, synthetic construct
EAAAKGGSGSS

SEQ ID NO: 15205 - protein, 20 aa, synthetic construct
EAAAKEAAAKEAAAKEAAAK

SEQ ID NO: 15206 - protein, 9 aa, synthetic construct
PAPAPAPAP

SEQ ID NO: 15207 - protein, 9 aa, synthetic construct
GGGPAPGSS

SEQ ID NO: 15208 - protein, 11 aa, synthetic construct
PAPEAAAKGSS

SEQ ID NO: 15209 - protein, 9 aa, synthetic construct
GGSPAPGGG

SEQ ID NO: 15210 - protein, 20 aa, synthetic construct
GGGGSGGGGSGGGGSGGGGS

SEQ ID NO: 15211 - protein, 8 aa, synthetic construct
EAAAKGGS

SEQ ID NO: 15212 - protein, 9 aa, synthetic construct
PAPGSSGGS

SEQ ID NO: 15213 - protein, 10 aa, synthetic construct
GGGGSGGGGS

SEQ ID NO: 15214 - protein, 6 aa, synthetic construct
GGSGGS

SEQ ID NO: 15215 - protein, 15 aa, synthetic construct
EAAAKGGGGSEAAAK

SEQ ID NO: 15216 - protein, 20 aa, synthetic construct
EAAAKEAAAKEAAAKEAAAK

SEQ ID NO: 15217 - protein, 11 aa, synthetic construct
PAPGGGEAAAK

SEQ ID NO: 15218 - protein, 6 aa, synthetic construct
GSSGSS

SEQ ID NO: 15219 - protein, 11 aa, synthetic construct
EAAAKGGGGGS

SEQ ID NO: 15220 - protein, 11 aa, synthetic construct
GSSPAPEAAAK

SEQ ID NO: 15221 - protein, 8 aa, synthetic construct
GGGEAAAK

SEQ ID NO: 15222 - protein, 11 aa, synthetic construct
PAPEAAAKGSS

SEQ ID NO: 15223 - protein, 11 aa, synthetic construct
GGGGSSEAAAK

SEQ ID NO: 15224 - protein, 9 aa, synthetic construct
PAPGSSGGS

SEQ ID NO: 15225 - protein, 11 aa, synthetic construct
EAAAKGGGGGS

SEQ ID NO: 15226 - protein, 20 aa, synthetic construct
GGGGSGGGGSGGGGSGGGGS

SEQ ID NO: 15227 - protein, 11 aa, synthetic construct
EAAAKGGGGSS

SEQ ID NO: 15228 - protein, 11 aa, synthetic construct
GGGEAAAKGGS

SEQ ID NO: 15229 - protein, 9 aa, synthetic construct
GGGGGSPAP

SEQ ID NO: 15230 - protein, 11 aa, synthetic construct
GGSGGGEAAAK

SEQ ID NO: 15231 - protein, 9 aa, synthetic construct
PAPGGGGGS

SEQ ID NO: 15232 - protein, 15 aa, synthetic construct
EAAAKGGGGSEAAAK

SEQ ID NO: 15233 - protein, 11 aa, synthetic construct
PAPEAAAKGSS

SEQ ID NO: 15234 - protein, 11 aa, synthetic construct
GGSEAAAKGGG

SEQ ID NO: 15235 - protein, 15 aa, synthetic construct
GGSGGSGGSGGSGGS

SEQ ID NO: 15236 - protein, 15 aa, synthetic construct
GGSGGSGGSGGSGGS

SEQ ID NO: 15237 - protein, 6 aa, synthetic construct
GGGGGG

SEQ ID NO: 15238 - protein, 9 aa, synthetic construct
GGGGGSGSS

SEQ ID NO: 15239 - protein, 11 aa, synthetic construct
GGSEAAAKPAP

SEQ ID NO: 15240 - protein, 9 aa, synthetic construct
GGGPAPGSS

SEQ ID NO: 15241 - protein, 6 aa, synthetic construct
GGGGGS

SEQ ID NO: 15242 - protein, 11 aa, synthetic construct
GGSPAPEAAAK

SEQ ID NO: 15243 - protein, 11 aa, synthetic construct
PAPEAAAKGGS

SEQ ID NO: 15244 - protein, 11 aa, synthetic construct
EAAAKGGSGSS

SEQ ID NO: 15245 - protein, 11 aa, synthetic construct
GGGPAPEAAAK

SEQ ID NO: 15246 - protein, 9 aa, synthetic construct
PAPGGGGSS

SEQ ID NO: 15247 - protein, 9 aa, synthetic construct
GSSPAPGGG

SEQ ID NO: 15248 - protein, 9 aa, synthetic construct
GGGGSSGGS

SEQ ID NO: 15249 - protein, 11 aa, synthetic construct
EAAAKGGGGGS

SEQ ID NO: 15250 - protein, 11 aa, synthetic construct
GGSEAAAKGSS

SEQ ID NO: 15251 - protein, 6 aa, synthetic construct
GSSGGG

SEQ ID NO: 15252 - protein, 12 aa, synthetic construct
GGSGGSGGSGGS

SEQ ID NO: 15253 - protein, 8 aa, synthetic construct
EAAAKPAP

SEQ ID NO: 15254 - protein, 9 aa, synthetic construct
GGGGSSGGS

SEQ ID NO: 15255 - protein, 6 aa, synthetic construct
GGSGGS

SEQ ID NO: 15256 - protein, 11 aa, synthetic construct
EAAAKGGGGGS

SEQ ID NO: 15257 - protein, 30 aa, synthetic construct; identical to SEQ ID NO: 5112

SEQ ID NO: 15258 - protein, 9 aa, synthetic construct
GGSGGSGGS

SEQ ID NO: 15259 - protein, 11 aa, synthetic construct
GGGGGSEAAAK

SEQ ID NO: 15260 - protein, 9 aa, synthetic construct
GGSGSSPAP

SEQ ID NO: 15261 - protein, 15 aa, synthetic construct
EAAAKEAAAKEAAAK

SEQ ID NO: 15262 - protein, 11 aa, synthetic construct
PAPEAAAKGGS

SEQ ID NO: 15263 - protein, 11 aa, synthetic construct
GGSGSSEAAAK

SEQ ID NO: 15264 - protein, 9 aa, synthetic construct
GGGGGSGSS

SEQ ID NO: 15265 - protein, 9 aa, synthetic construct
GGGPAPGGS

SEQ ID NO: 15266 - protein, 16 aa, synthetic construct
SGSETPGTSESATPES

SEQ ID NO: 15267 - protein, 9 aa, synthetic construct
GSSPAPGGS

SEQ ID NO: 15268 - protein, 15 aa, synthetic construct
GSSGSSGSSGSSGSS

SEQ ID NO: 15269 - protein, 11 aa, synthetic construct
EAAAKGGGPAP

SEQ ID NO: 15270 - protein, 6 aa, synthetic construct
GSSGGG

SEQ ID NO: 15271 - protein, 11 aa, synthetic construct
GGGEAAAKPAP

SEQ ID NO: 15272 - protein, 9 aa, synthetic construct
PAPGGSGGG

SEQ ID NO: 15273 - protein, 9 aa, synthetic construct
GSSGGSGGG

SEQ ID NO: 15274 - protein, 6 aa, synthetic construct
GGSGGG

SEQ ID NO: 15275 - protein, 11 aa, synthetic construct
EAAAKGGSPAP

SEQ ID NO: 15276 - protein, 11 aa, synthetic construct
GGSPAPEAAAK

SEQ ID NO: 15277 - protein, 11 aa, synthetic construct
GSSGGSEAAAK

SEQ ID NO: 15278 - protein, 12 aa, synthetic construct
GSAGSAAGSGEF

SEQ ID NO: 15279 - protein, 9 aa, synthetic construct
PAPGGSGSS

SEQ ID NO: 15280 - protein, 11 aa, synthetic construct
GGSEAAAKGGG

SEQ ID NO: 15281 - protein, 9 aa, synthetic construct
GGSPAPGSS

SEQ ID NO: 15282 - protein, 9 aa, synthetic construct
GSSGGSGGG

SEQ ID NO: 15283 - protein, 11 aa, synthetic construct
PAPEAAAKGGG

SEQ ID NO: 15284 - protein, 11 aa, synthetic construct
GGGEAAAKPAP

SEQ ID NO: 15285 - protein, 8 aa, synthetic construct
GGSEAAAK

SEQ ID NO: 15286 - protein, 11 aa, synthetic construct
GGGEAAAKGSS

SEQ ID NO: 15287 - protein, 11 aa, synthetic construct
GGGGGSEAAAK

SEQ ID NO: 15288 - protein, 11 aa, synthetic construct
PAPAPAPAPAP

SEQ ID NO: 15289 - protein, 11 aa, synthetic construct
PAPAPAPAPAP

SEQ ID NO: 15290 - protein, 9 aa, synthetic construct
GGGGSSGGS

SEQ ID NO: 15291 - protein, 11 aa, synthetic construct
PAPGGSEAAAK

SEQ ID NO: 15292 - protein, 11 aa, synthetic construct
PAPAPAPAPAP

SEQ ID NO: 15293 - protein, 11 aa, synthetic construct
EAAAKPAPGGG

SEQ ID NO: 15294 - protein, 8 aa, synthetic construct
GGSEAAAK

SEQ ID NO: 15295 - protein, 11 aa, synthetic construct
GGGEAAAKGSS

SEQ ID NO: 15296 - protein, 9 aa, synthetic construct
GGSPAPGSS

SEQ ID NO: 15297 - protein, 11 aa, synthetic construct
GGSEAAAKPAP

SEQ ID NO: 15298 - protein, 11 aa, synthetic construct
PAPEAAAKGGG

SEQ ID NO: 15299 - protein, 11 aa, synthetic construct
GSSEAAAKPAP

SEQ ID NO: 15300 - protein, 15 aa, synthetic construct
GGGGSEAAAKGGGGS

SEQ ID NO: 15301 - protein, 11 aa, synthetic construct
GSSEAAAKGGS

SEQ ID NO: 15302 - protein, 15 aa, synthetic construct
GSSGSSGSSGSSGSS

SEQ ID NO: 15303 - protein, 9 aa, synthetic construct
GGGGGSPAP

SEQ ID NO: 15304 - protein, 8 aa, synthetic construct
GGSEAAAK

SEQ ID NO: 15305 - protein, 11 aa, synthetic construct
GSSPAPEAAAK

SEQ ID NO: 15306 - protein, 9 aa, synthetic construct
GGGPAPGGS

SEQ ID NO: 15307 - protein, 11 aa, synthetic construct
GGSPAPEAAAK

SEQ ID NO: 15308 - protein, 11 aa, synthetic construct
GGSEAAAKPAP

SEQ ID NO: 15309 - protein, 9 aa, synthetic construct
PAPAPAPAP

SEQ ID NO: 15310 - protein, 9 aa, synthetic construct
GSSPAPGGG

SEQ ID NO: 15311 - protein, 12 aa, synthetic construct
GSSGSSGSSGSS

SEQ ID NO: 15312 - protein, 11 aa, synthetic construct
GGSEAAAKGSS

SEQ ID NO: 15313 - protein, 9 aa, synthetic construct
GGSGSSGGG

SEQ ID NO: 15314 - protein, 18 aa, synthetic construct
GSSGSSGSSGSSGSSGSS

SEQ ID NO: 15315 - protein, 11 aa, synthetic construct
GGSEAAAKPAP

SEQ ID NO: 15316 - protein, 9 aa, synthetic construct
GSSGGSGGG

SEQ ID NO: 15317 - protein, 46 aa, synthetic construct; identical to SEQ ID NO: 5217

SEQ ID NO: 15318 - protein, 11 aa, synthetic construct
GGSPAPEAAAK

SEQ ID NO: 15319 - protein, 11 aa, synthetic construct
GGGGSSEAAAK

SEQ ID NO: 15320 - protein, 11 aa, synthetic construct
GGSGGGEAAAK

SEQ ID NO: 15321 - protein, 15 aa, synthetic construct
GGGGSEAAAKGGGGS

SEQ ID NO: 15322 - protein, 11 aa, synthetic construct
GGSGSSEAAAK

SEQ ID NO: 15323 - protein, 11 aa, synthetic construct
GGSEAAAKPAP

SEQ ID NO: 15324 - protein, 11 aa, synthetic construct
GSSGGGEAAAK

SEQ ID NO: 15325 - protein, 6 aa, synthetic construct
GSSGGS

SEQ ID NO: 15326 - protein, 11 aa, synthetic construct
GGSEAAAKPAP

SEQ ID NO: 15327 - protein, 11 aa, synthetic construct
GSSGGSEAAAK

SEQ ID NO: 15328 - protein, 11 aa, synthetic construct
GSSPAPEAAAK

SEQ ID NO: 15329 - protein, 18 aa, synthetic construct
GGSGGSGGSGGSGGSGGS

SEQ ID NO: 15330 - protein, 15 aa, synthetic construct
GSSGSSGSSGSSGSS

SEQ ID NO: 15331 - protein, 11 aa, synthetic construct
EAAAKGGGGSS

SEQ ID NO: 15332 - protein, 11 aa, synthetic construct
GGGEAAAKGSS

SEQ ID NO: 15333-15400 - skipped (68 entries)

SEQ ID NO: 15401 - protein, 46 aa, synthetic construct; identical to SEQ ID NO: 5217

SEQ ID NO: 15402 - protein, 46 aa, synthetic construct; identical to SEQ ID NO: 5217

SEQ ID NO: 15403 - protein, 46 aa, synthetic construct; identical to SEQ ID NO: 5217

SEQ ID NO: 15404 - protein, 46 aa, synthetic construct; identical to SEQ ID NO: 5217

SEQ ID NO: 15405 - protein, 20 aa, synthetic construct
GGGGSGGGGSGGGGSGGGGS

SEQ ID NO: 15406 - protein, 30 aa, synthetic construct; identical to SEQ ID NO: 5112

SEQ ID NO: 15407 - protein, 30 aa, synthetic construct; identical to SEQ ID NO: 5112

SEQ ID NO: 15408 - protein, 18 aa, synthetic construct
GSSGSSGSSGSSGSSGSS

SEQ ID NO: 15409 - protein, 20 aa, synthetic construct
EAAAKEAAAKEAAAKEAAAK

SEQ ID NO: 15410 - protein, 30 aa, synthetic construct; identical to SEQ ID NO: 5130

SEQ ID NO: 15411 - protein, 11 aa, synthetic construct
PAPAPAPAPAP

SEQ ID NO: 15412 - protein, 13 aa, synthetic construct
PAPAPAPAPAPAP

SEQ ID NO: 15413 - protein, 13 aa, synthetic construct
PAPAPAPAPAPAP

SEQ ID NO: 15414 - protein, 13 aa, synthetic construct
PAPAPAPAPAPAP

SEQ ID NO: 15415 - protein, 13 aa, synthetic construct
PAPAPAPAPAPAP

SEQ ID NO: 15416 - protein, 13 aa, synthetic construct
PAPAPAPAPAPAP

SEQ ID NO: 15417 - protein, 8 aa, synthetic construct
EAAAKGGG

SEQ ID NO: 15418 - protein, 8 aa, synthetic construct
EAAAKGGG

SEQ ID NO: 15419 - protein, 6 aa, synthetic construct
PAPGGG

SEQ ID NO: 15420 - protein, 9 aa, synthetic construct
GGGGSSGGS

SEQ ID NO: 15421 - protein, 11 aa, synthetic construct
GGGGGSEAAAK

SEQ ID NO: 15422 - protein, 11 aa, synthetic construct
GGGEAAAKGGS

SEQ ID NO: 15423 - protein, 11 aa, synthetic construct
GGGEAAAKGGS

SEQ ID NO: 15424 - protein, 11 aa, synthetic construct
GGGEAAAKGGS

SEQ ID NO: 15425 - protein, 9 aa, synthetic construct
GGSGGGPAP

SEQ ID NO: 15426 - protein, 9 aa, synthetic construct
PAPGGSGGG

SEQ ID NO: 15427 - protein, 9 aa, synthetic construct
PAPGGSGGG

SEQ ID NO: 15428 - protein, 11 aa, synthetic construct
GGSEAAAKPAP

SEQ ID NO: 15429 - protein, 11 aa, synthetic construct
GGSPAPEAAAK

SEQ ID NO: 15430 - protein, 11 aa, synthetic construct
GGSPAPEAAAK

SEQ ID NO: 15431 - protein, 11 aa, synthetic construct
EAAAKGGSPAP

SEQ ID NO: 15432 - protein, 11 aa, synthetic construct
EAAAKGGSPAP

SEQ ID NO: 15433 - protein, 11 aa, synthetic construct
EAAAKPAPGGS

SEQ ID NO: 15434 - protein, 11 aa, synthetic construct
EAAAKPAPGGS

SEQ ID NO: 15435 - protein, 11 aa, synthetic construct
GGGGSSEAAAK

SEQ ID NO: 15436 - protein, 11 aa, synthetic construct
GGGGSSEAAAK

SEQ ID NO: 15437 - protein, 11 aa, synthetic construct
GSSGGGEAAAK

SEQ ID NO: 15438 - protein, 11 aa, synthetic construct
GSSGGGEAAAK

SEQ ID NO: 15439 - protein, 11 aa, synthetic construct
GSSEAAAKGGG

SEQ ID NO: 15440 - protein, 9 aa, synthetic construct
GSSGGGPAP

SEQ ID NO: 15441 - protein, 9 aa, synthetic construct
GSSPAPGGG

SEQ ID NO: 15442 - protein, 9 aa, synthetic construct
PAPGGGGSS

SEQ ID NO: 15443 - protein, 11 aa, synthetic construct
GGGEAAAKPAP

SEQ ID NO: 15444 - protein, 11 aa, synthetic construct
GGGEAAAKPAP

SEQ ID NO: 15445 - protein, 11 aa, synthetic construct
GGGPAPEAAAK

SEQ ID NO: 15446 - protein, 11 aa, synthetic construct
GSSEAAAKPAP

SEQ ID NO: 15447 - protein, 11 aa, synthetic construct
GSSEAAAKPAP

SEQ ID NO: 15448 - protein, 11 aa, synthetic construct
GSSPAPEAAAK

SEQ ID NO: 15449 - protein, 11 aa, synthetic construct
GSSPAPEAAAK

SEQ ID NO: 15450 - protein, 11 aa, synthetic construct
GSSPAPEAAAK

SEQ ID NO: 15451 - protein, 11 aa, synthetic construct
PAPGSSEAAAK

SEQ ID NO: 15452 - protein, 11 aa, synthetic construct
PAPGSSEAAAK

SEQ ID NO: 15453 - protein, 46 aa, synthetic construct; identical to SEQ ID NO: 5217

SEQ ID NO: 15454 - protein, 46 aa, synthetic construct; identical to SEQ ID NO: 5217

SEQ ID NO: 15455 - protein, 46 aa, synthetic construct; identical to SEQ ID NO: 5217

SEQ ID NO: 15456 - protein, 46 aa, synthetic construct; identical to SEQ ID NO: 5217

SEQ ID NO: 15457 - protein, 46 aa, synthetic construct; identical to SEQ ID NO: 5217

SEQ ID NO: 15458 - protein, 46 aa, synthetic construct; identical to SEQ ID NO: 5217

SEQ ID NO: 15459 - protein, 46 aa, synthetic construct; identical to SEQ ID NO: 5217

SEQ ID NO: 15460 - protein, 16 aa, synthetic construct
SGSETPGTSESATPES

SEQ ID NO: 15461-16000 - skipped (540 entries)

SEQ ID NO: 16001 - RNA, 119 nt, synthetic construct
  source 1..119: mol_type = other RNA
  modified_base 1: mod_base = OTHER; note = 2'-O-methyl modified nucleotide with phosphorothioate linkage
  modified_base 2: mod_base = OTHER; note = 2'-O-methyl modified nucleotide with phosphorothioate linkage
  modified_base 3: mod_base = OTHER; note = 2'-O-methyl modified nucleotide with phosphorothioate linkage
  modified_base 29: mod_base = OTHER; note = 2'-O-methyl modified nucleotide
  modified_base 30: mod_base = OTHER; note = 2'-O-methyl modified nucleotide
  modified_base 31: mod_base = OTHER; note = 2'-O-methyl modified nucleotide
  modified_base 32: mod_base = OTHER; note = 2'-O-methyl modified nucleotide
  modified_base 33: mod_base = OTHER; note = 2'-O-methyl modified nucleotide
  modified_base 34: mod_base = OTHER; note = 2'-O-methyl modified nucleotide
  modified_base 35: mod_base = OTHER; note = 2'-O-methyl modified nucleotide
  modified_base 36: mod_base = OTHER; note = 2'-O-methyl modified nucleotide
  modified_base 37: mod_base = OTHER; note = 2'-O-methyl modified nucleotide
  modified_base 38: mod_base = OTHER; note = 2'-O-methyl modified nucleotide
  modified_base 39: mod_base = OTHER; note = 2'-O-methyl modified nucleotide
  modified_base 40: mod_base = OTHER; note = 2'-O-methyl modified nucleotide
  modified_base 69: mod_base = OTHER; note = 2'-O-methyl modified nucleotide
  modified_base 70: mod_base = OTHER; note = 2'-O-methyl modified nucleotide
  modified_base 71: mod_base = OTHER; note = 2'-O-methyl modified nucleotide
  modified_base 72: mod_base = OTHER; note = 2'-O-methyl modified nucleotide
  modified_base 73: mod_base = OTHER; note = 2'-O-methyl modified nucleotide
  modified_base 74: mod_base = OTHER; note = 2'-O-methyl modified nucleotide
  modified_base 75: mod_base = OTHER; note = 2'-O-methyl modified nucleotide
  modified_base 76: mod_base = OTHER; note = 2'-O-methyl modified nucleotide
  modified_base 77: mod_base = OTHER; note = 2'-O-methyl modified nucleotide
  modified_base 78: mod_base = OTHER; note = 2'-O-methyl modified nucleotide
  modified_base 79: mod_base = OTHER; note = 2'-O-methyl modified nucleotide
  modified_base 80: mod_base = OTHER; note = 2'-O-methyl modified nucleotide
  modified_base 81: mod_base = OTHER; note = 2'-O-methyl modified nucleotide
  modified_base 82: mod_base = OTHER; note = 2'-O-methyl modified nucleotide
  modified_base 83: mod_base = OTHER; note = 2'-O-methyl modified nucleotide
  modified_base 84: mod_base = OTHER; note = 2'-O-methyl modified nucleotide
  modified_base 85: mod_base = OTHER; note = 2'-O-methyl modified nucleotide
  modified_base 86: mod_base = OTHER; note = 2'-O-methyl modified nucleotide
  modified_base 87: mod_base = OTHER; note = 2'-O-methyl modified nucleotide
  modified_base 88: mod_base = OTHER; note = 2'-O-methyl modified nucleotide
  modified_base 89: mod_base = OTHER; note = 2'-O-methyl modified nucleotide
  modified_base 90: mod_base = OTHER; note = 2'-O-methyl modified nucleotide
  modified_base 91: mod_base = OTHER; note = 2'-O-methyl modified nucleotide
  modified_base 92: mod_base = OTHER; note = 2'-O-methyl modified nucleotide
  modified_base 93: mod_base = OTHER; note = 2'-O-methyl modified nucleotide
  modified_base 94: mod_base = OTHER; note = 2'-O-methyl modified nucleotide
  modified_base 95: mod_base = OTHER; note = 2'-O-methyl modified nucleotide
  modified_base 96: mod_base = OTHER; note = 2'-O-methyl modified nucleotide
  modified_base 116: mod_base = OTHER; note = Nucleotide with phosphorothioate linkage
  modified_base 117: mod_base = OTHER; note = 2'-O-methyl modified nucleotide with phosphorothioate linkage
  modified_base 118: mod_base = OTHER; note = 2'-O-methyl modified nucleotide with phosphorothioate linkage
  modified_base 119: mod_base = OTHER; note = 2'-O-methyl modified nucleotide
gagaatcaaaatcggtgaatgttttagagctagaaatagcaagttaaaataaggctagtccgttatcaacttgaaaaagtggcaccgagtcggtgcctatttagtgcaccgattttgat

SEQ ID NO: 16002 - RNA, 118 nt, synthetic construct
  source 1..118: mol_type = other RNA
  modified_base 1: mod_base = OTHER; note = 2'-O-methyl modified nucleotide with phosphorothioate linkage
  modified_base 2: mod_base = OTHER; note = 2'-O-methyl modified nucleotide with phosphorothioate linkage
  modified_base 3: mod_base = OTHER; note = 2'-O-methyl modified nucleotide with phosphorothioate linkage
  modified_base 29: mod_base = OTHER; note = 2'-O-methyl modified nucleotide
  modified_base 30: mod_base = OTHER; note = 2'-O-methyl modified nucleotide
  modified_base 31: mod_base = OTHER; note = 2'-O-methyl modified nucleotide
  modified_base 32: mod_base = OTHER; note = 2'-O-methyl modified nucleotide
  modified_base 33: mod_base = OTHER; note = 2'-O-methyl modified nucleotide
  modified_base 34: mod_base = OTHER; note = 2'-O-methyl modified nucleotide
  modified_base 35: mod_base = OTHER; note = 2'-O-methyl modified nucleotide
  modified_base 36: mod_base = OTHER; note = 2'-O-methyl modified nucleotide
  modified_base 37: mod_base = OTHER; note = 2'-O-methyl modified nucleotide
  modified_base 38: mod_base = OTHER; note = 2'-O-methyl modified nucleotide
  modified_base 39: mod_base = OTHER; note = 2'-O-methyl modified nucleotide
  modified_base 40: mod_base = OTHER; note = 2'-O-methyl modified nucleotide
  modified_base 69: mod_base = OTHER; note = 2'-O-methyl modified nucleotide
  modified_base 70: mod_base = OTHER; note = 2'-O-methyl modified nucleotide
  modified_base 71: mod_base = OTHER; note = 2'-O-methyl modified nucleotide
  modified_base 72: mod_base = OTHER; note = 2'-O-methyl modified nucleotide
  modified_base 73: mod_base = OTHER; note = 2'-O-methyl modified nucleotide
  modified_base 74: mod_base = OTHER; note = 2'-O-methyl modified nucleotide
  modified_base 75: mod_base = OTHER; note = 2'-O-methyl modified nucleotide
  modified_base 76: mod_base = OTHER; note = 2'-O-methyl modified nucleotide
  modified_base 77: mod_base = OTHER; note = 2'-O-methyl modified nucleotide
  modified_base 78: mod_base = OTHER; note = 2'-O-methyl modified nucleotide
  modified_base 79: mod_base = OTHER; note = 2'-O-methyl modified nucleotide
  modified_base 80: mod_base = OTHER; note = 2'-O-methyl modified nucleotide
  modified_base 81: mod_base = OTHER; note = 2'-O-methyl modified nucleotide
  modified_base 82: mod_base = OTHER; note = 2'-O-methyl modified nucleotide
  modified_base 83: mod_base = OTHER; note = 2'-O-methyl modified nucleotide
  modified_base 84: mod_base = OTHER; note = 2'-O-methyl modified nucleotide
  modified_base 85: mod_base = OTHER; note = 2'-O-methyl modified nucleotide
  modified_base 86: mod_base = OTHER; note = 2'-O-methyl modified nucleotide
  modified_base 87: mod_base = OTHER; note = 2'-O-methyl modified nucleotide
  modified_base 88: mod_base = OTHER; note = 2'-O-methyl modified nucleotide
  modified_base 89: mod_base = OTHER; note = 2'-O-methyl modified nucleotide
  modified_base 90: mod_base = OTHER; note = 2'-O-methyl modified nucleotide
  modified_base 91: mod_base = OTHER; note = 2'-O-methyl modified nucleotide
  modified_base 92: mod_base = OTHER; note = 2'-O-methyl modified nucleotide
  modified_base 93: mod_base = OTHER; note = 2'-O-methyl modified nucleotide
  modified_base 94: mod_base = OTHER; note = 2'-O-methyl modified nucleotide
  modified_base 95: mod_base = OTHER; note = 2'-O-methyl modified nucleotide
  modified_base 96: mod_base = OTHER; note = 2'-O-methyl modified nucleotide
  modified_base 115: mod_base = OTHER; note = Nucleotide with phosphorothioate linkage
  modified_base 116: mod_base = OTHER; note = 2'-O-methyl modified nucleotide with phosphorothioate linkage
  modified_base 117: mod_base = OTHER; note = 2'-O-methyl modified nucleotide with phosphorothioate linkage
  modified_base 118: mod_base = OTHER; note = 2'-O-methyl modified nucleotide
gagaatcaaaatcggtgaatgttttagagctagaaatagcaagttaaaataaggctagtccgttatcaacttgaaaaagtggcaccgagtcggtgcctatttagtgcaccgattttga

SEQ ID NO: 16003 - RNA, 117 nt, synthetic construct
  source 1..117: mol_type = other RNA
  modified_base 1: mod_base = OTHER; note = 2'-O-methyl modified nucleotide with phosphorothioate linkage
  modified_base 2: mod_base = OTHER; note = 2'-O-methyl modified nucleotide with phosphorothioate linkage
  modified_base 3: mod_base = OTHER; note = 2'-O-methyl modified nucleotide with phosphorothioate linkage
  modified_base 29: mod_base = OTHER; note = 2'-O-methyl modified nucleotide
  modified_base 30: mod_base = OTHER; note = 2'-O-methyl modified nucleotide
  modified_base 31: mod_base = OTHER; note = 2'-O-methyl modified nucleotide
  modified_base 32: mod_base = OTHER; note = 2'-O-methyl modified nucleotide
  modified_base 33: mod_base = OTHER; note = 2'-O-methyl modified nucleotide
  modified_base 34: mod_base = OTHER; note = 2'-O-methyl modified nucleotide
  modified_base 35: mod_base = OTHER; note = 2'-O-methyl modified nucleotide
  modified_base 36: mod_base = OTHER; note = 2'-O-methyl modified nucleotide
  modified_base 37: mod_base = OTHER; note = 2'-O-methyl modified nucleotide
  modified_base 38: mod_base = OTHER; note = 2'-O-methyl modified nucleotide
  modified_base 39: mod_base = OTHER; note = 2'-O-methyl modified nucleotide
  modified_base 40: mod_base = OTHER; note = 2'-O-methyl modified nucleotide
  modified_base 69: mod_base = OTHER; note = 2'-O-methyl modified nucleotide
  modified_base 70: mod_base = OTHER; note = 2'-O-methyl modified nucleotide
  modified_base 71: mod_base = OTHER; note = 2'-O-methyl modified nucleotide
  modified_base 72: mod_base = OTHER; note = 2'-O-methyl modified nucleotide
  modified_base 73: mod_base = OTHER; note = 2'-O-methyl modified nucleotide
  modified_base 74: mod_base = OTHER; note = 2'-O-methyl modified nucleotide
  modified_base 75: mod_base = OTHER; note = 2'-O-methyl modified nucleotide
  modified_base 76: mod_base = OTHER; note = 2'-O-methyl modified nucleotide
  modified_base 77: mod_base = OTHER; note = 2'-O-methyl modified nucleotide
  modified_base 78: mod_base = OTHER; note = 2'-O-methyl modified nucleotide
  modified_base 79: mod_base = OTHER; note = 2'-O-methyl modified nucleotide
  modified_base 80: mod_base = OTHER; note = 2'-O-methyl modified nucleotide
  modified_base 81: mod_base = OTHER; note = 2'-O-methyl modified nucleotide
  modified_base 82: mod_base = OTHER; note = 2'-O-methyl modified nucleotide
  modified_base 83: mod_base = OTHER; note = 2'-O-methyl modified nucleotide
  modified_base 84: mod_base = OTHER; note = 2'-O-methyl modified nucleotide
  modified_base 85: mod_base = OTHER; note = 2'-O-methyl modified nucleotide
  modified_base 86: mod_base = OTHER; note = 2'-O-methyl modified nucleotide
  modified_base 87: mod_base = OTHER; note = 2'-O-methyl modified nucleotide
  modified_base 88: mod_base = OTHER; note = 2'-O-methyl modified nucleotide
  modified_base 89: mod_base = OTHER; note = 2'-O-methyl modified nucleotide
  modified_base 90: mod_base = OTHER; note = 2'-O-methyl modified nucleotide
  modified_base 91: mod_base = OTHER; note = 2'-O-methyl modified nucleotide
  modified_base 92: mod_base = OTHER; note = 2'-O-methyl modified nucleotide
  modified_base 93: mod_base = OTHER; note = 2'-O-methyl modified nucleotide
  modified_base 94: mod_base = OTHER; note = 2'-O-methyl modified nucleotide
  modified_base 95: mod_base = OTHER; note = 2'-O-methyl modified nucleotide
  modified_base 96: mod_base = OTHER; note = 2'-O-methyl modified nucleotide
  modified_base 114: mod_base = OTHER; note = Nucleotide with phosphorothioate linkage
  modified_base 115: mod_base = OTHER; note = 2'-O-methyl modified nucleotide with phosphorothioate linkage
  modified_base 116: mod_base = OTHER; note = 2'-O-methyl modified nucleotide with phosphorothioate linkage
  modified_base 117: mod_base = OTHER; note = 2'-O-methyl modified nucleotide
gagaatcaaaatcggtgaatgttttagagctagaaatagcaagttaaaataaggctagtccgttatcaacttgaaaaagtggcaccgagtcggtgcctatttagtgcaccgattttg

SEQ ID NO: 16004 - RNA, 116 nt, synthetic construct
  source 1..116: mol_type = other RNA
  modified_base 1: mod_base = OTHER; note = 2'-O-methyl modified nucleotide with phosphorothioate linkage
  modified_base 2: mod_base = OTHER; note = 2'-O-methyl modified nucleotide with phosphorothioate linkage
  modified_base 3: mod_base = OTHER; note = 2'-O-methyl modified nucleotide with phosphorothioate linkage
  modified_base 29: mod_base = OTHER; note = 2'-O-methyl modified nucleotide
  modified_base 30: mod_base = OTHER; note = 2'-O-methyl modified nucleotide
  modified_base 31: mod_base = OTHER; note = 2'-O-methyl modified nucleotide
  modified_base 32: mod_base = OTHER; note = 2'-O-methyl modified nucleotide
  modified_base 33: mod_base = OTHER; note = 2'-O-methyl modified nucleotide
  modified_base 34: mod_base = OTHER; note = 2'-O-methyl modified nucleotide
  modified_base 35: mod_base = OTHER; note = 2'-O-methyl modified nucleotide
  modified_base 36: mod_base = OTHER; note = 2'-O-methyl modified nucleotide
  modified_base 37: mod_base = OTHER; note = 2'-O-methyl modified nucleotide
  modified_base 38: mod_base = OTHER; note = 2'-O-methyl modified nucleotide
  modified_base 39: mod_base = OTHER; note = 2'-O-methyl modified nucleotide
  modified_base 40: mod_base = OTHER; note = 2'-O-methyl modified nucleotide
  modified_base 69: mod_base = OTHER; note = 2'-O-methyl modified nucleotide
  modified_base 70: mod_base = OTHER; note = 2'-O-methyl modified nucleotide
  modified_base 71: mod_base = OTHER; note = 2'-O-methyl modified nucleotide
  modified_base 72: mod_base = OTHER; note = 2'-O-methyl modified nucleotide
  modified_base 73: mod_base = OTHER; note = 2'-O-methyl modified nucleotide
  modified_base 74: mod_base = OTHER; note = 2'-O-methyl modified nucleotide
  modified_base 75: mod_base = OTHER; note = 2'-O-methyl modified nucleotide
  modified_base 76: mod_base = OTHER; note = 2'-O-methyl modified nucleotide
  modified_base 77: mod_base = OTHER; note = 2'-O-methyl modified nucleotide
  modified_base 78: mod_base = OTHER; note = 2'-O-methyl modified nucleotide
  modified_base 79: mod_base = OTHER; note = 2'-O-methyl modified nucleotide
  modified_base 80: mod_base = OTHER; note = 2'-O-methyl modified nucleotide
  modified_base 81: mod_base = OTHER; note = 2'-O-methyl modified nucleotide
  modified_base 82: mod_base = OTHER; note = 2'-O-methyl modified nucleotide
  modified_base 83: mod_base = OTHER; note = 2'-O-methyl modified nucleotide
  modified_base 84: mod_base = OTHER; note = 2'-O-methyl modified nucleotide
  modified_base 85: mod_base = OTHER; note = 2'-O-methyl modified nucleotide
  modified_base 86: mod_base = OTHER; note = 2'-O-methyl modified nucleotide
  modified_base 87: mod_base = OTHER; note = 2'-O-methyl modified nucleotide
  modified_base 88: mod_base = OTHER; note = 2'-O-methyl modified nucleotide
  modified_base 89: mod_base = OTHER; note = 2'-O-methyl modified nucleotide
  modified_base 90: mod_base = OTHER; note = 2'-O-methyl modified nucleotide
  modified_base 91: mod_base = OTHER; note = 2'-O-methyl modified nucleotide
  modified_base 92: mod_base = OTHER; note = 2'-O-methyl modified nucleotide
  modified_base 93: mod_base = OTHER; note = 2'-O-methyl modified nucleotide
  modified_base 94: mod_base = OTHER; note = 2'-O-methyl modified nucleotide
  modified_base 95: mod_base = OTHER; note = 2'-O-methyl modified nucleotide
  modified_base 96: mod_base = OTHER; note = 2'-O-methyl modified nucleotide
  modified_base 113: mod_base = OTHER; note = Nucleotide with phosphorothioate linkage
  modified_base 114: mod_base = OTHER; note = 2'-O-methyl modified nucleotide with phosphorothioate linkage
  modified_base 115: mod_base = OTHER; note = 2'-O-methyl modified nucleotide with phosphorothioate linkage
  modified_base 116: mod_base = OTHER; note = 2'-O-methyl modified nucleotide
gagaatcaaaatcggtgaatgttttagagctagaaatagcaagttaaaataaggctagtccgttatcaacttgaaaaagtggcaccgagtcggtgcctatttagtgcaccgatttt

SEQ ID NO: 16005 - RNA, 115 nt, synthetic construct
  source 1..115: mol_type = other RNA
  modified_base 1: mod_base = OTHER; note = 2'-O-methyl modified nucleotide with phosphorothioate linkage
  modified_base 2: mod_base = OTHER; note = 2'-O-methyl modified nucleotide with phosphorothioate linkage
  modified_base 3: mod_base = OTHER; note = 2'-O-methyl modified nucleotide with phosphorothioate linkage
  modified_base 29: mod_base = OTHER; note = 2'-O-methyl modified nucleotide
  modified_base 30: mod_base = OTHER; note = 2'-O-methyl modified nucleotide
  modified_base 31: mod_base = OTHER; note = 2'-O-methyl modified nucleotide
  modified_base 32: mod_base = OTHER; note = 2'-O-methyl modified nucleotide
  modified_base 33: mod_base = OTHER; note = 2'-O-methyl modified nucleotide
  modified_base 34: mod_base = OTHER; note = 2'-O-methyl modified nucleotide
  modified_base 35: mod_base = OTHER; note = 2'-O-methyl modified nucleotide
  modified_base 36: mod_base = OTHER; note = 2'-O-methyl modified nucleotide
  modified_base 37: mod_base = OTHER; note = 2'-O-methyl modified nucleotide
  modified_base 38: mod_base = OTHER; note = 2'-O-methyl modified nucleotide
  modified_base 39: mod_base = OTHER; note = 2'-O-methyl modified nucleotide
  modified_base 40: mod_base = OTHER; note = 2'-O-methyl modified nucleotide
  modified_base 69: mod_base = OTHER; note = 2'-O-methyl modified nucleotide
  modified_base 70: mod_base = OTHER; note = 2'-O-methyl modified nucleotide
  modified_base 71: mod_base = OTHER; note = 2'-O-methyl modified nucleotide
  modified_base 72: mod_base = OTHER; note = 2'-O-methyl modified nucleotide
  modified_base 73: mod_base = OTHER; note = 2'-O-methyl modified nucleotide
  modified_base 74: mod_base = OTHER; note = 2'-O-methyl modified nucleotide
  modified_base 75: mod_base = OTHER; note = 2'-O-methyl modified nucleotide
  modified_base 76: mod_base = OTHER; note = 2'-O-methyl modified nucleotide
  modified_base 77: mod_base = OTHER; note = 2'-O-methyl modified nucleotide
  modified_base 78: mod_base = OTHER; note = 2'-O-methyl modified nucleotide
  modified_base 79: mod_base = OTHER; note = 2'-O-methyl modified nucleotide
  modified_base 80: mod_base = OTHER; note = 2'-O-methyl modified nucleotide
  modified_base 81: mod_base = OTHER; note = 2'-O-methyl modified nucleotide
  modified_base 82: mod_base = OTHER; note = 2'-O-methyl modified nucleotide
  modified_base 83: mod_base = OTHER; note = 2'-O-methyl modified nucleotide
  modified_base 84: mod_base = OTHER; note = 2'-O-methyl modified nucleotide
  modified_base 85: mod_base = OTHER; note = 2'-O-methyl modified nucleotide
  modified_base 86: mod_base = OTHER; note = 2'-O-methyl modified nucleotide
  modified_base 87: mod_base = OTHER; note = 2'-O-methyl modified nucleotide
  modified_base 88: mod_base = OTHER; note = 2'-O-methyl modified nucleotide
  modified_base 89: mod_base = OTHER; note = 2'-O-methyl modified nucleotide
  modified_base 90: mod_base = OTHER; note = 2'-O-methyl modified nucleotide
  modified_base 91: mod_base = OTHER; note = 2'-O-methyl modified nucleotide
  modified_base 92: mod_base = OTHER; note = 2'-O-methyl modified nucleotide
  modified_base 93: mod_base = OTHER; note = 2'-O-methyl modified nucleotide
  modified_base 94: mod_base = OTHER; note = 2'-O-methyl modified nucleotide
  modified_base 95: mod_base = OTHER; note = 2'-O-methyl modified nucleotide
  modified_base 96: mod_base = OTHER; note = 2'-O-methyl modified nucleotide
  modified_base 112: mod_base = OTHER; note = Nucleotide with phosphorothioate linkage
  modified_base 113: mod_base = OTHER; note = 2'-O-methyl modified nucleotide with phosphorothioate linkage
  modified_base 114: mod_base = OTHER; note = 2'-O-methyl modified nucleotide with phosphorothioate linkage
  modified_base 115: mod_base = OTHER; note = 2'-O-methyl modified nucleotide
gagaatcaaaatcggtgaatgttttagagctagaaatagcaagttaaaataaggctagtccgttatcaacttgaaaaagtggcaccgagtcggtgcctatttagtgcaccgattt

SEQ ID NO: 16006 - RNA, 114 nt, synthetic construct
  source 1..114: mol_type = other RNA
  modified_base 1: mod_base = OTHER; note = 2'-O-methyl modified nucleotide with phosphorothioate linkage
  modified_base 2: mod_base = OTHER; note = 2'-O-methyl modified nucleotide with phosphorothioate linkage
  modified_base 3: mod_base = OTHER; note = 2'-O-methyl modified nucleotide with phosphorothioate linkage
  modified_base 29: mod_base = OTHER; note = 2'-O-methyl modified nucleotide
  modified_base 30: mod_base = OTHER; note = 2'-O-methyl modified nucleotide
  modified_base 31: mod_base = OTHER; note = 2'-O-methyl modified nucleotide
  modified_base 32: mod_base = OTHER; note = 2'-O-methyl modified nucleotide
  modified_base 33: mod_base = OTHER; note = 2'-O-methyl modified nucleotide
  modified_base 34: mod_base = OTHER; note = 2'-O-methyl modified nucleotide
  modified_base 35: mod_base = OTHER; note = 2'-O-methyl modified nucleotide
  modified_base 36: mod_base = OTHER; note = 2'-O-methyl modified nucleotide
  modified_base 37: mod_base = OTHER; note = 2'-O-methyl modified nucleotide
  modified_base 38: mod_base = OTHER; note = 2'-O-methyl modified nucleotide
  modified_base 39: mod_base = OTHER; note = 2'-O-methyl modified nucleotide
  modified_base 40: mod_base = OTHER; note = 2'-O-methyl modified nucleotide
  modified_base 69: mod_base = OTHER; note = 2'-O-methyl modified nucleotide
  modified_base 70: mod_base = OTHER; note = 2'-O-methyl modified nucleotide
  modified_base 71: mod_base = OTHER; note = 2'-O-methyl modified nucleotide
  modified_base 72: mod_base = OTHER; note = 2'-O-methyl modified nucleotide
  modified_base 73: mod_base = OTHER; note = 2'-O-methyl modified nucleotide
  modified_base 74: mod_base = OTHER; note = 2'-O-methyl modified nucleotide
  modified_base 75: mod_base = OTHER; note = 2'-O-methyl modified nucleotide
  modified_base 76: mod_base = OTHER; note = 2'-O-methyl modified nucleotide
  modified_base 77: mod_base = OTHER; note = 2'-O-methyl modified nucleotide
  modified_base 78: mod_base = OTHER; note = 2'-O-methyl modified nucleotide
  modified_base 79: mod_base = OTHER; note = 2'-O-methyl modified nucleotide
  modified_base 80: mod_base = OTHER; note = 2'-O-methyl modified nucleotide
  modified_base 81: mod_base = OTHER; note = 2'-O-methyl modified nucleotide
  modified_base 82: mod_base = OTHER; note = 2'-O-methyl modified nucleotide
  modified_base 83: mod_base = OTHER; note = 2'-O-methyl modified nucleotide
  modified_base 84: mod_base = OTHER; note = 2'-O-methyl modified nucleotide
  modified_base 85: mod_base = OTHER; note = 2'-O-methyl modified nucleotide
  modified_base 86: mod_base = OTHER; note = 2'-O-methyl modified nucleotide
  modified_base 87: mod_base = OTHER; note = 2'-O-methyl modified nucleotide
  modified_base 88: mod_base = OTHER; note = 2'-O-methyl modified nucleotide
  modified_base 89: mod_base = OTHER; note = 2'-O-methyl modified nucleotide
  modified_base 90: mod_base = OTHER; note = 2'-O-methyl modified nucleotide
  modified_base 91: mod_base = OTHER; note = 2'-O-methyl modified nucleotide
  modified_base 92: mod_base = OTHER; note = 2'-O-methyl modified nucleotide
  modified_base 93: mod_base = OTHER; note = 2'-O-methyl modified nucleotide
  modified_base 94: mod_base = OTHER; note = 2'-O-methyl modified nucleotide
  modified_base 95: mod_base = OTHER; note = 2'-O-methyl modified nucleotide
  modified_base 96: mod_base = OTHER; note = 2'-O-methyl modified nucleotide
  modified_base 111: mod_base = OTHER; note = Nucleotide with phosphorothioate linkage
  modified_base 112: mod_base = OTHER; note = 2'-O-methyl modified nucleotide with phosphorothioate linkage
  modified_base 113: mod_base = OTHER; note = 2'-O-methyl modified nucleotide with phosphorothioate linkage
  modified_base 114: mod_base = OTHER; note = 2'-O-methyl modified nucleotide
gagaatcaaaatcggtgaatgttttagagctagaaatagcaagttaaaataaggctagtccgttatcaacttgaaaaagtggcaccgagtcggtgcctatttagtgcaccgatt

SEQ ID NO: 16007 - RNA, 121 nt, synthetic construct
  source 1..121: mol_type = other RNA
  modified_base 1: mod_base = OTHER; note = 2'-O-methyl modified nucleotide with phosphorothioate linkage
  modified_base 2: mod_base = OTHER; note = 2'-O-methyl modified nucleotide with phosphorothioate linkage
  modified_base 3: mod_base = OTHER; note = 2'-O-methyl modified nucleotide with phosphorothioate linkage
  modified_base 29: mod_base = OTHER; note = 2'-O-methyl modified nucleotide
  modified_base 30: mod_base = OTHER; note = 2'-O-methyl modified nucleotide
  modified_base 31: mod_base = OTHER; note = 2'-O-methyl modified nucleotide
  modified_base 32: mod_base = OTHER; note = 2'-O-methyl modified nucleotide
  modified_base 33: mod_base = OTHER; note = 2'-O-methyl modified nucleotide
  modified_base 34: mod_base = OTHER; note = 2'-O-methyl modified nucleotide
  modified_base 35: mod_base = OTHER; note = 2'-O-methyl modified nucleotide
  modified_base 36: mod_base = OTHER; note = 2'-O-methyl modified nucleotide
  modified_base 37: mod_base = OTHER; note = 2'-O-methyl modified nucleotide
  modified_base 38: mod_base = OTHER; note = 2'-O-methyl modified nucleotide
  modified_base 39: mod_base = OTHER; note = 2'-O-methyl modified nucleotide
  modified_base 40: mod_base = OTHER; note = 2'-O-methyl modified nucleotide
  modified_base 69: mod_base = OTHER; note = 2'-O-methyl modified nucleotide
  modified_base 70: mod_base = OTHER; note = 2'-O-methyl modified nucleotide
  modified_base 71: mod_base = OTHER; note = 2'-O-methyl modified nucleotide
  modified_base 72: mod_base = OTHER; note = 2'-O-methyl modified nucleotide
  modified_base 73: mod_base = OTHER; note = 2'-O-methyl modified nucleotide
  modified_base 74: mod_base = OTHER; note = 2'-O-methyl modified nucleotide
  modified_base 75: mod_base = OTHER; note = 2'-O-methyl modified nucleotide
  modified_base 76: mod_base = OTHER; note = 2'-O-methyl modified nucleotide
  modified_base 77: mod_base = OTHER; note = 2'-O-methyl modified nucleotide
  modified_base 78: mod_base = OTHER; note = 2'-O-methyl modified nucleotide
  modified_base 79: mod_base = OTHER; note = 2'-O-methyl modified nucleotide
  modified_base 80: mod_base = OTHER; note = 2'-O-methyl modified nucleotide
  modified_base 81: mod_base = OTHER; note = 2'-O-methyl modified nucleotide
  modified_base 82: mod_base = OTHER; note = 2'-O-methyl modified nucleotide
  modified_base 83: mod_base = OTHER; note = 2'-O-methyl modified nucleotide
  modified_base 84: mod_base = OTHER; note = 2'-O-methyl modified nucleotide
  modified_base 85: mod_base = OTHER; note = 2'-O-methyl modified nucleotide
  modified_base 86: mod_base = OTHER; note = 2'-O-methyl modified nucleotide
  modified_base 87: mod_base = OTHER; note = 2'-O-methyl modified nucleotide
  modified_base 88: mod_base = OTHER; note = 2'-O-methyl modified nucleotide
  modified_base 89: mod_base = OTHER; note = 2'-O-methyl modified nucleotide
  modified_base 90: mod_base = OTHER; note = 2'-O-methyl modified nucleotide
  modified_base 91: mod_base = OTHER; note = 2'-O-methyl modified nucleotide
  modified_base 92: mod_base = OTHER; note = 2'-O-methyl modified nucleotide
  modified_base 93: mod_base = OTHER; note = 2'-O-methyl modified nucleotide
  modified_base 94: mod_base = OTHER; note = 2'-O-methyl modified nucleotide
  modified_base 95: mod_base = OTHER; note = 2'-O-methyl modified nucleotide
  modified_base 96: mod_base = OTHER; note = 2'-O-methyl modified nucleotide
  modified_base 118: mod_base = OTHER; note = Nucleotide with phosphorothioate linkage
  modified_base 119: mod_base = OTHER; note = 2'-O-methyl modified nucleotide with phosphorothioate linkage
  modified_base 120: mod_base = OTHER; note = 2'-O-methyl modified nucleotide with phosphorothioate linkage
  modified_base 121: mod_base = OTHER; note = 2'-O-methyl modified nucleotide
gagaatcaaaatcggtgaatgttttagagctagaaatagcaagttaaaataaggctagtccgttatcaacttgaaaaagtggcaccgagtcggtgcgcctatttagtgcaccgattttgat

SEQ ID NO: 16008 - RNA, 120 nt, synthetic construct
  source 1..120: mol_type = other RNA
  modified_base 1: mod_base = OTHER; note = 2'-O-methyl modified nucleotide with phosphorothioate linkage
  modified_base 2: mod_base = OTHER; note = 2'-O-methyl modified nucleotide with phosphorothioate linkage
  modified_base 3: mod_base = OTHER; note = 2'-O-methyl modified nucleotide with phosphorothioate linkage
  modified_base 29: mod_base = OTHER; note = 2'-O-methyl modified nucleotide
  modified_base 30: mod_base = OTHER; note = 2'-O-methyl modified nucleotide
  modified_base 31: mod_base = OTHER; note = 2'-O-methyl modified nucleotide
  modified_base 32: mod_base = OTHER; note = 2'-O-methyl modified nucleotide
  modified_base 33: mod_base = OTHER; note = 2'-O-methyl modified nucleotide
  modified_base 34: mod_base = OTHER; note = 2'-O-methyl modified nucleotide
  modified_base 35: mod_base = OTHER; note = 2'-O-methyl modified nucleotide
  modified_base 36: mod_base = OTHER; note = 2'-O-methyl modified nucleotide
  modified_base 37: mod_base = OTHER; note = 2'-O-methyl modified nucleotide
  modified_base 38: mod_base = OTHER; note = 2'-O-methyl modified nucleotide
  modified_base 39: mod_base = OTHER; note = 2'-O-methyl modified nucleotide
  modified_base 40: mod_base = OTHER; note = 2'-O-methyl modified nucleotide
  modified_base 69: mod_base = OTHER; note = 2'-O-methyl modified nucleotide
  modified_base 70: mod_base = OTHER; note = 2'-O-methyl modified nucleotide
  modified_base 71: mod_base = OTHER; note = 2'-O-methyl modified nucleotide
  modified_base 72: mod_base = OTHER; note = 2'-O-methyl modified nucleotide
  modified_base 73: mod_base = OTHER; note = 2'-O-methyl modified nucleotide
  modified_base 74: mod_base = OTHER; note = 2'-O-methyl modified nucleotide
  modified_base 75: mod_base = OTHER; note = 2'-O-methyl modified nucleotide
  modified_base 76: mod_base = OTHER; note = 2'-O-methyl modified nucleotide
  modified_base 77: mod_base = OTHER; note = 2'-O-methyl modified nucleotide
  modified_base 78: mod_base = OTHER; note = 2'-O-methyl modified nucleotide
  modified_base 79: mod_base = OTHER; note = 2'-O-methyl modified nucleotide
  modified_base 80: mod_base = OTHER; note = 2'-O-methyl modified nucleotide
  modified_base 81: mod_base = OTHER; note = 2'-O-methyl modified nucleotide
  modified_base 82: mod_base = OTHER; note = 2'-O-methyl modified nucleotide
  modified_base 83: mod_base = OTHER; note = 2'-O-methyl modified nucleotide
  modified_base 84: mod_base = OTHER; note = 2'-O-methyl modified nucleotide
  modified_base 85: mod_base = OTHER; note = 2'-O-methyl modified nucleotide
  modified_base 86: mod_base = OTHER; note = 2'-O-methyl modified nucleotide
  modified_base 87: mod_base = OTHER; note = 2'-O-methyl modified nucleotide
  modified_base 88: mod_base = OTHER; note = 2'-O-methyl modified nucleotide
  modified_base 89: mod_base = OTHER; note = 2'-O-methyl modified nucleotide
  modified_base 90: mod_base = OTHER; note = 2'-O-methyl modified nucleotide
  modified_base 91: mod_base = OTHER; note = 2'-O-methyl modified nucleotide
  modified_base 92: mod_base = OTHER; note = 2'-O-methyl modified nucleotide
  modified_base 93: mod_base = OTHER; note = 2'-O-methyl modified nucleotide
  modified_base 94: mod_base = OTHER; note = 2'-O-methyl modified nucleotide
  modified_base 95: mod_base = OTHER; note = 2'-O-methyl modified nucleotide
  modified_base 96: mod_base = OTHER; note = 2'-O-methyl modified nucleotide
  modified_base 117: mod_base = OTHER; note = Nucleotide with phosphorothioate linkage
  modified_base 118: mod_base = OTHER; note = 2'-O-methyl modified nucleotide with phosphorothioate linkage
  modified_base 119: mod_base = OTHER; note = 2'-O-methyl modified nucleotide with phosphorothioate linkage
  modified_base 120: mod_base = OTHER; note = 2'-O-methyl modified nucleotide
gagaatcaaaatcggtgaatgttttagagctagaaatagcaagttaaaataaggctagtccgttatcaacttgaaaaagtggcaccgagtcggtgcgcctatttagtgcaccgattttga

SEQ ID NO: 16009 - RNA, 119 nt, synthetic construct
  source 1..119: mol_type = other RNA
  modified_base 1: mod_base = OTHER; note = 2'-O-methyl modified nucleotide with phosphorothioate linkage
  modified_base 2: mod_base = OTHER; note = 2'-O-methyl modified nucleotide with phosphorothioate linkage
  modified_base 3: mod_base = OTHER; note = 2'-O-methyl modified nucleotide with phosphorothioate linkage
  modified_base 29: mod_base = OTHER; note = 2'-O-methyl modified nucleotide
  modified_base 30: mod_base = OTHER; note = 2'-O-methyl modified nucleotide
  modified_base 31: mod_base = OTHER; note = 2'-O-methyl modified nucleotide
  modified_base 32: mod_base = OTHER; note = 2'-O-methyl modified nucleotide
  modified_base 33: mod_base = OTHER; note = 2'-O-methyl modified nucleotide
  modified_base 34: mod_base = OTHER; note = 2'-O-methyl modified nucleotide
  modified_base 35: mod_base = OTHER; note = 2'-O-methyl modified nucleotide
  modified_base 36: mod_base = OTHER; note = 2'-O-methyl modified nucleotide
  modified_base 37: mod_base = OTHER; note = 2'-O-methyl modified nucleotide
  modified_base 38: mod_base = OTHER; note = 2'-O-methyl modified nucleotide
  modified_base 39: mod_base = OTHER; note = 2'-O-methyl modified nucleotide
  modified_base 40: mod_base = OTHER; note = 2'-O-methyl modified nucleotide
  modified_base 69: mod_base = OTHER; note = 2'-O-methyl modified nucleotide
  modified_base 70: mod_base = OTHER; note = 2'-O-methyl modified nucleotide
  modified_base 71: mod_base = OTHER; note = 2'-O-methyl modified nucleotide
  modified_base 72: mod_base = OTHER; note = 2'-O-methyl modified nucleotide
  modified_base 73: mod_base = OTHER; note = 2'-O-methyl modified nucleotide
  modified_base 74: mod_base = OTHER; note = 2'-O-methyl modified nucleotide
  modified_base 75: mod_base = OTHER; note = 2'-O-methyl modified nucleotide
  modified_base 76: mod_base = OTHER; note = 2'-O-methyl modified nucleotide
  modified_base 77: mod_base = OTHER; note = 2'-O-methyl modified nucleotide
  modified_base 78: mod_base = OTHER; note = 2'-O-methyl modified nucleotide
  modified_base 79: mod_base = OTHER; note = 2'-O-methyl modified nucleotide
  modified_base 80: mod_base = OTHER; note = 2'-O-methyl modified nucleotide
  modified_base 81: mod_base = OTHER; note = 2'-O-methyl modified nucleotide
  modified_base 82: mod_base = OTHER; note = 2'-O-methyl modified nucleotide
  modified_base 83: mod_base = OTHER; note = 2'-O-methyl modified nucleotide
  modified_base 84: mod_base = OTHER; note = 2'-O-methyl modified nucleotide
  modified_base 85: mod_base = OTHER; note = 2'-O-methyl modified nucleotide
  modified_base 86: mod_base = OTHER; note = 2'-O-methyl modified nucleotide
  modified_base 87: mod_base = OTHER; note = 2'-O-methyl modified nucleotide
  modified_base 88: mod_base = OTHER; note = 2'-O-methyl modified nucleotide
  modified_base 89: mod_base = OTHER; note = 2'-O-methyl modified nucleotide
  modified_base 90: mod_base = OTHER; note = 2'-O-methyl modified nucleotide
  modified_base 91: mod_base = OTHER; note = 2'-O-methyl modified nucleotide
  modified_base 92: mod_base = OTHER; note = 2'-O-methyl modified nucleotide
  modified_base 93: mod_base = OTHER; note = 2'-O-methyl modified nucleotide
  modified_base 94: mod_base = OTHER; note = 2'-O-methyl modified nucleotide
  modified_base 95: mod_base = OTHER; note = 2'-O-methyl modified nucleotide
  modified_base 96: mod_base = OTHER; note = 2'-O-methyl modified nucleotide
  modified_base 116: mod_base = OTHER; note = Nucleotide with phosphorothioate linkage
  modified_base 117: mod_base = OTHER; note = 2'-O-methyl modified nucleotide with phosphorothioate linkage
  modified_base 118: mod_base = OTHER; note = 2'-O-methyl modified nucleotide with phosphorothioate linkage
  modified_base 119: mod_base = OTHER; note = 2'-O-methyl modified nucleotide
gagaatcaaaatcggtgaatgttttagagctagaaatagcaagttaaaataaggctagtccgttatcaacttgaaaaagtggcaccgagtcggtgcgcctatttagtgcaccgattttg

SEQ ID NO: 16010 - RNA, 118 nt, synthetic construct
  source 1..118: mol_type = other RNA
  modified_base 1: mod_base = OTHER; note = 2'-O-methyl modified nucleotide with phosphorothioate linkage
  modified_base 2: mod_base = OTHER; note = 2'-O-methyl modified nucleotide with phosphorothioate linkage
  modified_base 3: mod_base = OTHER; note = 2'-O-methyl modified nucleotide with phosphorothioate linkage
  modified_base 29: mod_base = OTHER; note = 2'-O-methyl modified nucleotide
  modified_base 30: mod_base = OTHER; note = 2'-O-methyl modified nucleotide
  modified_base 31: mod_base = OTHER; note = 2'-O-methyl modified nucleotide
  modified_base 32: mod_base = OTHER; note = 2'-O-methyl modified nucleotide
  modified_base 33: mod_base = OTHER; note = 2'-O-methyl modified nucleotide
  modified_base 34: mod_base = OTHER; note = 2'-O-methyl modified nucleotide
  modified_base 35: mod_base = OTHER; note = 2'-O-methyl modified nucleotide
  modified_base 36: mod_base = OTHER; note = 2'-O-methyl modified nucleotide
  modified_base 37: mod_base = OTHER; note = 2'-O-methyl modified nucleotide
  modified_base 38: mod_base = OTHER; note = 2'-O-methyl modified nucleotide
  modified_base 39: mod_base = OTHER; note = 2'-O-methyl modified nucleotide
  modified_base 40: mod_base = OTHER; note = 2'-O-methyl modified nucleotide
  modified_base 69: mod_base = OTHER; note = 2'-O-methyl modified nucleotide
  modified_base 70: mod_base = OTHER; note = 2'-O-methyl modified nucleotide
  modified_base 71: mod_base = OTHER; note = 2'-O-methyl modified nucleotide
  modified_base 72: mod_base = OTHER; note = 2'-O-methyl modified nucleotide
  modified_base 73: mod_base = OTHER; note = 2'-O-methyl modified nucleotide
  modified_base 74: mod_base = OTHER; note = 2'-O-methyl modified nucleotide
  modified_base 75: mod_base = OTHER; note = 2'-O-methyl modified nucleotide
  modified_base 76: mod_base = OTHER; note = 2'-O-methyl modified nucleotide
  modified_base 77: mod_base = OTHER; note = 2'-O-methyl modified nucleotide
  modified_base 78: mod_base = OTHER; note = 2'-O-methyl modified nucleotide
  modified_base 79: mod_base = OTHER; note = 2'-O-methyl modified nucleotide
  modified_base 80: mod_base = OTHER; note = 2'-O-methyl modified nucleotide
  modified_base 81: mod_base = OTHER; note = 2'-O-methyl modified nucleotide
  modified_base 82: mod_base = OTHER; note = 2'-O-methyl modified nucleotide
  modified_base 83: mod_base = OTHER; note = 2'-O-methyl modified nucleotide
  modified_base 84: mod_base = OTHER; note = 2'-O-methyl modified nucleotide
  modified_base 85: mod_base = OTHER; note = 2'-O-methyl modified nucleotide
  modified_base 86: mod_base = OTHER; note = 2'-O-methyl modified nucleotide
  modified_base 87: mod_base = OTHER; note = 2'-O-methyl modified nucleotide
  modified_base 88: mod_base = OTHER; note = 2'-O-methyl modified nucleotide
  modified_base 89: mod_base = OTHER; note = 2'-O-methyl modified nucleotide
  modified_base 90: mod_base = OTHER; note = 2'-O-methyl modified nucleotide
  modified_base 91: mod_base = OTHER; note = 2'-O-methyl modified nucleotide
  modified_base 92: mod_base = OTHER; note = 2'-O-methyl modified nucleotide
  modified_base 93: mod_base = OTHER; note = 2'-O-methyl modified nucleotide
  modified_base 94: mod_base = OTHER; note = 2'-O-methyl modified nucleotide
  modified_base 95: mod_base = OTHER; note = 2'-O-methyl modified nucleotide
  modified_base 96: mod_base = OTHER; note = 2'-O-methyl modified nucleotide
  modified_base 115: mod_base = OTHER; note = Nucleotide with phosphorothioate linkage
  modified_base 116: mod_base = OTHER; note = 2'-O-methyl modified nucleotide with phosphorothioate linkage
  modified_base 117: mod_base = OTHER; note = 2'-O-methyl modified nucleotide with phosphorothioate linkage
  modified_base 118: mod_base = OTHER; note = 2'-O-methyl modified nucleotide
gagaatcaaaatcggtgaatgttttagagctagaaatagcaagttaaaataaggctagtccgttatcaacttgaaaaagtggcaccgagtcggtgcgcctatttagtgcaccgatttt

SEQ ID NO: 16011 - RNA, 117 nt, synthetic construct
  source 1..117: mol_type = other RNA
  modified_base 1: mod_base = OTHER; note = 2'-O-methyl modified nucleotide with phosphorothioate linkage
  modified_base 2: mod_base = OTHER; note = 2'-O-methyl modified nucleotide with phosphorothioate linkage
  modified_base 3: mod_base = OTHER; note = 2'-O-methyl modified nucleotide with phosphorothioate linkage
  modified_base 29: mod_base = OTHER; note = 2'-O-methyl modified nucleotide
  modified_base 30: mod_base = OTHER; note = 2'-O-methyl modified nucleotide
  modified_base 31: mod_base = OTHER; note = 2'-O-methyl modified nucleotide
  modified_base 32: mod_base = OTHER; note = 2'-O-methyl modified nucleotide
  modified_base 33: mod_base = OTHER; note = 2'-O-methyl modified nucleotide
  modified_base 34: mod_base = OTHER; note = 2'-O-methyl modified nucleotide
  modified_base 35: mod_base = OTHER; note = 2'-O-methyl modified nucleotide
  modified_base 36: mod_base = OTHER; note = 2'-O-methyl modified nucleotide
  modified_base 37: mod_base = OTHER; note = 2'-O-methyl modified nucleotide
  modified_base 38: mod_base = OTHER; note = 2'-O-methyl modified nucleotide
  modified_base 39: mod_base = OTHER; note = 2'-O-methyl modified nucleotide
  modified_base 40: mod_base = OTHER; note = 2'-O-methyl modified nucleotide
  modified_base 69: mod_base = OTHER; note = 2'-O-methyl modified nucleotide
  modified_base 70: mod_base = OTHER; note = 2'-O-methyl modified nucleotide
  modified_base 71: mod_base = OTHER; note = 2'-O-methyl modified nucleotide
  modified_base 72: mod_base = OTHER; note = 2'-O-methyl modified nucleotide
  modified_base 73: mod_base = OTHER; note = 2'-O-methyl modified nucleotide
  modified_base 74: mod_base = OTHER; note = 2'-O-methyl modified nucleotide
  modified_base 75: mod_base = OTHER; note = 2'-O-methyl modified nucleotide
  modified_base 76: mod_base = OTHER; note = 2'-O-methyl modified nucleotide
  modified_base 77: mod_base = OTHER; note = 2'-O-methyl modified nucleotide
  modified_base 78: mod_base = OTHER; note = 2'-O-methyl modified nucleotide
  modified_base 79: mod_base = OTHER; note = 2'-O-methyl modified nucleotide
  modified_base 80: mod_base = OTHER; note = 2'-O-methyl modified nucleotide
  modified_base 81: mod_base = OTHER; note = 2'-O-methyl modified nucleotide
  modified_base 82: mod_base = OTHER; note = 2'-O-methyl modified nucleotide
  modified_base 83: mod_base = OTHER; note = 2'-O-methyl modified nucleotide
  modified_base 84: mod_base = OTHER; note = 2'-O-methyl modified nucleotide
  modified_base 85: mod_base = OTHER; note = 2'-O-methyl modified nucleotide
  modified_base 86: mod_base = OTHER; note = 2'-O-methyl modified nucleotide
  modified_base 87: mod_base = OTHER; note = 2'-O-methyl modified nucleotide
  modified_base 88: mod_base = OTHER; note = 2'-O-methyl modified nucleotide
  modified_base 89: mod_base = OTHER; note = 2'-O-methyl modified nucleotide
  modified_base 90: mod_base = OTHER; note = 2'-O-methyl modified nucleotide
  modified_base 91: mod_base = OTHER; note = 2'-O-methyl modified nucleotide
  modified_base 92: mod_base = OTHER; note = 2'-O-methyl modified nucleotide
  modified_base 93: mod_base = OTHER; note = 2'-O-methyl modified nucleotide
  modified_base 94: mod_base = OTHER; note = 2'-O-methyl modified nucleotide
  modified_base 95: mod_base = OTHER; note = 2'-O-methyl modified nucleotide
  modified_base 96: mod_base = OTHER; note = 2'-O-methyl modified nucleotide
  modified_base 114: mod_base = OTHER; note = Nucleotide with phosphorothioate linkage
  modified_base 115: mod_base = OTHER; note = 2'-O-methyl modified nucleotide with phosphorothioate linkage
  modified_base 116: mod_base = OTHER; note = 2'-O-methyl modified nucleotide with phosphorothioate linkage
  modified_base 117: mod_base = OTHER; note = 2'-O-methyl modified nucleotide
gagaatcaaaatcggtgaatgttttagagctagaaatagcaagttaaaataaggctagtccgttatcaacttgaaaaagtggcaccgagtcggtgcgcctatttagtgcaccgattt

SEQ ID NO: 16012 - RNA, 116 nt, synthetic construct
  source 1..116: mol_type = other RNA
  modified_base 1: mod_base = OTHER; note = 2'-O-methyl modified nucleotide with phosphorothioate linkage
  modified_base 2: mod_base = OTHER; note = 2'-O-methyl modified nucleotide with phosphorothioate linkage
  modified_base 3: mod_base = OTHER; note = 2'-O-methyl modified nucleotide with phosphorothioate linkage
  modified_base 29: mod_base = OTHER; note = 2'-O-methyl modified nucleotide
  modified_base 30: mod_base = OTHER; note = 2'-O-methyl modified nucleotide
  modified_base 31: mod_base = OTHER; note = 2'-O-methyl modified nucleotide
  modified_base 32: mod_base = OTHER; note = 2'-O-methyl modified nucleotide
  modified_base 33: mod_base = OTHER; note = 2'-O-methyl modified nucleotide
  modified_base 34: mod_base = OTHER; note = 2'-O-methyl modified nucleotide
  modified_base 35: mod_base = OTHER; note = 2'-O-methyl modified nucleotide
  modified_base 36: mod_base = OTHER; note = 2'-O-methyl modified nucleotide
  modified_base 37: mod_base = OTHER; note = 2'-O-methyl modified nucleotide
  modified_base 38: mod_base = OTHER; note = 2'-O-methyl modified nucleotide
  modified_base 39: mod_base = OTHER; note = 2'-O-methyl modified nucleotide
  modified_base 40: mod_base = OTHER; note = 2'-O-methyl modified nucleotide
  modified_base 69: mod_base = OTHER; note = 2'-O-methyl modified nucleotide
  modified_base 70: mod_base = OTHER; note = 2'-O-methyl modified nucleotide
  modified_base 71: mod_base = OTHER; note = 2'-O-methyl modified nucleotide
  modified_base 72: mod_base = OTHER; note = 2'-O-methyl modified nucleotide
  modified_base 73: mod_base = OTHER; note = 2'-O-methyl modified nucleotide
  modified_base 74: mod_base = OTHER; note = 2'-O-methyl modified nucleotide
  modified_base 75: mod_base = OTHER; note = 2'-O-methyl modified nucleotide
  modified_base 76: mod_base = OTHER; note = 2'-O-methyl modified nucleotide
  modified_base 77: mod_base = OTHER; note = 2'-O-methyl modified nucleotide
  modified_base 78: mod_base = OTHER; note = 2'-O-methyl modified nucleotide
  modified_base 79: mod_base = OTHER; note = 2'-O-methyl modified nucleotide
  modified_base 80: mod_base = OTHER; note = 2'-O-methyl modified nucleotide
  modified_base 81: mod_base = OTHER; note = 2'-O-methyl modified nucleotide
  modified_base 82: mod_base = OTHER; note = 2'-O-methyl modified nucleotide
  modified_base 83: mod_base = OTHER; note = 2'-O-methyl modified nucleotide
  modified_base 84: mod_base = OTHER; note = 2'-O-methyl modified nucleotide
  modified_base 85: mod_base = OTHER; note = 2'-O-methyl modified nucleotide
  modified_base 86: mod_base = OTHER; note = 2'-O-methyl modified nucleotide
  modified_base 87: mod_base = OTHER; note = 2'-O-methyl modified nucleotide
  modified_base 88: mod_base = OTHER; note = 2'-O-methyl modified nucleotide
  modified_base 89: mod_base = OTHER; note = 2'-O-methyl modified nucleotide
  modified_base 90: mod_base = OTHER; note = 2'-O-methyl modified nucleotide
  modified_base 91: mod_base = OTHER; note = 2'-O-methyl modified nucleotide
  modified_base 92: mod_base = OTHER; note = 2'-O-methyl modified nucleotide
  modified_base 93: mod_base = OTHER; note = 2'-O-methyl modified nucleotide
  modified_base 94: mod_base = OTHER; note = 2'-O-methyl modified nucleotide
  modified_base 95: mod_base = OTHER; note = 2'-O-methyl modified nucleotide
  modified_base 96: mod_base = OTHER; note = 2'-O-methyl modified nucleotide
  modified_base 113: mod_base = OTHER; note = Nucleotide with phosphorothioate linkage
  modified_base 114: mod_base = OTHER; note = 2'-O-methyl modified nucleotide with phosphorothioate linkage
  modified_base 115: mod_base = OTHER; note = 2'-O-methyl modified nucleotide with phosphorothioate linkage
  modified_base 116: mod_base = OTHER; note = 2'-O-methyl modified nucleotide
gagaatcaaaatcggtgaatgttttagagctagaaatagcaagttaaaataaggctagtccgttatcaacttgaaaaagtggcaccgagtcggtgcgcctatttagtgcaccgatt

SEQ ID NO: 16013 - RNA, 123 nt, synthetic construct
  source 1..123: mol_type = other RNA
  modified_base 1: mod_base = OTHER; note = 2'-O-methyl modified nucleotide with phosphorothioate linkage
  modified_base 2: mod_base = OTHER; note = 2'-O-methyl modified nucleotide with phosphorothioate linkage
  modified_base 3: mod_base = OTHER; note = 2'-O-methyl modified nucleotide with phosphorothioate linkage
  modified_base 29: mod_base = OTHER; note = 2'-O-methyl modified nucleotide
  modified_base 30: mod_base = OTHER; note = 2'-O-methyl modified nucleotide
  modified_base 31: mod_base = OTHER; note = 2'-O-methyl modified nucleotide
  modified_base 32: mod_base = OTHER; note = 2'-O-methyl modified nucleotide
  modified_base 33: mod_base = OTHER; note = 2'-O-methyl modified nucleotide
  modified_base 34: mod_base = OTHER; note = 2'-O-methyl modified nucleotide
  modified_base 35: mod_base = OTHER; note = 2'-O-methyl modified nucleotide
  modified_base 36: mod_base = OTHER; note = 2'-O-methyl modified nucleotide
  modified_base 37: mod_base = OTHER; note = 2'-O-methyl modified nucleotide
  modified_base 38: mod_base = OTHER; note = 2'-O-methyl modified nucleotide
  modified_base 39: mod_base = OTHER; note = 2'-O-methyl modified nucleotide
  modified_base 40: mod_base = OTHER; note = 2'-O-methyl modified nucleotide
  modified_base 69: mod_base = OTHER; note = 2'-O-methyl modified nucleotide
  modified_base 70: mod_base = OTHER; note = 2'-O-methyl modified nucleotide
  modified_base 71: mod_base = OTHER; note = 2'-O-methyl modified nucleotide
  modified_base 72: mod_base = OTHER; note = 2'-O-methyl modified nucleotide
  modified_base 73: mod_base = OTHER; note = 2'-O-methyl modified nucleotide
  modified_base 74: mod_base = OTHER; note = 2'-O-methyl modified nucleotide
  modified_base 75: mod_base = OTHER; note = 2'-O-methyl modified nucleotide
  modified_base 76: mod_base = OTHER; note = 2'-O-methyl modified nucleotide
  modified_base 77: mod_base = OTHER; note = 2'-O-methyl modified nucleotide
  modified_base 78: mod_base = OTHER; note = 2'-O-methyl modified nucleotide
  modified_base 79: mod_base = OTHER; note = 2'-O-methyl modified nucleotide
  modified_base 80: mod_base = OTHER; note = 2'-O-methyl modified nucleotide
  modified_base 81: mod_base = OTHER; note = 2'-O-methyl modified nucleotide
  modified_base 82: mod_base = OTHER; note = 2'-O-methyl modified nucleotide
  modified_base 83: mod_base = OTHER; note = 2'-O-methyl modified nucleotide
  modified_base 84: mod_base = OTHER; note = 2'-O-methyl modified nucleotide
  modified_base 85: mod_base = OTHER; note = 2'-O-methyl modified nucleotide
  modified_base 86: mod_base = OTHER; note = 2'-O-methyl modified nucleotide
  modified_base 87: mod_base = OTHER; note = 2'-O-methyl modified nucleotide
  modified_base 88: mod_base = OTHER; note = 2'-O-methyl modified nucleotide
  modified_base 89: mod_base = OTHER; note = 2'-O-methyl modified nucleotide
  modified_base 90: mod_base = OTHER; note = 2'-O-methyl modified nucleotide
  modified_base 91: mod_base = OTHER; note = 2'-O-methyl modified nucleotide
  modified_base 92: mod_base = OTHER; note = 2'-O-methyl modified nucleotide
  modified_base 93: mod_base = OTHER; note = 2'-O-methyl modified nucleotide
  modified_base 94: mod_base = OTHER; note = 2'-O-methyl modified nucleotide
  modified_base 95: mod_base = OTHER; note = 2'-O-methyl modified nucleotide
  modified_base 96: mod_base = OTHER; note = 2'-O-methyl modified nucleotide
  modified_base 120: mod_base = OTHER; note = Nucleotide with phosphorothioate linkage
  modified_base 121: mod_base = OTHER; note = 2'-O-methyl modified nucleotide with phosphorothioate linkage
  modified_base 122: mod_base = OTHER; note = 2'-O-methyl modified nucleotide with phosphorothioate linkage
  modified_base 123: mod_base = OTHER; note = 2'-O-methyl modified nucleotide
gagaatcaaaatcggtgaatgttttagagctagaaatagcaagttaaaataaggctagtccgttatcaacttgaaaaagtggcaccgagtcggtgcctgcctatttagtgcaccgattttgat

SEQ ID NO: 16014 - RNA, 122 nt, synthetic construct
  source 1..122: mol_type = other RNA
  modified_base 1: mod_base = OTHER; note = 2'-O-methyl modified nucleotide with phosphorothioate linkage
  modified_base 2: mod_base = OTHER; note = 2'-O-methyl modified nucleotide with phosphorothioate linkage
  modified_base 3: mod_base = OTHER; note = 2'-O-methyl modified nucleotide with phosphorothioate linkage
  modified_base 29: mod_base = OTHER; note = 2'-O-methyl modified nucleotide
  modified_base 30: mod_base = OTHER; note = 2'-O-methyl modified nucleotide
  modified_base 31: mod_base = OTHER; note = 2'-O-methyl modified nucleotide
  modified_base 32: mod_base = OTHER; note = 2'-O-methyl modified nucleotide
  modified_base 33: mod_base = OTHER; note = 2'-O-methyl modified nucleotide
  modified_base 34: mod_base = OTHER; note = 2'-O-methyl modified nucleotide
  modified_base 35: mod_base = OTHER; note = 2'-O-methyl modified nucleotide
  modified_base 36: mod_base = OTHER; note = 2'-O-methyl modified nucleotide
  modified_base 37: mod_base = OTHER; note = 2'-O-methyl modified nucleotide
  modified_base 38: mod_base = OTHER; note = 2'-O-methyl modified nucleotide
  modified_base 39: mod_base = OTHER; note = 2'-O-methyl modified nucleotide
  modified_base 40: mod_base = OTHER; note = 2'-O-methyl modified nucleotide
  modified_base 69: mod_base = OTHER; note = 2'-O-methyl modified nucleotide
  modified_base 70: mod_base = OTHER; note = 2'-O-methyl modified nucleotide
  modified_base 71: mod_base = OTHER; note = 2'-O-methyl modified nucleotide
  modified_base 72: mod_base = OTHER; note = 2'-O-methyl modified nucleotide
  modified_base 73: mod_base = OTHER; note = 2'-O-methyl modified nucleotide
  modified_base 74: mod_base = OTHER; note = 2'-O-methyl modified nucleotide
  modified_base 75: mod_base = OTHER; note = 2'-O-methyl modified nucleotide
  modified_base 76: mod_base = OTHER; note = 2'-O-methyl modified nucleotide
  modified_base 77: mod_base = OTHER; note = 2'-O-methyl modified nucleotide
  modified_base 78: mod_base = OTHER; note = 2'-O-methyl modified nucleotide
  modified_base 79: mod_base = OTHER; note = 2'-O-methyl modified nucleotide
  modified_base 80: mod_base = OTHER; note = 2'-O-methyl modified nucleotide
  modified_base 81: mod_base = OTHER; note = 2'-O-methyl modified nucleotide
  modified_base 82: mod_base = OTHER; note = 2'-O-methyl modified nucleotide
  modified_base 83: mod_base = OTHER; note = 2'-O-methyl modified nucleotide
  modified_base 84: mod_base = OTHER; note = 2'-O-methyl modified nucleotide
  modified_base 85: mod_base = OTHER; note = 2'-O-methyl modified nucleotide
  modified_base 86: mod_base = OTHER; note = 2'-O-methyl modified nucleotide
  modified_base 87: mod_base = OTHER; note = 2'-O-methyl modified nucleotide
  modified_base 88: mod_base = OTHER; note = 2'-O-methyl modified nucleotide
  modified_base 89: mod_base = OTHER; note = 2'-O-methyl modified nucleotide
  modified_base 90: mod_base = OTHER; note = 2'-O-methyl modified nucleotide
  modified_base 91: mod_base = OTHER; note = 2'-O-methyl modified nucleotide
  modified_base 92: mod_base = OTHER; note = 2'-O-methyl modified nucleotide
  modified_base 93: mod_base = OTHER; note = 2'-O-methyl modified nucleotide
  modified_base 94: mod_base = OTHER; note = 2'-O-methyl modified nucleotide
  modified_base 95: mod_base = OTHER; note = 2'-O-methyl modified nucleotide
  modified_base 96: mod_base = OTHER; note = 2'-O-methyl modified nucleotide
  modified_base 119: mod_base = OTHER; note = Nucleotide with phosphorothioate linkage
  modified_base 120: mod_base = OTHER; note = 2'-O-methyl modified nucleotide with phosphorothioate linkage
  modified_base 121: mod_base = OTHER; note = 2'-O-methyl modified nucleotide with phosphorothioate linkage
  modified_base 122: mod_base = OTHER; note = 2'-O-methyl modified nucleotide
gagaatcaaaatcggtgaatgttttagagctagaaatagcaagttaaaataaggctagtccgttatcaacttgaaaaagtggcaccgagtcggtgcctgcctatttagtgcaccgattttga

SEQ ID NO: 16015 - RNA, 121 nt, synthetic construct
  source 1..121: mol_type = other RNA
  modified_base 1: mod_base = OTHER; note = 2'-O-methyl modified nucleotide with phosphorothioate linkage
  modified_base 2: mod_base = OTHER; note = 2'-O-methyl modified nucleotide with phosphorothioate linkage
  modified_base 3: mod_base = OTHER; note = 2'-O-methyl modified nucleotide with phosphorothioate linkage
  modified_base 29: mod_base = OTHER; note = 2'-O-methyl modified nucleotide
  modified_base 30: mod_base = OTHER; note = 2'-O-methyl modified nucleotide
  modified_base 31: mod_base = OTHER; note = 2'-O-methyl modified nucleotide
  modified_base 32: mod_base = OTHER; note = 2'-O-methyl modified nucleotide
  modified_base 33: mod_base = OTHER; note = 2'-O-methyl modified nucleotide
  modified_base 34: mod_base = OTHER; note = 2'-O-methyl modified nucleotide
  modified_base 35: mod_base = OTHER; note = 2'-O-methyl modified nucleotide
  modified_base 36: mod_base = OTHER; note = 2'-O-methyl modified nucleotide
  modified_base 37: mod_base = OTHER; note = 2'-O-methyl modified nucleotide
  modified_base 38: mod_base = OTHER; note = 2'-O-methyl modified nucleotide
  modified_base 39: mod_base = OTHER; note = 2'-O-methyl modified nucleotide
  modified_base 40: mod_base = OTHER; note = 2'-O-methyl modified nucleotide
  modified_base 69: mod_base = OTHER; note = 2'-O-methyl modified nucleotide
  modified_base 70: mod_base = OTHER; note = 2'-O-methyl modified nucleotide
  modified_base 71: mod_base = OTHER; note = 2'-O-methyl modified nucleotide
  modified_base 72: mod_base = OTHER; note = 2'-O-methyl modified nucleotide
  modified_base 73: mod_base = OTHER; note = 2'-O-methyl modified nucleotide
  modified_base 74: mod_base = OTHER; note = 2'-O-methyl modified nucleotide
  modified_base 75: mod_base = OTHER; note = 2'-O-methyl modified nucleotide
  modified_base 76: mod_base = OTHER; note = 2'-O-methyl modified nucleotide
  modified_base 77: mod_base = OTHER; note = 2'-O-methyl modified nucleotide
  modified_base 78: mod_base = OTHER; note = 2'-O-methyl modified nucleotide
  modified_base 79: mod_base = OTHER; note = 2'-O-methyl modified nucleotide
  modified_base 80: mod_base = OTHER; note = 2'-O-methyl modified nucleotide
  modified_base 81: mod_base = OTHER; note = 2'-O-methyl modified nucleotide
  modified_base 82: mod_base = OTHER; note = 2'-O-methyl modified nucleotide
  modified_base 83: mod_base = OTHER; note = 2'-O-methyl modified nucleotide
  modified_base 84: mod_base = OTHER; note = 2'-O-methyl modified nucleotide
  modified_base 85: mod_base = OTHER; note = 2'-O-methyl modified nucleotide
  modified_base 86: mod_base = OTHER; note = 2'-O-methyl modified nucleotide
  modified_base 87: mod_base = OTHER; note = 2'-O-methyl modified nucleotide
  modified_base 88: mod_base = OTHER; note = 2'-O-methyl modified nucleotide
  modified_base 89: mod_base = OTHER; note = 2'-O-methyl modified nucleotide
  modified_base 90: mod_base = OTHER; note = 2'-O-methyl modified nucleotide
  modified_base 91: mod_base = OTHER; note = 2'-O-methyl modified nucleotide
  modified_base 92: mod_base = OTHER; note = 2'-O-methyl modified nucleotide
  modified_base 93: mod_base = OTHER; note = 2'-O-methyl modified nucleotide
  modified_base 94: mod_base = OTHER; note = 2'-O-methyl modified nucleotide
  modified_base 95: mod_base = OTHER; note = 2'-O-methyl modified nucleotide
  modified_base 96: mod_base = OTHER; note = 2'-O-methyl modified nucleotide
  modified_base 118: mod_base = OTHER; note = Nucleotide with phosphorothioate linkage
  modified_base 119: mod_base = OTHER; note = 2'-O-methyl modified nucleotide with phosphorothioate linkage
  modified_base 120: mod_base = OTHER; note = 2'-O-methyl modified nucleotide with phosphorothioate linkage
  modified_base 121: mod_base = OTHER; note = 2'-O-methyl modified nucleotide
gagaatcaaaatcggtgaatgttttagagctagaaatagcaagttaaaataaggctagtccgttatcaacttgaaaaagtggcaccgagtcggtgcctgcctatttagtgcaccgattttg

SEQ ID NO: 16016 - RNA, 120 nt, synthetic construct
  source 1..120: mol_type = other RNA
  modified_base 1: mod_base = OTHER; note = 2'-O-methyl modified nucleotide with phosphorothioate linkage
  modified_base 2: mod_base = OTHER; note = 2'-O-methyl modified nucleotide with phosphorothioate linkage
  modified_base 3: mod_base = OTHER; note = 2'-O-methyl modified nucleotide with phosphorothioate linkage
  modified_base 29: mod_base = OTHER; note = 2'-O-methyl modified nucleotide
  modified_base 30: mod_base = OTHER; note = 2'-O-methyl modified nucleotide
  modified_base 31: mod_base = OTHER; note = 2'-O-methyl modified nucleotide
  modified_base 32: mod_base = OTHER; note = 2'-O-methyl modified nucleotide
  modified_base 33: mod_base = OTHER; note = 2'-O-methyl modified nucleotide
  modified_base 34: mod_base = OTHER; note = 2'-O-methyl modified nucleotide
  modified_base 35: mod_base = OTHER; note = 2'-O-methyl modified nucleotide
  modified_base 36: mod_base = OTHER; note = 2'-O-methyl modified nucleotide
  modified_base 37: mod_base = OTHER; note = 2'-O-methyl modified nucleotide
  modified_base 38: mod_base = OTHER; note = 2'-O-methyl modified nucleotide
  modified_base 39: mod_base = OTHER; note = 2'-O-methyl modified nucleotide
  modified_base 40: mod_base = OTHER; note = 2'-O-methyl modified nucleotide
  modified_base 69: mod_base = OTHER; note = 2'-O-methyl modified nucleotide
  modified_base 70: mod_base = OTHER; note = 2'-O-methyl modified nucleotide
  modified_base 71: mod_base = OTHER; note = 2'-O-methyl modified nucleotide
  modified_base 72: mod_base = OTHER; note = 2'-O-methyl modified nucleotide
  modified_base 73: mod_base = OTHER; note = 2'-O-methyl modified nucleotide
  modified_base 74: mod_base = OTHER; note = 2'-O-methyl modified nucleotide
  modified_base 75: mod_base = OTHER; note = 2'-O-methyl modified nucleotide
  modified_base 76: mod_base = OTHER; note = 2'-O-methyl modified nucleotide
  modified_base 77: mod_base = OTHER; note = 2'-O-methyl modified nucleotide
  modified_base 78: mod_base = OTHER; note = 2'-O-methyl modified nucleotide
  modified_base 79: mod_base = OTHER; note = 2'-O-methyl modified nucleotide
  modified_base 80: mod_base = OTHER; note = 2'-O-methyl modified nucleotide
  modified_base 81: mod_base = OTHER; note = 2'-O-methyl modified nucleotide
  modified_base 82: mod_base = OTHER; note = 2'-O-methyl modified nucleotide
  modified_base 83: mod_base = OTHER; note = 2'-O-methyl modified nucleotide
  modified_base 84: mod_base = OTHER; note = 2'-O-methyl modified nucleotide
  modified_base 85: mod_base = OTHER; note = 2'-O-methyl modified nucleotide
  modified_base 86: mod_base = OTHER; note = 2'-O-methyl modified nucleotide
  modified_base 87: mod_base = OTHER; note = 2'-O-methyl modified nucleotide
  modified_base 88: mod_base = OTHER; note = 2'-O-methyl modified nucleotide
  modified_base 89: mod_base = OTHER; note = 2'-O-methyl modified nucleotide
  modified_base 90: mod_base = OTHER; note = 2'-O-methyl modified nucleotide
  modified_base 91: mod_base = OTHER; note = 2'-O-methyl modified nucleotide
  modified_base 92: mod_base = OTHER; note = 2'-O-methyl modified nucleotide
  modified_base 93: mod_base = OTHER; note = 2'-O-methyl modified nucleotide
  modified_base 94: mod_base = OTHER; note = 2'-O-methyl modified nucleotide
  modified_base 95: mod_base = OTHER; note = 2'-O-methyl modified nucleotide
  modified_base 96: mod_base = OTHER; note = 2'-O-methyl modified nucleotide
  modified_base 117: mod_base = OTHER; note = Nucleotide with phosphorothioate linkage
  modified_base 118: mod_base = OTHER; note = 2'-O-methyl modified nucleotide with phosphorothioate linkage
  modified_base 119: mod_base = OTHER; note = 2'-O-methyl modified nucleotide with phosphorothioate linkage
  modified_base 120: mod_base = OTHER; note = 2'-O-methyl modified nucleotide
gagaatcaaaatcggtgaatgttttagagctagaaatagcaagttaaaataaggctagtccgttatcaacttgaaaaagtggcaccgagtcggtgcctgcctatttagtgcaccgatttt

SEQ ID NO: 16017 - RNA, 119 nt, synthetic construct
  source 1..119: mol_type = other RNA
  modified_base 1: mod_base = OTHER; note = 2'-O-methyl modified nucleotide with phosphorothioate linkage
  modified_base 2: mod_base = OTHER; note = 2'-O-methyl modified nucleotide with phosphorothioate linkage
  modified_base 3: mod_base = OTHER; note = 2'-O-methyl modified nucleotide with phosphorothioate linkage
  modified_base 29: mod_base = OTHER; note = 2'-O-methyl modified nucleotide
  modified_base 30: mod_base = OTHER; note = 2'-O-methyl modified nucleotide
  modified_base 31: mod_base = OTHER; note = 2'-O-methyl modified nucleotide
  modified_base 32: mod_base = OTHER; note = 2'-O-methyl modified nucleotide
  modified_base 33: mod_base = OTHER; note = 2'-O-methyl modified nucleotide
  modified_base 34: mod_base = OTHER; note = 2'-O-methyl modified nucleotide
  modified_base 35: mod_base = OTHER; note = 2'-O-methyl modified nucleotide
  modified_base 36: mod_base = OTHER; note = 2'-O-methyl modified nucleotide
  modified_base 37: mod_base = OTHER; note = 2'-O-methyl modified nucleotide
  modified_base 38: mod_base = OTHER; note = 2'-O-methyl modified nucleotide
  modified_base 39: mod_base = OTHER; note = 2'-O-methyl modified nucleotide
  modified_base 40: mod_base = OTHER; note = 2'-O-methyl modified nucleotide
  modified_base 69: mod_base = OTHER; note = 2'-O-methyl modified nucleotide
  modified_base 70: mod_base = OTHER; note = 2'-O-methyl modified nucleotide
  modified_base 71: mod_base = OTHER; note = 2'-O-methyl modified nucleotide
  modified_base 72: mod_base = OTHER; note = 2'-O-methyl modified nucleotide
  modified_base 73: mod_base = OTHER; note = 2'-O-methyl modified nucleotide
  modified_base 74: mod_base = OTHER; note = 2'-O-methyl modified nucleotide
  modified_base 75: mod_base = OTHER; note = 2'-O-methyl modified nucleotide
  modified_base 76: mod_base = OTHER; note = 2'-O-methyl modified nucleotide
  modified_base 77: mod_base = OTHER; note = 2'-O-methyl modified nucleotide
  modified_base 78: mod_base = OTHER; note = 2'-O-methyl modified nucleotide
  modified_base 79: mod_base = OTHER; note = 2'-O-methyl modified nucleotide
  modified_base 80: mod_base = OTHER; note = 2'-O-methyl modified nucleotide
  modified_base 81: mod_base = OTHER; note = 2'-O-methyl modified nucleotide
  modified_base 82: mod_base = OTHER; note = 2'-O-methyl modified nucleotide
  modified_base 83: mod_base = OTHER; note = 2'-O-methyl modified nucleotide
  modified_base 84: mod_base = OTHER; note = 2'-O-methyl modified nucleotide
  modified_base 85: mod_base = OTHER; note = 2'-O-methyl modified nucleotide
  modified_base 86: mod_base = OTHER; note = 2'-O-methyl modified nucleotide
  modified_base 87: mod_base = OTHER; note = 2'-O-methyl modified nucleotide
  modified_base 88: mod_base = OTHER; note = 2'-O-methyl modified nucleotide
  modified_base 89: mod_base = OTHER; note = 2'-O-methyl modified nucleotide
  modified_base 90: mod_base = OTHER; note = 2'-O-methyl modified nucleotide
  modified_base 91: mod_base = OTHER; note = 2'-O-methyl modified nucleotide
  modified_base 92: mod_base = OTHER; note = 2'-O-methyl modified nucleotide
  modified_base 93: mod_base = OTHER; note = 2'-O-methyl modified nucleotide
  modified_base 94: mod_base = OTHER; note = 2'-O-methyl modified nucleotide
  modified_base 95: mod_base = OTHER; note = 2'-O-methyl modified nucleotide
  modified_base 96: mod_base = OTHER; note = 2'-O-methyl modified nucleotide
  modified_base 116: mod_base = OTHER; note = Nucleotide with phosphorothioate linkage
  modified_base 117: mod_base = OTHER; note = 2'-O-methyl modified nucleotide with phosphorothioate linkage
  modified_base 118: mod_base = OTHER; note = 2'-O-methyl modified nucleotide with phosphorothioate linkage
  modified_base 119: mod_base = OTHER; note = 2'-O-methyl modified nucleotide
gagaatcaaaatcggtgaatgttttagagctagaaatagcaagttaaaataaggctagtccgttatcaacttgaaaaagtggcaccgagtcggtgcctgcctatttagtgcaccgattt

SEQ ID NO: 16018 - RNA, 118 nt, synthetic construct
  source 1..118: mol_type = other RNA
  modified_base 1: mod_base = OTHER; note = 2'-O-methyl modified nucleotide with phosphorothioate linkage
  modified_base 2: mod_base = OTHER; note = 2'-O-methyl modified nucleotide with phosphorothioate linkage
  modified_base 3: mod_base = OTHER; note = 2'-O-methyl modified nucleotide with phosphorothioate linkage
  modified_base 29: mod_base = OTHER; note = 2'-O-methyl modified nucleotide
  modified_base 30: mod_base = OTHER; note = 2'-O-methyl modified nucleotide
  modified_base 31: mod_base = OTHER; note = 2'-O-methyl modified nucleotide
  modified_base 32: mod_base = OTHER; note = 2'-O-methyl modified nucleotide
  modified_base 33: mod_base = OTHER; note = 2'-O-methyl modified nucleotide
  modified_base 34: mod_base = OTHER; note = 2'-O-methyl modified nucleotide
  modified_base 35: mod_base = OTHER; note = 2'-O-methyl modified nucleotide
  modified_base 36: mod_base = OTHER; note = 2'-O-methyl modified nucleotide
  modified_base 37: mod_base = OTHER; note = 2'-O-methyl modified nucleotide
  modified_base 38: mod_base = OTHER; note = 2'-O-methyl modified nucleotide
  modified_base 39: mod_base = OTHER; note = 2'-O-methyl modified nucleotide
  modified_base 40: mod_base = OTHER; note = 2'-O-methyl modified nucleotide
  modified_base 69: mod_base = OTHER; note = 2'-O-methyl modified nucleotide
  modified_base 70: mod_base = OTHER; note = 2'-O-methyl modified nucleotide
  modified_base 71: mod_base = OTHER; note = 2'-O-methyl modified nucleotide
  modified_base 72: mod_base = OTHER; note = 2'-O-methyl modified nucleotide
  modified_base 73: mod_base = OTHER; note = 2'-O-methyl modified nucleotide
  modified_base 74: mod_base = OTHER; note = 2'-O-methyl modified nucleotide
  modified_base 75: mod_base = OTHER; note = 2'-O-methyl modified nucleotide
  modified_base 76: mod_base = OTHER; note = 2'-O-methyl modified nucleotide
  modified_base 77: mod_base = OTHER; note = 2'-O-methyl modified nucleotide
  modified_base 78: mod_base = OTHER; note = 2'-O-methyl modified nucleotide
  modified_base 79: mod_base = OTHER; note = 2'-O-methyl modified nucleotide
  modified_base 80: mod_base = OTHER; note = 2'-O-methyl modified nucleotide
  modified_base 81: mod_base = OTHER; note = 2'-O-methyl modified nucleotide
  modified_base 82: mod_base = OTHER; note = 2'-O-methyl modified nucleotide
  modified_base 83: mod_base = OTHER; note = 2'-O-methyl modified nucleotide
  modified_base 84: mod_base = OTHER; note = 2'-O-methyl modified nucleotide
  modified_base 85: mod_base = OTHER; note = 2'-O-methyl modified nucleotide
  modified_base 86: mod_base = OTHER; note = 2'-O-methyl modified nucleotide
  modified_base 87: mod_base = OTHER; note = 2'-O-methyl modified nucleotide
  modified_base 88: mod_base = OTHER; note = 2'-O-methyl modified nucleotide
  modified_base 89: mod_base = OTHER; note = 2'-O-methyl modified nucleotide
  modified_base 90: mod_base = OTHER; note = 2'-O-methyl modified nucleotide
  modified_base 91: mod_base = OTHER; note = 2'-O-methyl modified nucleotide
  modified_base 92: mod_base = OTHER; note = 2'-O-methyl modified nucleotide
  modified_base 93: mod_base = OTHER; note = 2'-O-methyl modified nucleotide
  modified_base 94: mod_base = OTHER; note = 2'-O-methyl modified nucleotide
  modified_base 95: mod_base = OTHER; note = 2'-O-methyl modified nucleotide
  modified_base 96: mod_base = OTHER; note = 2'-O-methyl modified nucleotide
  modified_base 115: mod_base = OTHER; note = Nucleotide with phosphorothioate linkage
  modified_base 116: mod_base = OTHER; note = 2'-O-methyl modified nucleotide with phosphorothioate linkage
  modified_base 117: mod_base = OTHER; note = 2'-O-methyl modified nucleotide with phosphorothioate linkage
  modified_base 118: mod_base = OTHER; note = 2'-O-methyl modified nucleotide
gagaatcaaaatcggtgaatgttttagagctagaaatagcaagttaaaataaggctagtccgttatcaacttgaaaaagtggcaccgagtcggtgcctgcctatttagtgcaccgatt

SEQ ID NO: 16019 - RNA, 125 nt, synthetic construct
  source 1..125: mol_type = other RNA
  modified_base 1: mod_base = OTHER; note = 2'-O-methyl modified nucleotide with phosphorothioate linkage
  modified_base 2: mod_base = OTHER; note = 2'-O-methyl modified nucleotide with phosphorothioate linkage
  modified_base 3: mod_base = OTHER; note = 2'-O-methyl modified nucleotide with phosphorothioate linkage
  modified_base 29: mod_base = OTHER; note = 2'-O-methyl modified nucleotide
  modified_base 30: mod_base = OTHER; note = 2'-O-methyl modified nucleotide
  modified_base 31: mod_base = OTHER; note = 2'-O-methyl modified nucleotide
  modified_base 32: mod_base = OTHER; note = 2'-O-methyl modified nucleotide
  modified_base 33: mod_base = OTHER; note = 2'-O-methyl modified nucleotide
  modified_base 34: mod_base = OTHER; note = 2'-O-methyl modified nucleotide
  modified_base 35: mod_base = OTHER; note = 2'-O-methyl modified nucleotide
  modified_base 36: mod_base = OTHER; note = 2'-O-methyl modified nucleotide
  modified_base 37: mod_base = OTHER; note = 2'-O-methyl modified nucleotide
  modified_base 38: mod_base = OTHER; note = 2'-O-methyl modified nucleotide
  modified_base 39: mod_base = OTHER; note = 2'-O-methyl modified nucleotide
  modified_base 40: mod_base = OTHER; note = 2'-O-methyl modified nucleotide
  modified_base 69: mod_base = OTHER; note = 2'-O-methyl modified nucleotide
  modified_base 70: mod_base = OTHER; note = 2'-O-methyl modified nucleotide
  modified_base 71: mod_base = OTHER; note = 2'-O-methyl modified nucleotide
  modified_base 72: mod_base = OTHER; note = 2'-O-methyl modified nucleotide
  modified_base 73: mod_base = OTHER; note = 2'-O-methyl modified nucleotide
  modified_base 74: mod_base = OTHER; note = 2'-O-methyl modified nucleotide
  modified_base 75: mod_base = OTHER; note = 2'-O-methyl modified nucleotide
  modified_base 76: mod_base = OTHER; note = 2'-O-methyl modified nucleotide
  modified_base 77: mod_base = OTHER; note = 2'-O-methyl modified nucleotide
  modified_base 78: mod_base = OTHER; note = 2'-O-methyl modified nucleotide
  modified_base 79: mod_base = OTHER; note = 2'-O-methyl modified nucleotide
  modified_base 80: mod_base = OTHER; note = 2'-O-methyl modified nucleotide
  modified_base 81: mod_base = OTHER; note = 2'-O-methyl modified nucleotide
  modified_base 82: mod_base = OTHER; note = 2'-O-methyl modified nucleotide
  modified_base 83: mod_base = OTHER; note = 2'-O-methyl modified nucleotide
  modified_base 84: mod_base = OTHER; note = 2'-O-methyl modified nucleotide
  modified_base 85: mod_base = OTHER; note = 2'-O-methyl modified nucleotide
  modified_base 86: mod_base = OTHER; note = 2'-O-methyl modified nucleotide
  modified_base 87: mod_base = OTHER; note = 2'-O-methyl modified nucleotide
  modified_base 88: mod_base = OTHER; note = 2'-O-methyl modified nucleotide
  modified_base 89: mod_base = OTHER; note = 2'-O-methyl modified nucleotide
  modified_base 90: mod_base = OTHER; note = 2'-O-methyl modified nucleotide
  modified_base 91: mod_base = OTHER; note = 2'-O-methyl modified nucleotide
  modified_base 92: mod_base = OTHER; note = 2'-O-methyl modified nucleotide
  modified_base 93: mod_base = OTHER; note = 2'-O-methyl modified nucleotide
  modified_base 94: mod_base = OTHER; note = 2'-O-methyl modified nucleotide
  modified_base 95: mod_base = OTHER; note = 2'-O-methyl modified nucleotide
  modified_base 96: mod_base = OTHER; note = 2'-O-methyl modified nucleotide
  modified_base 122: mod_base = OTHER; note = Nucleotide with phosphorothioate linkage
  modified_base 123: mod_base = OTHER; note = 2'-O-methyl modified nucleotide with phosphorothioate linkage
  modified_base 124: mod_base = OTHER; note = 2'-O-methyl modified nucleotide with phosphorothioate linkage
  modified_base 125: mod_base = OTHER; note = 2'-O-methyl modified nucleotide
gagaatcaaaatcggtgaatgttttagagctagaaatagcaagttaaaataaggctagtccgttatcaacttgaaaaagtggcaccgagtcggtgcgtctgcctatttagtgcaccgattttgat

SEQ ID NO: 16020 - RNA, 124 nt, synthetic construct
  source 1..124: mol_type = other RNA
  modified_base 1: mod_base = OTHER; note = 2'-O-methyl modified nucleotide with phosphorothioate linkage
  modified_base 2: mod_base = OTHER; note = 2'-O-methyl modified nucleotide with phosphorothioate linkage
  modified_base 3: mod_base = OTHER; note = 2'-O-methyl modified nucleotide with phosphorothioate linkage
  modified_base 29: mod_base = OTHER; note = 2'-O-methyl modified nucleotide
  modified_base 30: mod_base = OTHER; note = 2'-O-methyl modified nucleotide
  modified_base 31: mod_base = OTHER; note = 2'-O-methyl modified nucleotide
  modified_base 32: mod_base = OTHER; note = 2'-O-methyl modified nucleotide
  modified_base 33: mod_base = OTHER; note = 2'-O-methyl modified nucleotide
  modified_base 34: mod_base = OTHER; note = 2'-O-methyl modified nucleotide
  modified_base 35: mod_base = OTHER; note = 2'-O-methyl modified nucleotide
  modified_base 36: mod_base = OTHER; note = 2'-O-methyl modified nucleotide
  modified_base 37: mod_base = OTHER; note = 2'-O-methyl modified nucleotide
  modified_base 38: mod_base = OTHER; note = 2'-O-methyl modified nucleotide
  modified_base 39: mod_base = OTHER; note = 2'-O-methyl modified nucleotide
  modified_base 40: mod_base = OTHER; note = 2'-O-methyl modified nucleotide
  modified_base 69: mod_base = OTHER; note = 2'-O-methyl modified nucleotide
  modified_base 70: mod_base = OTHER; note = 2'-O-methyl modified nucleotide
  modified_base 71: mod_base = OTHER; note = 2'-O-methyl modified nucleotide
  modified_base 72: mod_base = OTHER; note = 2'-O-methyl modified nucleotide
  modified_base 73: mod_base = OTHER; note = 2'-O-methyl modified nucleotide
  modified_base 74: mod_base = OTHER; note = 2'-O-methyl modified nucleotide
  modified_base 75: mod_base = OTHER; note = 2'-O-methyl modified nucleotide
  modified_base 76: mod_base = OTHER; note = 2'-O-methyl modified nucleotide
  modified_base 77: mod_base = OTHER; note = 2'-O-methyl modified nucleotide
  modified_base 78: mod_base = OTHER; note = 2'-O-methyl modified nucleotide
  modified_base 79: mod_base = OTHER; note = 2'-O-methyl modified nucleotide
  modified_base 80: mod_base = OTHER; note = 2'-O-methyl modified nucleotide
  modified_base 81: mod_base = OTHER; note = 2'-O-methyl modified nucleotide
  modified_base 82: mod_base = OTHER; note = 2'-O-methyl modified nucleotide
  modified_base 83: mod_base = OTHER; note = 2'-O-methyl modified nucleotide
  modified_base 84: mod_base = OTHER; note = 2'-O-methyl modified nucleotide
  modified_base 85: mod_base = OTHER; note = 2'-O-methyl modified nucleotide
  modified_base 86: mod_base = OTHER; note = 2'-O-methyl modified nucleotide
  modified_base 87: mod_base = OTHER; note = 2'-O-methyl modified nucleotide
  modified_base 88: mod_base = OTHER; note = 2'-O-methyl modified nucleotide
  modified_base 89: mod_base = OTHER; note = 2'-O-methyl modified nucleotide
  modified_base 90: mod_base = OTHER; note = 2'-O-methyl modified nucleotide
  modified_base 91: mod_base = OTHER; note = 2'-O-methyl modified nucleotide
  modified_base 92: mod_base = OTHER; note = 2'-O-methyl modified nucleotide
  modified_base 93: mod_base = OTHER; note = 2'-O-methyl modified nucleotide
  modified_base 94: mod_base = OTHER; note = 2'-O-methyl modified nucleotide
  modified_base 95: mod_base = OTHER; note = 2'-O-methyl modified nucleotide
  modified_base 96: mod_base = OTHER; note = 2'-O-methyl modified nucleotide
  modified_base 121: mod_base = OTHER; note = Nucleotide with phosphorothioate linkage
  modified_base 122: mod_base = OTHER; note = 2'-O-methyl modified nucleotide with phosphorothioate linkage
  modified_base 123: mod_base = OTHER; note = 2'-O-methyl modified nucleotide with phosphorothioate linkage
  modified_base 124: mod_base = OTHER; note = 2'-O-methyl modified nucleotide
gagaatcaaaatcggtgaatgttttagagctagaaatagcaagttaaaataaggctagtccgttatcaacttgaaaaagtggcaccgagtcggtgcgtctgcctatttagtgcaccgattttga

SEQ ID NO: 16021 - RNA, 123 nt, synthetic construct
  source 1..123: mol_type = other RNA
  modified_base 1: mod_base = OTHER; note = 2'-O-methyl modified nucleotide with phosphorothioate linkage
  modified_base 2: mod_base = OTHER; note = 2'-O-methyl modified nucleotide with phosphorothioate linkage
  modified_base 3: mod_base = OTHER; note = 2'-O-methyl modified nucleotide with phosphorothioate linkage
  modified_base 29: mod_base = OTHER; note = 2'-O-methyl modified nucleotide
  modified_base 30: mod_base = OTHER; note = 2'-O-methyl modified nucleotide
  modified_base 31: mod_base = OTHER; note = 2'-O-methyl modified nucleotide
  modified_base 32: mod_base = OTHER; note = 2'-O-methyl modified nucleotide
  modified_base 33: mod_base = OTHER; note = 2'-O-methyl modified nucleotide
  modified_base 34: mod_base = OTHER; note = 2'-O-methyl modified nucleotide
  modified_base 35: mod_base = OTHER; note = 2'-O-methyl modified nucleotide
  modified_base 36: mod_base = OTHER; note = 2'-O-methyl modified nucleotide
  modified_base 37: mod_base = OTHER; note = 2'-O-methyl modified nucleotide
  modified_base 38: mod_base = OTHER; note = 2'-O-methyl modified nucleotide
  modified_base 39: mod_base = OTHER; note = 2'-O-methyl modified nucleotide
  modified_base 40: mod_base = OTHER; note = 2'-O-methyl modified nucleotide
  modified_base 69: mod_base = OTHER; note = 2'-O-methyl modified nucleotide
  modified_base 70: mod_base = OTHER; note = 2'-O-methyl modified nucleotide
  modified_base 71: mod_base = OTHER; note = 2'-O-methyl modified nucleotide
  modified_base 72: mod_base = OTHER; note = 2'-O-methyl modified nucleotide
  modified_base 73: mod_base = OTHER; note = 2'-O-methyl modified nucleotide
  modified_base 74: mod_base = OTHER; note = 2'-O-methyl modified nucleotide
  modified_base 75: mod_base = OTHER; note = 2'-O-methyl modified nucleotide
  modified_base 76: mod_base = OTHER; note = 2'-O-methyl modified nucleotide
  modified_base 77: mod_base = OTHER; note = 2'-O-methyl modified nucleotide
  modified_base 78: mod_base = OTHER; note = 2'-O-methyl modified nucleotide
  modified_base 79: mod_base = OTHER; note = 2'-O-methyl modified nucleotide
  modified_base 80: mod_base = OTHER; note = 2'-O-methyl modified nucleotide
  modified_base 81: mod_base = OTHER; note = 2'-O-methyl modified nucleotide
  modified_base 82: mod_base = OTHER; note = 2'-O-methyl modified nucleotide
  modified_base 83: mod_base = OTHER; note = 2'-O-methyl modified nucleotide
  modified_base 84: mod_base = OTHER; note = 2'-O-methyl modified nucleotide
  modified_base 85: mod_base = OTHER; note = 2'-O-methyl modified nucleotide
  modified_base 86: mod_base = OTHER; note = 2'-O-methyl modified nucleotide
  modified_base 87: mod_base = OTHER; note = 2'-O-methyl modified nucleotide
  modified_base 88: mod_base = OTHER; note = 2'-O-methyl modified nucleotide
  modified_base 89: mod_base = OTHER; note = 2'-O-methyl modified nucleotide
  modified_base 90: mod_base = OTHER; note = 2'-O-methyl modified nucleotide
  modified_base 91: mod_base = OTHER; note = 2'-O-methyl modified nucleotide
  modified_base 92: mod_base = OTHER; note = 2'-O-methyl modified nucleotide
  modified_base 93: mod_base = OTHER; note = 2'-O-methyl modified nucleotide
  modified_base 94: mod_base = OTHER; note = 2'-O-methyl modified nucleotide
  modified_base 95: mod_base = OTHER; note = 2'-O-methyl modified nucleotide
  modified_base 96: mod_base = OTHER; note = 2'-O-methyl modified nucleotide
  modified_base 120: mod_base = OTHER; note = Nucleotide with phosphorothioate linkage
  modified_base 121: mod_base = OTHER; note = 2'-O-methyl modified nucleotide with phosphorothioate linkage
  modified_base 122: mod_base = OTHER; note = 2'-O-methyl modified nucleotide with phosphorothioate linkage
  modified_base 123: mod_base = OTHER; note = 2'-O-methyl modified nucleotide
gagaatcaaaatcggtgaatgttttagagctagaaatagcaagttaaaataaggctagtccgttatcaacttgaaaaagtggcaccgagtcggtgcgtctgcctatttagtgcaccgattttg

SEQ ID NO: 16022 - RNA, 122 nt, synthetic construct
  source 1..122: mol_type = other RNA
  modified_base 1: mod_base = OTHER; note = 2'-O-methyl modified nucleotide with phosphorothioate linkage
  modified_base 2: mod_base = OTHER; note = 2'-O-methyl modified nucleotide with phosphorothioate linkage
  modified_base 3: mod_base = OTHER; note = 2'-O-methyl modified nucleotide with phosphorothioate linkage
  modified_base 29: mod_base = OTHER; note = 2'-O-methyl modified nucleotide
  modified_base 30: mod_base = OTHER; note = 2'-O-methyl modified nucleotide
  modified_base 31: mod_base = OTHER; note = 2'-O-methyl modified nucleotide
  modified_base 32: mod_base = OTHER; note = 2'-O-methyl modified nucleotide
  modified_base 33: mod_base = OTHER; note = 2'-O-methyl modified nucleotide
  modified_base 34: mod_base = OTHER; note = 2'-O-methyl modified nucleotide
  modified_base 35: mod_base = OTHER; note = 2'-O-methyl modified nucleotide
  modified_base 36: mod_base = OTHER; note = 2'-O-methyl modified nucleotide
  modified_base 37: mod_base = OTHER; note = 2'-O-methyl modified nucleotide
  modified_base 38: mod_base = OTHER; note = 2'-O-methyl modified nucleotide
  modified_base 39: mod_base = OTHER; note = 2'-O-methyl modified nucleotide
  modified_base 40: mod_base = OTHER; note = 2'-O-methyl modified nucleotide
  modified_base 69: mod_base = OTHER; note = 2'-O-methyl modified nucleotide
  modified_base 70: mod_base = OTHER; note = 2'-O-methyl modified nucleotide
  modified_base 71: mod_base = OTHER; note = 2'-O-methyl modified nucleotide
  modified_base 72: mod_base = OTHER; note = 2'-O-methyl modified nucleotide
  modified_base 73: mod_base = OTHER; note = 2'-O-methyl modified nucleotide
  modified_base 74: mod_base = OTHER; note = 2'-O-methyl modified nucleotide
  modified_base 75: mod_base = OTHER; note = 2'-O-methyl modified nucleotide
  modified_base 76: mod_base = OTHER; note = 2'-O-methyl modified nucleotide
  modified_base 77: mod_base = OTHER; note = 2'-O-methyl modified nucleotide
  modified_base 78: mod_base = OTHER; note = 2'-O-methyl modified nucleotide
  modified_base 79: mod_base = OTHER; note = 2'-O-methyl modified nucleotide
  modified_base 80: mod_base = OTHER; note = 2'-O-methyl modified nucleotide
  modified_base 81: mod_base = OTHER; note = 2'-O-methyl modified nucleotide
  modified_base 82: mod_base = OTHER; note = 2'-O-methyl modified nucleotide
  modified_base 83: mod_base = OTHER; note = 2'-O-methyl modified nucleotide
  modified_base 84: mod_base = OTHER; note = 2'-O-methyl modified nucleotide
  modified_base 85: mod_base = OTHER; note = 2'-O-methyl modified nucleotide
  modified_base 86: mod_base = OTHER; note = 2'-O-methyl modified nucleotide
  modified_base 87: mod_base = OTHER; note = 2'-O-methyl modified nucleotide
  modified_base 88: mod_base = OTHER; note = 2'-O-methyl modified nucleotide
  modified_base 89: mod_base = OTHER; note = 2'-O-methyl modified nucleotide
  modified_base 90: mod_base = OTHER; note = 2'-O-methyl modified nucleotide
  modified_base 91: mod_base = OTHER; note = 2'-O-methyl modified nucleotide
  modified_base 92: mod_base = OTHER; note = 2'-O-methyl modified nucleotide
  modified_base 93: mod_base = OTHER; note = 2'-O-methyl modified nucleotide
  modified_base 94: mod_base = OTHER; note = 2'-O-methyl modified nucleotide
  modified_base 95: mod_base = OTHER; note = 2'-O-methyl modified nucleotide
  modified_base 96: mod_base = OTHER; note = 2'-O-methyl modified nucleotide
  modified_base 119: mod_base = OTHER; note = Nucleotide with phosphorothioate linkage
  modified_base 120: mod_base = OTHER; note = 2'-O-methyl modified nucleotide with phosphorothioate linkage
  modified_base 121: mod_base = OTHER; note = 2'-O-methyl modified nucleotide with phosphorothioate linkage
  modified_base 122: mod_base = OTHER; note = 2'-O-methyl modified nucleotide
gagaatcaaaatcggtgaatgttttagagctagaaatagcaagttaaaataaggctagtccgttatcaacttgaaaaagtggcaccgagtcggtgcgtctgcctatttagtgcaccgatttt

SEQ ID NO: 16023 - RNA, 121 nt, synthetic construct
  source 1..121: mol_type = other RNA
  modified_base 1: mod_base = OTHER; note = 2'-O-methyl modified nucleotide with phosphorothioate linkage
  modified_base 2: mod_base = OTHER; note = 2'-O-methyl modified nucleotide with phosphorothioate linkage
  modified_base 3: mod_base = OTHER; note = 2'-O-methyl modified nucleotide with phosphorothioate linkage
  modified_base 29: mod_base = OTHER; note = 2'-O-methyl modified nucleotide
  modified_base 30: mod_base = OTHER; note = 2'-O-methyl modified nucleotide
  modified_base 31: mod_base = OTHER; note = 2'-O-methyl modified nucleotide
  modified_base 32: mod_base = OTHER; note = 2'-O-methyl modified nucleotide
  modified_base 33: mod_base = OTHER; note = 2'-O-methyl modified nucleotide
  modified_base 34: mod_base = OTHER; note = 2'-O-methyl modified nucleotide
  modified_base 35: mod_base = OTHER; note = 2'-O-methyl modified nucleotide
  modified_base 36: mod_base = OTHER; note = 2'-O-methyl modified nucleotide
  modified_base 37: mod_base = OTHER; note = 2'-O-methyl modified nucleotide
  modified_base 38: mod_base = OTHER; note = 2'-O-methyl modified nucleotide
  modified_base 39: mod_base = OTHER; note = 2'-O-methyl modified nucleotide
  modified_base 40: mod_base = OTHER; note = 2'-O-methyl modified nucleotide
  modified_base 69: mod_base = OTHER; note = 2'-O-methyl modified nucleotide
  modified_base 70: mod_base = OTHER; note = 2'-O-methyl modified nucleotide
  modified_base 71: mod_base = OTHER; note = 2'-O-methyl modified nucleotide
  modified_base 72: mod_base = OTHER; note = 2'-O-methyl modified nucleotide
  modified_base 73: mod_base = OTHER; note = 2'-O-methyl modified nucleotide
  modified_base 74: mod_base = OTHER; note = 2'-O-methyl modified nucleotide
  modified_base 75: mod_base = OTHER; note = 2'-O-methyl modified nucleotide
  modified_base 76: mod_base = OTHER; note = 2'-O-methyl modified nucleotide
  modified_base 77: mod_base = OTHER; note = 2'-O-methyl modified nucleotide
  modified_base 78: mod_base = OTHER; note = 2'-O-methyl modified nucleotide
  modified_base 79: mod_base = OTHER; note = 2'-O-methyl modified nucleotide
  modified_base 80: mod_base = OTHER; note = 2'-O-methyl modified nucleotide
  modified_base 81: mod_base = OTHER; note = 2'-O-methyl modified nucleotide
  modified_base 82: mod_base = OTHER; note = 2'-O-methyl modified nucleotide
  modified_base 83: mod_base = OTHER; note = 2'-O-methyl modified nucleotide
  modified_base 84: mod_base = OTHER; note = 2'-O-methyl modified nucleotide
  modified_base 85: mod_base = OTHER; note = 2'-O-methyl modified nucleotide
  modified_base 86: mod_base = OTHER; note = 2'-O-methyl modified nucleotide
  modified_base 87: mod_base = OTHER; note = 2'-O-methyl modified nucleotide
  modified_base 88: mod_base = OTHER; note = 2'-O-methyl modified nucleotide
  modified_base 89: mod_base = OTHER; note = 2'-O-methyl modified nucleotide
  modified_base 90: mod_base = OTHER; note = 2'-O-methyl modified nucleotide
  modified_base 91: mod_base = OTHER; note = 2'-O-methyl modified nucleotide
  modified_base 92: mod_base = OTHER; note = 2'-O-methyl modified nucleotide
  modified_base 93: mod_base = OTHER; note = 2'-O-methyl modified nucleotide
  modified_base 94: mod_base = OTHER; note = 2'-O-methyl modified nucleotide
  modified_base 95: mod_base = OTHER; note = 2'-O-methyl modified nucleotide
  modified_base 96: mod_base = OTHER; note = 2'-O-methyl modified nucleotide
  modified_base 118: mod_base = OTHER; note = Nucleotide with phosphorothioate linkage
  modified_base 119: mod_base = OTHER; note = 2'-O-methyl modified nucleotide with phosphorothioate linkage
  modified_base 120: mod_base = OTHER; note = 2'-O-methyl modified nucleotide with phosphorothioate linkage
  modified_base 121: mod_base = OTHER; note = 2'-O-methyl modified nucleotide
gagaatcaaaatcggtgaatgttttagagctagaaatagcaagttaaaataaggctagtccgttatcaacttgaaaaagtggcaccgagtcggtgcgtctgcctatttagtgcaccgattt

SEQ ID NO: 16024 - RNA, 120 nt, synthetic construct
  source 1..120: mol_type = other RNA
  modified_base 1: mod_base = OTHER; note = 2'-O-methyl modified nucleotide with phosphorothioate linkage
  modified_base 2: mod_base = OTHER; note = 2'-O-methyl modified nucleotide with phosphorothioate linkage
  modified_base 3: mod_base = OTHER; note = 2'-O-methyl modified nucleotide with phosphorothioate linkage
  modified_base 29: mod_base = OTHER; note = 2'-O-methyl modified nucleotide
  modified_base 30: mod_base = OTHER; note = 2'-O-methyl modified nucleotide
  modified_base 31: mod_base = OTHER; note = 2'-O-methyl modified nucleotide
  modified_base 32: mod_base = OTHER; note = 2'-O-methyl modified nucleotide
  modified_base 33: mod_base = OTHER; note = 2'-O-methyl modified nucleotide
  modified_base 34: mod_base = OTHER; note = 2'-O-methyl modified nucleotide
  modified_base 35: mod_base = OTHER; note = 2'-O-methyl modified nucleotide
  modified_base 36: mod_base = OTHER; note = 2'-O-methyl modified nucleotide
  modified_base 37: mod_base = OTHER; note = 2'-O-methyl modified nucleotide
  modified_base 38: mod_base = OTHER; note = 2'-O-methyl modified nucleotide
  modified_base 39: mod_base = OTHER; note = 2'-O-methyl modified nucleotide
  modified_base 40: mod_base = OTHER; note = 2'-O-methyl modified nucleotide
  modified_base 69: mod_base = OTHER; note = 2'-O-methyl modified nucleotide
  modified_base 70: mod_base = OTHER; note = 2'-O-methyl modified nucleotide
  modified_base 71: mod_base = OTHER; note = 2'-O-methyl modified nucleotide
  modified_base 72: mod_base = OTHER; note = 2'-O-methyl modified nucleotide
  modified_base 73: mod_base = OTHER; note = 2'-O-methyl modified nucleotide
  modified_base 74: mod_base = OTHER; note = 2'-O-methyl modified nucleotide
  modified_base 75: mod_base = OTHER; note = 2'-O-methyl modified nucleotide
  modified_base 76: mod_base = OTHER; note = 2'-O-methyl modified nucleotide
  modified_base 77: mod_base = OTHER; note = 2'-O-methyl modified nucleotide
  modified_base 78: mod_base = OTHER; note = 2'-O-methyl modified nucleotide
  modified_base 79: mod_base = OTHER; note = 2'-O-methyl modified nucleotide
  modified_base 80: mod_base = OTHER; note = 2'-O-methyl modified nucleotide
  modified_base 81: mod_base = OTHER; note = 2'-O-methyl modified nucleotide
  modified_base 82: mod_base = OTHER; note = 2'-O-methyl modified nucleotide
  modified_base 83: mod_base = OTHER; note = 2'-O-methyl modified nucleotide
  modified_base 84: mod_base = OTHER; note = 2'-O-methyl modified nucleotide
  modified_base 85: mod_base = OTHER; note = 2'-O-methyl modified nucleotide
  modified_base 86: mod_base = OTHER; note = 2'-O-methyl modified nucleotide
  modified_base 87: mod_base = OTHER; note = 2'-O-methyl modified nucleotide
  modified_base 88: mod_base = OTHER; note = 2'-O-methyl modified nucleotide
  modified_base 89: mod_base = OTHER; note = 2'-O-methyl modified nucleotide
  modified_base 90: mod_base = OTHER; note = 2'-O-methyl modified nucleotide
  modified_base 91: mod_base = OTHER; note = 2'-O-methyl modified nucleotide
  modified_base 92: mod_base = OTHER; note = 2'-O-methyl modified nucleotide
  modified_base 93: mod_base = OTHER; note = 2'-O-methyl modified nucleotide
  modified_base 94: mod_base = OTHER; note = 2'-O-methyl modified nucleotide
  modified_base 95: mod_base = OTHER; note = 2'-O-methyl modified nucleotide
  modified_base 96: mod_base = OTHER; note = 2'-O-methyl modified nucleotide
  modified_base 117: mod_base = OTHER; note = Nucleotide with phosphorothioate linkage
  modified_base 118: mod_base = OTHER; note = 2'-O-methyl modified nucleotide with phosphorothioate linkage
  modified_base 119: mod_base = OTHER; note = 2'-O-methyl modified nucleotide with phosphorothioate linkage
  modified_base 120: mod_base = OTHER; note = 2'-O-methyl modified nucleotide
gagaatcaaaatcggtgaatgttttagagctagaaatagcaagttaaaataaggctagtccgttatcaacttgaaaaagtggcaccgagtcggtgcgtctgcctatttagtgcaccgatt

SEQ ID NO: 16025 - RNA, 127 nt, synthetic construct
  source 1..127: mol_type = other RNA
  modified_base 1: mod_base = OTHER; note = 2'-O-methyl modified nucleotide with phosphorothioate linkage
  modified_base 2: mod_base = OTHER; note = 2'-O-methyl modified nucleotide with phosphorothioate linkage
  modified_base 3: mod_base = OTHER; note = 2'-O-methyl modified nucleotide with phosphorothioate linkage
  modified_base 29: mod_base = OTHER; note = 2'-O-methyl modified nucleotide
  modified_base 30: mod_base = OTHER; note = 2'-O-methyl modified nucleotide
  modified_base 31: mod_base = OTHER; note = 2'-O-methyl modified nucleotide
  modified_base 32: mod_base = OTHER; note = 2'-O-methyl modified nucleotide
  modified_base 33: mod_base = OTHER; note = 2'-O-methyl modified nucleotide
  modified_base 34: mod_base = OTHER; note = 2'-O-methyl modified nucleotide
  modified_base 35: mod_base = OTHER; note = 2'-O-methyl modified nucleotide
  modified_base 36: mod_base = OTHER; note = 2'-O-methyl modified nucleotide
  modified_base 37: mod_base = OTHER; note = 2'-O-methyl modified nucleotide
  modified_base 38: mod_base = OTHER; note = 2'-O-methyl modified nucleotide
  modified_base 39: mod_base = OTHER; note = 2'-O-methyl modified nucleotide
  modified_base 40: mod_base = OTHER; note = 2'-O-methyl modified nucleotide
  modified_base 69: mod_base = OTHER; note = 2'-O-methyl modified nucleotide
  modified_base 70: mod_base = OTHER; note = 2'-O-methyl modified nucleotide
  modified_base 71: mod_base = OTHER; note = 2'-O-methyl modified nucleotide
  modified_base 72: mod_base = OTHER; note = 2'-O-methyl modified nucleotide
  modified_base 73: mod_base = OTHER; note = 2'-O-methyl modified nucleotide
  modified_base 74: mod_base = OTHER; note = 2'-O-methyl modified nucleotide
  modified_base 75: mod_base = OTHER; note = 2'-O-methyl modified nucleotide
  modified_base 76: mod_base = OTHER; note = 2'-O-methyl modified nucleotide
  modified_base 77: mod_base = OTHER; note = 2'-O-methyl modified nucleotide
  modified_base 78: mod_base = OTHER; note = 2'-O-methyl modified nucleotide
  modified_base 79: mod_base = OTHER; note = 2'-O-methyl modified nucleotide
  modified_base 80: mod_base = OTHER; note = 2'-O-methyl modified nucleotide
  modified_base 81: mod_base = OTHER; note = 2'-O-methyl modified nucleotide
  modified_base 82: mod_base = OTHER; note = 2'-O-methyl modified nucleotide
  modified_base 83: mod_base = OTHER; note = 2'-O-methyl modified nucleotide
  modified_base 84: mod_base = OTHER; note = 2'-O-methyl modified nucleotide
  modified_base 85: mod_base = OTHER; note = 2'-O-methyl modified nucleotide
  modified_base 86: mod_base = OTHER; note = 2'-O-methyl modified nucleotide
  modified_base 87: mod_base = OTHER; note = 2'-O-methyl modified nucleotide
  modified_base 88: mod_base = OTHER; note = 2'-O-methyl modified nucleotide
  modified_base 89: mod_base = OTHER; note = 2'-O-methyl modified nucleotide
  modified_base 90: mod_base = OTHER; note = 2'-O-methyl modified nucleotide
  modified_base 91: mod_base = OTHER; note = 2'-O-methyl modified nucleotide
  modified_base 92: mod_base = OTHER; note = 2'-O-methyl modified nucleotide
  modified_base 93: mod_base = OTHER; note = 2'-O-methyl modified nucleotide
  modified_base 94: mod_base = OTHER; note = 2'-O-methyl modified nucleotide
  modified_base 95: mod_base = OTHER; note = 2'-O-methyl modified nucleotide
  modified_base 96: mod_base = OTHER; note = 2'-O-methyl modified nucleotide
  modified_base 124: mod_base = OTHER; note = Nucleotide with phosphorothioate linkage
  modified_base 125: mod_base = OTHER; note = 2'-O-methyl modified nucleotide with phosphorothioate linkage
  modified_base 126: mod_base = OTHER; note = 2'-O-methyl modified nucleotide with phosphorothioate linkage
  modified_base 127: mod_base = OTHER; note = 2'-O-methyl modified nucleotide
gagaatcaaaatcggtgaatgttttagagctagaaatagcaagttaaaataaggctagtccgttatcaacttgaaaaagtggcaccgagtcggtgcctgtctgcctatttagtgcaccgattttgat

SEQ ID NO: 16026 - RNA, 126 nt, synthetic construct
  source 1..126: mol_type = other RNA
  modified_base 1: mod_base = OTHER; note = 2'-O-methyl modified nucleotide with phosphorothioate linkage
  modified_base 2: mod_base = OTHER; note = 2'-O-methyl modified nucleotide with phosphorothioate linkage
  modified_base 3: mod_base = OTHER; note = 2'-O-methyl modified nucleotide with phosphorothioate linkage
  modified_base 29: mod_base = OTHER; note = 2'-O-methyl modified nucleotide
  modified_base 30: mod_base = OTHER; note = 2'-O-methyl modified nucleotide
  modified_base 31: mod_base = OTHER; note = 2'-O-methyl modified nucleotide
  modified_base 32: mod_base = OTHER; note = 2'-O-methyl modified nucleotide
  modified_base 33: mod_base = OTHER; note = 2'-O-methyl modified nucleotide
  modified_base 34: mod_base = OTHER; note = 2'-O-methyl modified nucleotide
  modified_base 35: mod_base = OTHER; note = 2'-O-methyl modified nucleotide
  modified_base 36: mod_base = OTHER; note = 2'-O-methyl modified nucleotide
  modified_base 37: mod_base = OTHER; note = 2'-O-methyl modified nucleotide
  modified_base 38: mod_base = OTHER; note = 2'-O-methyl modified nucleotide
  modified_base 39: mod_base = OTHER; note = 2'-O-methyl modified nucleotide
  modified_base 40: mod_base = OTHER; note = 2'-O-methyl modified nucleotide
  modified_base 69: mod_base = OTHER; note = 2'-O-methyl modified nucleotide
  modified_base 70: mod_base = OTHER; note = 2'-O-methyl modified nucleotide
  modified_base 71: mod_base = OTHER; note = 2'-O-methyl modified nucleotide
  modified_base 72: mod_base = OTHER; note = 2'-O-methyl modified nucleotide
  modified_base 73: mod_base = OTHER; note = 2'-O-methyl modified nucleotide
  modified_base 74: mod_base = OTHER; note = 2'-O-methyl modified nucleotide
  modified_base 75: mod_base = OTHER; note = 2'-O-methyl modified nucleotide
  modified_base 76: mod_base = OTHER; note = 2'-O-methyl modified nucleotide
  modified_base 77: mod_base = OTHER; note = 2'-O-methyl modified nucleotide
  modified_base 78: mod_base = OTHER; note = 2'-O-methyl modified nucleotide
  modified_base 79: mod_base = OTHER; note = 2'-O-methyl modified nucleotide
  modified_base 80: mod_base = OTHER; note = 2'-O-methyl modified nucleotide
  modified_base 81: mod_base = OTHER; note = 2'-O-methyl modified nucleotide
  modified_base 82: mod_base = OTHER; note = 2'-O-methyl modified nucleotide
  modified_base 83: mod_base = OTHER; note = 2'-O-methyl modified nucleotide
  modified_base 84: mod_base = OTHER; note = 2'-O-methyl modified nucleotide
  modified_base 85: mod_base = OTHER; note = 2'-O-methyl modified nucleotide
  modified_base 86: mod_base = OTHER; note = 2'-O-methyl modified nucleotide
  modified_base 87: mod_base = OTHER; note = 2'-O-methyl modified nucleotide
  modified_base 88: mod_base = OTHER; note = 2'-O-methyl modified nucleotide
  modified_base 89: mod_base = OTHER; note = 2'-O-methyl modified nucleotide
  modified_base 90: mod_base = OTHER; note = 2'-O-methyl modified nucleotide
  modified_base 91: mod_base = OTHER; note = 2'-O-methyl modified nucleotide
  modified_base 92: mod_base = OTHER; note = 2'-O-methyl modified nucleotide
  modified_base 93: mod_base = OTHER; note = 2'-O-methyl modified nucleotide
  modified_base 94: mod_base = OTHER; note = 2'-O-methyl modified nucleotide
  modified_base 95: mod_base = OTHER; note = 2'-O-methyl modified nucleotide
  modified_base 96: mod_base = OTHER; note = 2'-O-methyl modified nucleotide
  modified_base 123: mod_base = OTHER; note = Nucleotide with phosphorothioate linkage
  modified_base 124: mod_base = OTHER; note = 2'-O-methyl modified nucleotide with phosphorothioate linkage
  modified_base 125: mod_base = OTHER; note = 2'-O-methyl modified nucleotide with phosphorothioate linkage
  modified_base 126: mod_base = OTHER; note = 2'-O-methyl modified nucleotide
gagaatcaaaatcggtgaatgttttagagctagaaatagcaagttaaaataaggctagtccgttatcaacttgaaaaagtggcaccgagtcggtgcctgtctgcctatttagtgcaccgattttga

SEQ ID NO: 16027 - RNA, 125 nt, synthetic construct
  source 1..125: mol_type = other RNA
  modified_base 1: mod_base = OTHER; note = 2'-O-methyl modified nucleotide with phosphorothioate linkage
  modified_base 2: mod_base = OTHER; note = 2'-O-methyl modified nucleotide with phosphorothioate linkage
  modified_base 3: mod_base = OTHER; note = 2'-O-methyl modified nucleotide with phosphorothioate linkage
  modified_base 29: mod_base = OTHER; note = 2'-O-methyl modified nucleotide
  modified_base 30: mod_base = OTHER; note = 2'-O-methyl modified nucleotide
  modified_base 31: mod_base = OTHER; note = 2'-O-methyl modified nucleotide
  modified_base 32: mod_base = OTHER; note = 2'-O-methyl modified nucleotide
  modified_base 33: mod_base = OTHER; note = 2'-O-methyl modified nucleotide
  modified_base 34: mod_base = OTHER; note = 2'-O-methyl modified nucleotide
  modified_base 35: mod_base = OTHER; note = 2'-O-methyl modified nucleotide
  modified_base 36: mod_base = OTHER; note = 2'-O-methyl modified nucleotide
  modified_base 37: mod_base = OTHER; note = 2'-O-methyl modified nucleotide
  modified_base 38: mod_base = OTHER; note = 2'-O-methyl modified nucleotide
  modified_base 39: mod_base = OTHER; note = 2'-O-methyl modified nucleotide
  modified_base 40: mod_base = OTHER; note = 2'-O-methyl modified nucleotide
  modified_base 69: mod_base = OTHER; note = 2'-O-methyl modified nucleotide
  modified_base 70: mod_base = OTHER; note = 2'-O-methyl modified nucleotide
  modified_base 71: mod_base = OTHER; note = 2'-O-methyl modified nucleotide
  modified_base 72: mod_base = OTHER; note = 2'-O-methyl modified nucleotide
  modified_base 73: mod_base = OTHER; note = 2'-O-methyl modified nucleotide
  modified_base 74: mod_base = OTHER; note = 2'-O-methyl modified nucleotide
  modified_base 75: mod_base = OTHER; note = 2'-O-methyl modified nucleotide
  modified_base 76: mod_base = OTHER; note = 2'-O-methyl modified nucleotide
  modified_base 77: mod_base = OTHER; note = 2'-O-methyl modified nucleotide
  modified_base 78: mod_base = OTHER; note = 2'-O-methyl modified nucleotide
  modified_base 79: mod_base = OTHER; note = 2'-O-methyl modified nucleotide
  modified_base 80: mod_base = OTHER; note = 2'-O-methyl modified nucleotide
  modified_base 81: mod_base = OTHER; note = 2'-O-methyl modified nucleotide
  modified_base 82: mod_base = OTHER; note = 2'-O-methyl modified nucleotide
  modified_base 83: mod_base = OTHER; note = 2'-O-methyl modified nucleotide
  modified_base 84: mod_base = OTHER; note = 2'-O-methyl modified nucleotide
  modified_base 85: mod_base = OTHER; note = 2'-O-methyl modified nucleotide
  modified_base 86: mod_base = OTHER; note = 2'-O-methyl modified nucleotide
  modified_base 87: mod_base = OTHER; note = 2'-O-methyl modified nucleotide
  modified_base 88: mod_base = OTHER; note = 2'-O-methyl modified nucleotide
  modified_base 89: mod_base = OTHER; note = 2'-O-methyl modified nucleotide
  modified_base 90: mod_base = OTHER; note = 2'-O-methyl modified nucleotide
  modified_base 91: mod_base = OTHER; note = 2'-O-methyl modified nucleotide
  modified_base 92: mod_base = OTHER; note = 2'-O-methyl modified nucleotide
  modified_base 93: mod_base = OTHER; note = 2'-O-methyl modified nucleotide
  modified_base 94: mod_base = OTHER; note = 2'-O-methyl modified nucleotide
  modified_base 95: mod_base = OTHER; note = 2'-O-methyl modified nucleotide
  modified_base 96: mod_base = OTHER; note = 2'-O-methyl modified nucleotide
  modified_base 122: mod_base = OTHER; note = Nucleotide with phosphorothioate linkage
  modified_base 123: mod_base = OTHER; note = 2'-O-methyl modified nucleotide with phosphorothioate linkage
  modified_base 124: mod_base = OTHER; note = 2'-O-methyl modified nucleotide with phosphorothioate linkage
  modified_base 125: mod_base = OTHER; note = 2'-O-methyl modified nucleotide
gagaatcaaaatcggtgaatgttttagagctagaaatagcaagttaaaataaggctagtccgttatcaacttgaaaaagtggcaccgagtcggtgcctgtctgcctatttagtgcaccgattttg

SEQ ID NO: 16028 - RNA, 124 nt, synthetic construct
  source 1..124: mol_type = other RNA
  modified_base 1: mod_base = OTHER; note = 2'-O-methyl modified nucleotide with phosphorothioate linkage
  modified_base 2: mod_base = OTHER; note = 2'-O-methyl modified nucleotide with phosphorothioate linkage
  modified_base 3: mod_base = OTHER; note = 2'-O-methyl modified nucleotide with phosphorothioate linkage
  modified_base 29: mod_base = OTHER; note = 2'-O-methyl modified nucleotide
  modified_base 30: mod_base = OTHER; note = 2'-O-methyl modified nucleotide
  modified_base 31: mod_base = OTHER; note = 2'-O-methyl modified nucleotide
  modified_base 32: mod_base = OTHER; note = 2'-O-methyl modified nucleotide
  modified_base 33: mod_base = OTHER; note = 2'-O-methyl modified nucleotide
  modified_base 34: mod_base = OTHER; note = 2'-O-methyl modified nucleotide
  modified_base 35: mod_base = OTHER; note = 2'-O-methyl modified nucleotide
  modified_base 36: mod_base = OTHER; note = 2'-O-methyl modified nucleotide
  modified_base 37: mod_base = OTHER; note = 2'-O-methyl modified nucleotide
  modified_base 38: mod_base = OTHER; note = 2'-O-methyl modified nucleotide
  modified_base 39: mod_base = OTHER; note = 2'-O-methyl modified nucleotide
  modified_base 40: mod_base = OTHER; note = 2'-O-methyl modified nucleotide
  modified_base 69: mod_base = OTHER; note = 2'-O-methyl modified nucleotide
  modified_base 70: mod_base = OTHER; note = 2'-O-methyl modified nucleotide
  modified_base 71: mod_base = OTHER; note = 2'-O-methyl modified nucleotide
  modified_base 72: mod_base = OTHER; note = 2'-O-methyl modified nucleotide
  modified_base 73: mod_base = OTHER; note = 2'-O-methyl modified nucleotide
  modified_base 74: mod_base = OTHER; note = 2'-O-methyl modified nucleotide
  modified_base 75: mod_base = OTHER; note = 2'-O-methyl modified nucleotide
  modified_base 76: mod_base = OTHER; note = 2'-O-methyl modified nucleotide
  modified_base 77: mod_base = OTHER; note = 2'-O-methyl modified nucleotide
  modified_base 78: mod_base = OTHER; note = 2'-O-methyl modified nucleotide
  modified_base 79: mod_base = OTHER; note = 2'-O-methyl modified nucleotide
  modified_base 80: mod_base = OTHER; note = 2'-O-methyl modified nucleotide
  modified_base 81: mod_base = OTHER; note = 2'-O-methyl modified nucleotide
  modified_base 82: mod_base = OTHER; note = 2'-O-methyl modified nucleotide
  modified_base 83: mod_base = OTHER; note = 2'-O-methyl modified nucleotide
  modified_base 84: mod_base = OTHER; note = 2'-O-methyl modified nucleotide
  modified_base 85: mod_base = OTHER; note = 2'-O-methyl modified nucleotide
  modified_base 86: mod_base = OTHER; note = 2'-O-methyl modified nucleotide
  modified_base 87: mod_base = OTHER; note = 2'-O-methyl modified nucleotide
  modified_base 88: mod_base = OTHER; note = 2'-O-methyl modified nucleotide
  modified_base 89: mod_base = OTHER; note = 2'-O-methyl modified nucleotide
  modified_base 90: mod_base = OTHER; note = 2'-O-methyl modified nucleotide
  modified_base 91: mod_base = OTHER; note = 2'-O-methyl modified nucleotide
  modified_base 92: mod_base = OTHER; note = 2'-O-methyl modified nucleotide
  modified_base 93: mod_base = OTHER; note = 2'-O-methyl modified nucleotide
  modified_base 94: mod_base = OTHER; note = 2'-O-methyl modified nucleotide
  modified_base 95: mod_base = OTHER; note = 2'-O-methyl modified nucleotide
  modified_base 96: mod_base = OTHER; note = 2'-O-methyl modified nucleotide
  modified_base 121: mod_base = OTHER; note = Nucleotide with phosphorothioate linkage
  modified_base 122: mod_base = OTHER; note = 2'-O-methyl modified nucleotide with phosphorothioate linkage
  modified_base 123: mod_base = OTHER; note = 2'-O-methyl modified nucleotide with phosphorothioate linkage
  modified_base 124: mod_base = OTHER; note = 2'-O-methyl modified nucleotide
gagaatcaaaatcggtgaatgttttagagctagaaatagcaagttaaaataaggctagtccgttatcaacttgaaaaagtggcaccgagtcggtgcctgtctgcctatttagtgcaccgatttt

SEQ ID NO: 16029 - RNA, 123 nt, synthetic construct; identical to SEQ ID NO: 15004
  source 1..123: mol_type = other RNA
  modified_base 1: mod_base = OTHER; note = 2'-O-methyl modified nucleotide with phosphorothioate linkage
  modified_base 2: mod_base = OTHER; note = 2'-O-methyl modified nucleotide with phosphorothioate linkage
  modified_base 3: mod_base = OTHER; note = 2'-O-methyl modified nucleotide with phosphorothioate linkage
  modified_base 29: mod_base = OTHER; note = 2'-O-methyl modified nucleotide
  modified_base 30: mod_base = OTHER; note = 2'-O-methyl modified nucleotide
  modified_base 31: mod_base = OTHER; note = 2'-O-methyl modified nucleotide
  modified_base 32: mod_base = OTHER; note = 2'-O-methyl modified nucleotide
  modified_base 33: mod_base = OTHER; note = 2'-O-methyl modified nucleotide
  modified_base 34: mod_base = OTHER; note = 2'-O-methyl modified nucleotide
  modified_base 35: mod_base = OTHER; note = 2'-O-methyl modified nucleotide
  modified_base 36: mod_base = OTHER; note = 2'-O-methyl modified nucleotide
  modified_base 37: mod_base = OTHER; note = 2'-O-methyl modified nucleotide
  modified_base 38: mod_base = OTHER; note = 2'-O-methyl modified nucleotide
  modified_base 39: mod_base = OTHER; note = 2'-O-methyl modified nucleotide
  modified_base 40: mod_base = OTHER; note = 2'-O-methyl modified nucleotide
  modified_base 69: mod_base = OTHER; note = 2'-O-methyl modified nucleotide
  modified_base 70: mod_base = OTHER; note = 2'-O-methyl modified nucleotide
  modified_base 71: mod_base = OTHER; note = 2'-O-methyl modified nucleotide
  modified_base 72: mod_base = OTHER; note = 2'-O-methyl modified nucleotide
  modified_base 73: mod_base = OTHER; note = 2'-O-methyl modified nucleotide
  modified_base 74: mod_base = OTHER; note = 2'-O-methyl modified nucleotide
  modified_base 75: mod_base = OTHER; note = 2'-O-methyl modified nucleotide
  modified_base 76: mod_base = OTHER; note = 2'-O-methyl modified nucleotide
  modified_base 77: mod_base = OTHER; note = 2'-O-methyl modified nucleotide
  modified_base 78: mod_base = OTHER; note = 2'-O-methyl modified nucleotide
  modified_base 79: mod_base = OTHER; note = 2'-O-methyl modified nucleotide
  modified_base 80: mod_base = OTHER; note = 2'-O-methyl modified nucleotide
  modified_base 81: mod_base = OTHER; note = 2'-O-methyl modified nucleotide
  modified_base 82: mod_base = OTHER; note = 2'-O-methyl modified nucleotide
  modified_base 83: mod_base = OTHER; note = 2'-O-methyl modified nucleotide
  modified_base 84: mod_base = OTHER; note = 2'-O-methyl modified nucleotide
  modified_base 85: mod_base = OTHER; note = 2'-O-methyl modified nucleotide
  modified_base 86: mod_base = OTHER; note = 2'-O-methyl modified nucleotide
  modified_base 87: mod_base = OTHER; note = 2'-O-methyl modified nucleotide
  modified_base 88: mod_base = OTHER; note = 2'-O-methyl modified nucleotide
  modified_base 89: mod_base = OTHER; note = 2'-O-methyl modified nucleotide
  modified_base 90: mod_base = OTHER; note = 2'-O-methyl modified nucleotide
  modified_base 91: mod_base = OTHER; note = 2'-O-methyl modified nucleotide
  modified_base 92: mod_base = OTHER; note = 2'-O-methyl modified nucleotide
  modified_base 93: mod_base = OTHER; note = 2'-O-methyl modified nucleotide
  modified_base 94: mod_base = OTHER; note = 2'-O-methyl modified nucleotide
  modified_base 95: mod_base = OTHER; note = 2'-O-methyl modified nucleotide
  modified_base 96: mod_base = OTHER; note = 2'-O-methyl modified nucleotide
  modified_base 120: mod_base = OTHER; note = Nucleotide with phosphorothioate linkage
  modified_base 121: mod_base = OTHER; note = 2'-O-methyl modified nucleotide with phosphorothioate linkage
  modified_base 122: mod_base = OTHER; note = 2'-O-methyl modified nucleotide with phosphorothioate linkage
  modified_base 123: mod_base = OTHER; note = 2'-O-methyl modified nucleotide

SEQ ID NO: 16030 - RNA, 122 nt, synthetic construct
  source 1..122: mol_type = other RNA
  modified_base 1: mod_base = OTHER; note = 2'-O-methyl modified nucleotide with phosphorothioate linkage
  modified_base 2: mod_base = OTHER; note = 2'-O-methyl modified nucleotide with phosphorothioate linkage
  modified_base 3: mod_base = OTHER; note = 2'-O-methyl modified nucleotide with phosphorothioate linkage
  modified_base 29: mod_base = OTHER; note = 2'-O-methyl modified nucleotide
  modified_base 30: mod_base = OTHER; note = 2'-O-methyl modified nucleotide
  modified_base 31: mod_base = OTHER; note = 2'-O-methyl modified nucleotide
  modified_base 32: mod_base = OTHER; note = 2'-O-methyl modified nucleotide
  modified_base 33: mod_base = OTHER; note = 2'-O-methyl modified nucleotide
  modified_base 34: mod_base = OTHER; note = 2'-O-methyl modified nucleotide
  modified_base 35: mod_base = OTHER; note = 2'-O-methyl modified nucleotide
  modified_base 36: mod_base = OTHER; note = 2'-O-methyl modified nucleotide
  modified_base 37: mod_base = OTHER; note = 2'-O-methyl modified nucleotide
  modified_base 38: mod_base = OTHER; note = 2'-O-methyl modified nucleotide
  modified_base 39: mod_base = OTHER; note = 2'-O-methyl modified nucleotide
  modified_base 40: mod_base = OTHER; note = 2'-O-methyl modified nucleotide
  modified_base 69: mod_base = OTHER; note = 2'-O-methyl modified nucleotide
  modified_base 70: mod_base = OTHER; note = 2'-O-methyl modified nucleotide
  modified_base 71: mod_base = OTHER; note = 2'-O-methyl modified nucleotide
  modified_base 72: mod_base = OTHER; note = 2'-O-methyl modified nucleotide
  modified_base 73: mod_base = OTHER; note = 2'-O-methyl modified nucleotide
  modified_base 74: mod_base = OTHER; note = 2'-O-methyl modified nucleotide
  modified_base 75: mod_base = OTHER; note = 2'-O-methyl modified nucleotide
  modified_base 76: mod_base = OTHER; note = 2'-O-methyl modified nucleotide
  modified_base 77: mod_base = OTHER; note = 2'-O-methyl modified nucleotide
  modified_base 78: mod_base = OTHER; note = 2'-O-methyl modified nucleotide
  modified_base 79: mod_base = OTHER; note = 2'-O-methyl modified nucleotide
  modified_base 80: mod_base = OTHER; note = 2'-O-methyl modified nucleotide
  modified_base 81: mod_base = OTHER; note = 2'-O-methyl modified nucleotide
  modified_base 82: mod_base = OTHER; note = 2'-O-methyl modified nucleotide
  modified_base 83: mod_base = OTHER; note = 2'-O-methyl modified nucleotide
  modified_base 84: mod_base = OTHER; note = 2'-O-methyl modified nucleotide
  modified_base 85: mod_base = OTHER; note = 2'-O-methyl modified nucleotide
  modified_base 86: mod_base = OTHER; note = 2'-O-methyl modified nucleotide
  modified_base 87: mod_base = OTHER; note = 2'-O-methyl modified nucleotide
  modified_base 88: mod_base = OTHER; note = 2'-O-methyl modified nucleotide
  modified_base 89: mod_base = OTHER; note = 2'-O-methyl modified nucleotide
  modified_base 90: mod_base = OTHER; note = 2'-O-methyl modified nucleotide
  modified_base 91: mod_base = OTHER; note = 2'-O-methyl modified nucleotide
  modified_base 92: mod_base = OTHER; note = 2'-O-methyl modified nucleotide
  modified_base 93: mod_base = OTHER; note = 2'-O-methyl modified nucleotide
  modified_base 94: mod_base = OTHER; note = 2'-O-methyl modified nucleotide
  modified_base 95: mod_base = OTHER; note = 2'-O-methyl modified nucleotide
  modified_base 96: mod_base = OTHER; note = 2'-O-methyl modified nucleotide
  modified_base 119: mod_base = OTHER; note = Nucleotide with phosphorothioate linkage
  modified_base 120: mod_base = OTHER; note = 2'-O-methyl modified nucleotide with phosphorothioate linkage
  modified_base 121: mod_base = OTHER; note = 2'-O-methyl modified nucleotide with phosphorothioate linkage
  modified_base 122: mod_base = OTHER; note = 2'-O-methyl modified nucleotide
gagaatcaaaatcggtgaatgttttagagctagaaatagcaagttaaaataaggctagtccgttatcaacttgaaaaagtggcaccgagtcggtgcctgtctgcctatttagtgcaccgatt

SEQ ID NO: 16031 - RNA, 129 nt, synthetic construct
  source 1..129: mol_type = other RNA
  modified_base 1: mod_base = OTHER; note = 2'-O-methyl modified nucleotide with phosphorothioate linkage
  modified_base 2: mod_base = OTHER; note = 2'-O-methyl modified nucleotide with phosphorothioate linkage
  modified_base 3: mod_base = OTHER; note = 2'-O-methyl modified nucleotide with phosphorothioate linkage
  modified_base 29: mod_base = OTHER; note = 2'-O-methyl modified nucleotide
  modified_base 30: mod_base = OTHER; note = 2'-O-methyl modified nucleotide
  modified_base 31: mod_base = OTHER; note = 2'-O-methyl modified nucleotide
  modified_base 32: mod_base = OTHER; note = 2'-O-methyl modified nucleotide
  modified_base 33: mod_base = OTHER; note = 2'-O-methyl modified nucleotide
  modified_base 34: mod_base = OTHER; note = 2'-O-methyl modified nucleotide
  modified_base 35: mod_base = OTHER; note = 2'-O-methyl modified nucleotide
  modified_base 36: mod_base = OTHER; note = 2'-O-methyl modified nucleotide
  modified_base 37: mod_base = OTHER; note = 2'-O-methyl modified nucleotide
  modified_base 38: mod_base = OTHER; note = 2'-O-methyl modified nucleotide
  modified_base 39: mod_base = OTHER; note = 2'-O-methyl modified nucleotide
  modified_base 40: mod_base = OTHER; note = 2'-O-methyl modified nucleotide
  modified_base 69: mod_base = OTHER; note = 2'-O-methyl modified nucleotide
  modified_base 70: mod_base = OTHER; note = 2'-O-methyl modified nucleotide
  modified_base 71: mod_base = OTHER; note = 2'-O-methyl modified nucleotide
  modified_base 72: mod_base = OTHER; note = 2'-O-methyl modified nucleotide
  modified_base 73: mod_base = OTHER; note = 2'-O-methyl modified nucleotide
  modified_base 74: mod_base = OTHER; note = 2'-O-methyl modified nucleotide
  modified_base 75: mod_base = OTHER; note = 2'-O-methyl modified nucleotide
  modified_base 76: mod_base = OTHER; note = 2'-O-methyl modified nucleotide
  modified_base 77: mod_base = OTHER; note = 2'-O-methyl modified nucleotide
  modified_base 78: mod_base = OTHER; note = 2'-O-methyl modified nucleotide
  modified_base 79: mod_base = OTHER; note = 2'-O-methyl modified nucleotide
  modified_base 80: mod_base = OTHER; note = 2'-O-methyl modified nucleotide
  modified_base 81: mod_base = OTHER; note = 2'-O-methyl modified nucleotide
  modified_base 82: mod_base = OTHER; note = 2'-O-methyl modified nucleotide
  modified_base 83: mod_base = OTHER; note = 2'-O-methyl modified nucleotide
  modified_base 84: mod_base = OTHER; note = 2'-O-methyl modified nucleotide
  modified_base 85: mod_base = OTHER; note = 2'-O-methyl modified nucleotide
  modified_base 86: mod_base = OTHER; note = 2'-O-methyl modified nucleotide
  modified_base 87: mod_base = OTHER; note = 2'-O-methyl modified nucleotide
  modified_base 88: mod_base = OTHER; note = 2'-O-methyl modified nucleotide
  modified_base 89: mod_base = OTHER; note = 2'-O-methyl modified nucleotide
  modified_base 90: mod_base = OTHER; note = 2'-O-methyl modified nucleotide
  modified_base 91: mod_base = OTHER; note = 2'-O-methyl modified nucleotide
  modified_base 92: mod_base = OTHER; note = 2'-O-methyl modified nucleotide
  modified_base 93: mod_base = OTHER; note = 2'-O-methyl modified nucleotide
  modified_base 94: mod_base = OTHER; note = 2'-O-methyl modified nucleotide
  modified_base 95: mod_base = OTHER; note = 2'-O-methyl modified nucleotide
  modified_base 96: mod_base = OTHER; note = 2'-O-methyl modified nucleotide
  modified_base 126: mod_base = OTHER; note = Nucleotide with phosphorothioate linkage
  modified_base 127: mod_base = OTHER; note = 2'-O-methyl modified nucleotide with phosphorothioate linkage
  modified_base 128: mod_base = OTHER; note = 2'-O-methyl modified nucleotide with phosphorothioate linkage
  modified_base 129: mod_base = OTHER; note = 2'-O-methyl modified nucleotide
gagaatcaaaatcggtgaatgttttagagctagaaatagcaagttaaaataaggctagtccgttatcaacttgaaaaagtggcaccgagtcggtgcgtctgtctgcctatttagtgcaccgattttgat

SEQ ID NO: 16032 - RNA, 128 nt, synthetic construct
  source 1..128: mol_type = other RNA
  modified_base 1: mod_base = OTHER; note = 2'-O-methyl modified nucleotide with phosphorothioate linkage
  modified_base 2: mod_base = OTHER; note = 2'-O-methyl modified nucleotide with phosphorothioate linkage
  modified_base 3: mod_base = OTHER; note = 2'-O-methyl modified nucleotide with phosphorothioate linkage
  modified_base 29: mod_base = OTHER; note = 2'-O-methyl modified nucleotide
  modified_base 30: mod_base = OTHER; note = 2'-O-methyl modified nucleotide
  modified_base 31: mod_base = OTHER; note = 2'-O-methyl modified nucleotide
  modified_base 32: mod_base = OTHER; note = 2'-O-methyl modified nucleotide
  modified_base 33: mod_base = OTHER; note = 2'-O-methyl modified nucleotide
  modified_base 34: mod_base = OTHER; note = 2'-O-methyl modified nucleotide
  modified_base 35: mod_base = OTHER; note = 2'-O-methyl modified nucleotide
  modified_base 36: mod_base = OTHER; note = 2'-O-methyl modified nucleotide
  modified_base 37: mod_base = OTHER; note = 2'-O-methyl modified nucleotide
  modified_base 38: mod_base = OTHER; note = 2'-O-methyl modified nucleotide
  modified_base 39: mod_base = OTHER; note = 2'-O-methyl modified nucleotide
  modified_base 40: mod_base = OTHER; note = 2'-O-methyl modified nucleotide
  modified_base 69: mod_base = OTHER; note = 2'-O-methyl modified nucleotide
  modified_base 70: mod_base = OTHER; note = 2'-O-methyl modified nucleotide
  modified_base 71: mod_base = OTHER; note = 2'-O-methyl modified nucleotide
  modified_base 72: mod_base = OTHER; note = 2'-O-methyl modified nucleotide
  modified_base 73: mod_base = OTHER; note = 2'-O-methyl modified nucleotide
  modified_base 74: mod_base = OTHER; note = 2'-O-methyl modified nucleotide
  modified_base 75: mod_base = OTHER; note = 2'-O-methyl modified nucleotide
  modified_base 76: mod_base = OTHER; note = 2'-O-methyl modified nucleotide
  modified_base 77: mod_base = OTHER; note = 2'-O-methyl modified nucleotide
  modified_base 78: mod_base = OTHER; note = 2'-O-methyl modified nucleotide
  modified_base 79: mod_base = OTHER; note = 2'-O-methyl modified nucleotide
  modified_base 80: mod_base = OTHER; note = 2'-O-methyl modified nucleotide
  modified_base 81: mod_base = OTHER; note = 2'-O-methyl modified nucleotide
  modified_base 82: mod_base = OTHER; note = 2'-O-methyl modified nucleotide
  modified_base 83: mod_base = OTHER; note = 2'-O-methyl modified nucleotide
  modified_base 84: mod_base = OTHER; note = 2'-O-methyl modified nucleotide
  modified_base 85: mod_base = OTHER; note = 2'-O-methyl modified nucleotide
  modified_base 86: mod_base = OTHER; note = 2'-O-methyl modified nucleotide
  modified_base 87: mod_base = OTHER; note = 2'-O-methyl modified nucleotide
  modified_base 88: mod_base = OTHER; note = 2'-O-methyl modified nucleotide
  modified_base 89: mod_base = OTHER; note = 2'-O-methyl modified nucleotide
  modified_base 90: mod_base = OTHER; note = 2'-O-methyl modified nucleotide
  modified_base 91: mod_base = OTHER; note = 2'-O-methyl modified nucleotide
  modified_base 92: mod_base = OTHER; note = 2'-O-methyl modified nucleotide
  modified_base 93: mod_base = OTHER; note = 2'-O-methyl modified nucleotide
  modified_base 94: mod_base = OTHER; note = 2'-O-methyl modified nucleotide
  modified_base 95: mod_base = OTHER; note = 2'-O-methyl modified nucleotide
  modified_base 96: mod_base = OTHER; note = 2'-O-methyl modified nucleotide
  modified_base 125: mod_base = OTHER; note = Nucleotide with phosphorothioate linkage
  modified_base 126: mod_base = OTHER; note = 2'-O-methyl modified nucleotide with phosphorothioate linkage
  modified_base 127: mod_base = OTHER; note = 2'-O-methyl modified nucleotide with phosphorothioate linkage
  modified_base 128: mod_base = OTHER; note = 2'-O-methyl modified nucleotide
gagaatcaaaatcggtgaatgttttagagctagaaatagcaagttaaaataaggctagtccgttatcaacttgaaaaagtggcaccgagtcggtgcgtctgtctgcctatttagtgcaccgattttga

SEQ ID NO: 16033 - RNA, 127 nt, synthetic construct
  source 1..127: mol_type = other RNA
  modified_base 1: mod_base = OTHER; note = 2'-O-methyl modified nucleotide with phosphorothioate linkage
  modified_base 2: mod_base = OTHER; note = 2'-O-methyl modified nucleotide with phosphorothioate linkage
  modified_base 3: mod_base = OTHER; note = 2'-O-methyl modified nucleotide with phosphorothioate linkage
  modified_base 29: mod_base = OTHER; note = 2'-O-methyl modified nucleotide
  modified_base 30: mod_base = OTHER; note = 2'-O-methyl modified nucleotide
  modified_base 31: mod_base = OTHER; note = 2'-O-methyl modified nucleotide
  modified_base 32: mod_base = OTHER; note = 2'-O-methyl modified nucleotide
  modified_base 33: mod_base = OTHER; note = 2'-O-methyl modified nucleotide
  modified_base 34: mod_base = OTHER; note = 2'-O-methyl modified nucleotide
  modified_base 35: mod_base = OTHER; note = 2'-O-methyl modified nucleotide
  modified_base 36: mod_base = OTHER; note = 2'-O-methyl modified nucleotide
  modified_base 37: mod_base = OTHER; note = 2'-O-methyl modified nucleotide
  modified_base 38: mod_base = OTHER; note = 2'-O-methyl modified nucleotide
  modified_base 39: mod_base = OTHER; note = 2'-O-methyl modified nucleotide
  modified_base 40: mod_base = OTHER; note = 2'-O-methyl modified nucleotide
  modified_base 69: mod_base = OTHER; note = 2'-O-methyl modified nucleotide
  modified_base 70: mod_base = OTHER; note = 2'-O-methyl modified nucleotide
  modified_base 71: mod_base = OTHER; note = 2'-O-methyl modified nucleotide
  modified_base 72: mod_base = OTHER; note = 2'-O-methyl modified nucleotide
  modified_base 73: mod_base = OTHER; note = 2'-O-methyl modified nucleotide
  modified_base 74: mod_base = OTHER; note = 2'-O-methyl modified nucleotide
  modified_base 75: mod_base = OTHER; note = 2'-O-methyl modified nucleotide
  modified_base 76: mod_base = OTHER; note = 2'-O-methyl modified nucleotide
  modified_base 77: mod_base = OTHER; note = 2'-O-methyl modified nucleotide
  modified_base 78: mod_base = OTHER; note = 2'-O-methyl modified nucleotide
  modified_base 79: mod_base = OTHER; note = 2'-O-methyl modified nucleotide
  modified_base 80: mod_base = OTHER; note = 2'-O-methyl modified nucleotide
  modified_base 81: mod_base = OTHER; note = 2'-O-methyl modified nucleotide
  modified_base 82: mod_base = OTHER; note = 2'-O-methyl modified nucleotide
  modified_base 83: mod_base = OTHER; note = 2'-O-methyl modified nucleotide
  modified_base 84: mod_base = OTHER; note = 2'-O-methyl modified nucleotide
  modified_base 85: mod_base = OTHER; note = 2'-O-methyl modified nucleotide
  modified_base 86: mod_base = OTHER; note = 2'-O-methyl modified nucleotide
  modified_base 87: mod_base = OTHER; note = 2'-O-methyl modified nucleotide
  modified_base 88: mod_base = OTHER; note = 2'-O-methyl modified nucleotide
  modified_base 89: mod_base = OTHER; note = 2'-O-methyl modified nucleotide
  modified_base 90: mod_base = OTHER; note = 2'-O-methyl modified nucleotide
  modified_base 91: mod_base = OTHER; note = 2'-O-methyl modified nucleotide
  modified_base 92: mod_base = OTHER; note = 2'-O-methyl modified nucleotide
  modified_base 93: mod_base = OTHER; note = 2'-O-methyl modified nucleotide
  modified_base 94: mod_base = OTHER; note = 2'-O-methyl modified nucleotide
  modified_base 95: mod_base = OTHER; note = 2'-O-methyl modified nucleotide
  modified_base 96: mod_base = OTHER; note = 2'-O-methyl modified nucleotide
  modified_base 124: mod_base = OTHER; note = Nucleotide with phosphorothioate linkage
  modified_base 125: mod_base = OTHER; note = 2'-O-methyl modified nucleotide with phosphorothioate linkage
  modified_base 126: mod_base = OTHER; note = 2'-O-methyl modified nucleotide with phosphorothioate linkage
  modified_base 127: mod_base = OTHER; note = 2'-O-methyl modified nucleotide
gagaatcaaaatcggtgaatgttttagagctagaaatagcaagttaaaataaggctagtccgttatcaacttgaaaaagtggcaccgagtcggtgcgtctgtctgcctatttagtgcaccgattttg

SEQ ID NO: 16034 - RNA, 126 nt, synthetic construct
  source 1..126: mol_type = other RNA
  modified_base 1: mod_base = OTHER; note = 2'-O-methyl modified nucleotide with phosphorothioate linkage
  modified_base 2: mod_base = OTHER; note = 2'-O-methyl modified nucleotide with phosphorothioate linkage
  modified_base 3: mod_base = OTHER; note = 2'-O-methyl modified nucleotide with phosphorothioate linkage
  modified_base 29: mod_base = OTHER; note = 2'-O-methyl modified nucleotide
  modified_base 30: mod_base = OTHER; note = 2'-O-methyl modified nucleotide
  modified_base 31: mod_base = OTHER; note = 2'-O-methyl modified nucleotide
  modified_base 32: mod_base = OTHER; note = 2'-O-methyl modified nucleotide
  modified_base 33: mod_base = OTHER; note = 2'-O-methyl modified nucleotide
  modified_base 34: mod_base = OTHER; note = 2'-O-methyl modified nucleotide
  modified_base 35: mod_base = OTHER; note = 2'-O-methyl modified nucleotide
  modified_base 36: mod_base = OTHER; note = 2'-O-methyl modified nucleotide
  modified_base 37: mod_base = OTHER; note = 2'-O-methyl modified nucleotide
  modified_base 38: mod_base = OTHER; note = 2'-O-methyl modified nucleotide
  modified_base 39: mod_base = OTHER; note = 2'-O-methyl modified nucleotide
  modified_base 40: mod_base = OTHER; note = 2'-O-methyl modified nucleotide
  modified_base 69: mod_base = OTHER; note = 2'-O-methyl modified nucleotide
  modified_base 70: mod_base = OTHER; note = 2'-O-methyl modified nucleotide
  modified_base 71: mod_base = OTHER; note = 2'-O-methyl modified nucleotide
  modified_base 72: mod_base = OTHER; note = 2'-O-methyl modified nucleotide
  modified_base 73: mod_base = OTHER; note = 2'-O-methyl modified nucleotide
  modified_base 74: mod_base = OTHER; note = 2'-O-methyl modified nucleotide
  modified_base 75: mod_base = OTHER; note = 2'-O-methyl modified nucleotide
  modified_base 76: mod_base = OTHER; note = 2'-O-methyl modified nucleotide
  modified_base 77: mod_base = OTHER; note = 2'-O-methyl modified nucleotide
  modified_base 78: mod_base = OTHER; note = 2'-O-methyl modified nucleotide
  modified_base 79: mod_base = OTHER; note = 2'-O-methyl modified nucleotide
  modified_base 80: mod_base = OTHER; note = 2'-O-methyl modified nucleotide
  modified_base 81: mod_base = OTHER; note = 2'-O-methyl modified nucleotide
  modified_base 82: mod_base = OTHER; note = 2'-O-methyl modified nucleotide
  modified_base 83: mod_base = OTHER; note = 2'-O-methyl modified nucleotide
  modified_base 84: mod_base = OTHER; note = 2'-O-methyl modified nucleotide
  modified_base 85: mod_base = OTHER; note = 2'-O-methyl modified nucleotide
  modified_base 86: mod_base = OTHER; note = 2'-O-methyl modified nucleotide
  modified_base 87: mod_base = OTHER; note = 2'-O-methyl modified nucleotide
  modified_base 88: mod_base = OTHER; note = 2'-O-methyl modified nucleotide
  modified_base 89: mod_base = OTHER; note = 2'-O-methyl modified nucleotide
  modified_base 90: mod_base = OTHER; note = 2'-O-methyl modified nucleotide
  modified_base 91: mod_base = OTHER; note = 2'-O-methyl modified nucleotide
  modified_base 92: mod_base = OTHER; note = 2'-O-methyl modified nucleotide
  modified_base 93: mod_base = OTHER; note = 2'-O-methyl modified nucleotide
  modified_base 94: mod_base = OTHER; note = 2'-O-methyl modified nucleotide
  modified_base 95: mod_base = OTHER; note = 2'-O-methyl modified nucleotide
  modified_base 96: mod_base = OTHER; note = 2'-O-methyl modified nucleotide
  modified_base 123: mod_base = OTHER; note = Nucleotide with phosphorothioate linkage
  modified_base 124: mod_base = OTHER; note = 2'-O-methyl modified nucleotide with phosphorothioate linkage
  modified_base 125: mod_base = OTHER; note = 2'-O-methyl modified nucleotide with phosphorothioate linkage
  modified_base 126: mod_base = OTHER; note = 2'-O-methyl modified nucleotide
gagaatcaaaatcggtgaatgttttagagctagaaatagcaagttaaaataaggctagtccgttatcaacttgaaaaagtggcaccgagtcggtgcgtctgtctgcctatttagtgcaccgatttt

SEQ ID NO: 16035 - RNA, 125 nt, synthetic construct
  source 1..125: mol_type = other RNA
  modified_base 1: mod_base = OTHER; note = 2'-O-methyl modified nucleotide with phosphorothioate linkage
  modified_base 2: mod_base = OTHER; note = 2'-O-methyl modified nucleotide with phosphorothioate linkage
  modified_base 3: mod_base = OTHER; note = 2'-O-methyl modified nucleotide with phosphorothioate linkage
  modified_base 29: mod_base = OTHER; note = 2'-O-methyl modified nucleotide
  modified_base 30: mod_base = OTHER; note = 2'-O-methyl modified nucleotide
  modified_base 31: mod_base = OTHER; note = 2'-O-methyl modified nucleotide
  modified_base 32: mod_base = OTHER; note = 2'-O-methyl modified nucleotide
  modified_base 33: mod_base = OTHER; note = 2'-O-methyl modified nucleotide
  modified_base 34: mod_base = OTHER; note = 2'-O-methyl modified nucleotide
  modified_base 35: mod_base = OTHER; note = 2'-O-methyl modified nucleotide
  modified_base 36: mod_base = OTHER; note = 2'-O-methyl modified nucleotide
  modified_base 37: mod_base = OTHER; note = 2'-O-methyl modified nucleotide
  modified_base 38: mod_base = OTHER; note = 2'-O-methyl modified nucleotide
  modified_base 39: mod_base = OTHER; note = 2'-O-methyl modified nucleotide
  modified_base 40: mod_base = OTHER; note = 2'-O-methyl modified nucleotide
  modified_base 69: mod_base = OTHER; note = 2'-O-methyl modified nucleotide
  modified_base 70: mod_base = OTHER; note = 2'-O-methyl modified nucleotide
  modified_base 71: mod_base = OTHER; note = 2'-O-methyl modified nucleotide
  modified_base 72: mod_base = OTHER; note = 2'-O-methyl modified nucleotide
  modified_base 73: mod_base = OTHER; note = 2'-O-methyl modified nucleotide
  modified_base 74: mod_base = OTHER; note = 2'-O-methyl modified nucleotide
  modified_base 75: mod_base = OTHER; note = 2'-O-methyl modified nucleotide
  modified_base 76: mod_base = OTHER; note = 2'-O-methyl modified nucleotide
  modified_base 77: mod_base = OTHER; note = 2'-O-methyl modified nucleotide
  modified_base 78: mod_base = OTHER; note = 2'-O-methyl modified nucleotide
  modified_base 79: mod_base = OTHER; note = 2'-O-methyl modified nucleotide
  modified_base 80: mod_base = OTHER; note = 2'-O-methyl modified nucleotide
  modified_base 81: mod_base = OTHER; note = 2'-O-methyl modified nucleotide
  modified_base 82: mod_base = OTHER; note = 2'-O-methyl modified nucleotide
  modified_base 83: mod_base = OTHER; note = 2'-O-methyl modified nucleotide
  modified_base 84: mod_base = OTHER; note = 2'-O-methyl modified nucleotide
  modified_base 85: mod_base = OTHER; note = 2'-O-methyl modified nucleotide
  modified_base 86: mod_base = OTHER; note = 2'-O-methyl modified nucleotide
  modified_base 87: mod_base = OTHER; note = 2'-O-methyl modified nucleotide
  modified_base 88: mod_base = OTHER; note = 2'-O-methyl modified nucleotide
  modified_base 89: mod_base = OTHER; note = 2'-O-methyl modified nucleotide
  modified_base 90: mod_base = OTHER; note = 2'-O-methyl modified nucleotide
  modified_base 91: mod_base = OTHER; note = 2'-O-methyl modified nucleotide
  modified_base 92: mod_base = OTHER; note = 2'-O-methyl modified nucleotide
  modified_base 93: mod_base = OTHER; note = 2'-O-methyl modified nucleotide
  modified_base 94: mod_base = OTHER; note = 2'-O-methyl modified nucleotide
  modified_base 95: mod_base = OTHER; note = 2'-O-methyl modified nucleotide
  modified_base 96: mod_base = OTHER; note = 2'-O-methyl modified nucleotide
  modified_base 122: mod_base = OTHER; note = Nucleotide with phosphorothioate linkage
  modified_base 123: mod_base = OTHER; note = 2'-O-methyl modified nucleotide with phosphorothioate linkage
  modified_base 124: mod_base = OTHER; note = 2'-O-methyl modified nucleotide with phosphorothioate linkage
  modified_base 125: mod_base = OTHER; note = 2'-O-methyl modified nucleotide
gagaatcaaaatcggtgaatgttttagagctagaaatagcaagttaaaataaggctagtccgttatcaacttgaaaaagtggcaccgagtcggtgcgtctgtctgcctatttagtgcaccgattt

SEQ ID NO: 16036 - RNA, 124 nt, synthetic construct
  source 1..124: mol_type = other RNA
  modified_base 1: mod_base = OTHER; note = 2'-O-methyl modified nucleotide with phosphorothioate linkage
  modified_base 2: mod_base = OTHER; note = 2'-O-methyl modified nucleotide with phosphorothioate linkage
  modified_base 3: mod_base = OTHER; note = 2'-O-methyl modified nucleotide with phosphorothioate linkage
  modified_base 29: mod_base = OTHER; note = 2'-O-methyl modified nucleotide
  modified_base 30: mod_base = OTHER; note = 2'-O-methyl modified nucleotide
  modified_base 31: mod_base = OTHER; note = 2'-O-methyl modified nucleotide
  modified_base 32: mod_base = OTHER; note = 2'-O-methyl modified nucleotide
  modified_base 33: mod_base = OTHER; note = 2'-O-methyl modified nucleotide
  modified_base 34: mod_base = OTHER; note = 2'-O-methyl modified nucleotide
  modified_base 35: mod_base = OTHER; note = 2'-O-methyl modified nucleotide
  modified_base 36: mod_base = OTHER; note = 2'-O-methyl modified nucleotide
  modified_base 37: mod_base = OTHER; note = 2'-O-methyl modified nucleotide
  modified_base 38: mod_base = OTHER; note = 2'-O-methyl modified nucleotide
  modified_base 39: mod_base = OTHER; note = 2'-O-methyl modified nucleotide
  modified_base 40: mod_base = OTHER; note = 2'-O-methyl modified nucleotide
  modified_base 69: mod_base = OTHER; note = 2'-O-methyl modified nucleotide
  modified_base 70: mod_base = OTHER; note = 2'-O-methyl modified nucleotide
  modified_base 71: mod_base = OTHER; note = 2'-O-methyl modified nucleotide
  modified_base 72: mod_base = OTHER; note = 2'-O-methyl modified nucleotide
  modified_base 73: mod_base = OTHER; note = 2'-O-methyl modified nucleotide
  modified_base 74: mod_base = OTHER; note = 2'-O-methyl modified nucleotide
  modified_base 75: mod_base = OTHER; note = 2'-O-methyl modified nucleotide
  modified_base 76: mod_base = OTHER; note = 2'-O-methyl modified nucleotide
  modified_base 77: mod_base = OTHER; note = 2'-O-methyl modified nucleotide
  modified_base 78: mod_base = OTHER; note = 2'-O-methyl modified nucleotide
  modified_base 79: mod_base = OTHER; note = 2'-O-methyl modified nucleotide
  modified_base 80: mod_base = OTHER; note = 2'-O-methyl modified nucleotide
  modified_base 81: mod_base = OTHER; note = 2'-O-methyl modified nucleotide
  modified_base 82: mod_base = OTHER; note = 2'-O-methyl modified nucleotide
  modified_base 83: mod_base = OTHER; note = 2'-O-methyl modified nucleotide
  modified_base 84: mod_base = OTHER; note = 2'-O-methyl modified nucleotide
  modified_base 85: mod_base = OTHER; note = 2'-O-methyl modified nucleotide
  modified_base 86: mod_base = OTHER; note = 2'-O-methyl modified nucleotide
  modified_base 87: mod_base = OTHER; note = 2'-O-methyl modified nucleotide
  modified_base 88: mod_base = OTHER; note = 2'-O-methyl modified nucleotide
  modified_base 89: mod_base = OTHER; note = 2'-O-methyl modified nucleotide
  modified_base 90: mod_base = OTHER; note = 2'-O-methyl modified nucleotide
  modified_base 91: mod_base = OTHER; note = 2'-O-methyl modified nucleotide
  modified_base 92: mod_base = OTHER; note = 2'-O-methyl modified nucleotide
  modified_base 93: mod_base = OTHER; note = 2'-O-methyl modified nucleotide
  modified_base 94: mod_base = OTHER; note = 2'-O-methyl modified nucleotide
  modified_base 95: mod_base = OTHER; note = 2'-O-methyl modified nucleotide
  modified_base 96: mod_base = OTHER; note = 2'-O-methyl modified nucleotide
  modified_base 121: mod_base = OTHER; note = Nucleotide with phosphorothioate linkage
  modified_base 122: mod_base = OTHER; note = 2'-O-methyl modified nucleotide with phosphorothioate linkage
  modified_base 123: mod_base = OTHER; note = 2'-O-methyl modified nucleotide with phosphorothioate linkage
  modified_base 124: mod_base = OTHER; note = 2'-O-methyl modified nucleotide
gagaatcaaaatcggtgaatgttttagagctagaaatagcaagttaaaataaggctagtccgttatcaacttgaaaaagtggcaccgagtcggtgcgtctgtctgcctatttagtgcaccgatt

SEQ ID NO: 16037 - RNA, 131 nt, synthetic construct
  source 1..131: mol_type = other RNA
  modified_base 1: mod_base = OTHER; note = 2'-O-methyl modified nucleotide with phosphorothioate linkage
  modified_base 2: mod_base = OTHER; note = 2'-O-methyl modified nucleotide with phosphorothioate linkage
  modified_base 3: mod_base = OTHER; note = 2'-O-methyl modified nucleotide with phosphorothioate linkage
  modified_base 29: mod_base = OTHER; note = 2'-O-methyl modified nucleotide
  modified_base 30: mod_base = OTHER; note = 2'-O-methyl modified nucleotide
  modified_base 31: mod_base = OTHER; note = 2'-O-methyl modified nucleotide
  modified_base 32: mod_base = OTHER; note = 2'-O-methyl modified nucleotide
  modified_base 33: mod_base = OTHER; note = 2'-O-methyl modified nucleotide
  modified_base 34: mod_base = OTHER; note = 2'-O-methyl modified nucleotide
  modified_base 35: mod_base = OTHER; note = 2'-O-methyl modified nucleotide
  modified_base 36: mod_base = OTHER; note = 2'-O-methyl modified nucleotide
  modified_base 37: mod_base = OTHER; note = 2'-O-methyl modified nucleotide
  modified_base 38: mod_base = OTHER; note = 2'-O-methyl modified nucleotide
  modified_base 39: mod_base = OTHER; note = 2'-O-methyl modified nucleotide
  modified_base 40: mod_base = OTHER; note = 2'-O-methyl modified nucleotide
  modified_base 69: mod_base = OTHER; note = 2'-O-methyl modified nucleotide
  modified_base 70: mod_base = OTHER; note = 2'-O-methyl modified nucleotide
  modified_base 71: mod_base = OTHER; note = 2'-O-methyl modified nucleotide
  modified_base 72: mod_base = OTHER; note = 2'-O-methyl modified nucleotide
  modified_base 73: mod_base = OTHER; note = 2'-O-methyl modified nucleotide
  modified_base 74: mod_base = OTHER; note = 2'-O-methyl modified nucleotide
  modified_base 75: mod_base = OTHER; note = 2'-O-methyl modified nucleotide
  modified_base 76: mod_base = OTHER; note = 2'-O-methyl modified nucleotide
  modified_base 77: mod_base = OTHER; note = 2'-O-methyl modified nucleotide
  modified_base 78: mod_base = OTHER; note = 2'-O-methyl modified nucleotide
  modified_base 79: mod_base = OTHER; note = 2'-O-methyl modified nucleotide
  modified_base 80: mod_base = OTHER; note = 2'-O-methyl modified nucleotide
  modified_base 81: mod_base = OTHER; note = 2'-O-methyl modified nucleotide
  modified_base 82: mod_base = OTHER; note = 2'-O-methyl modified nucleotide
  modified_base 83: mod_base = OTHER; note = 2'-O-methyl modified nucleotide
  modified_base 84: mod_base = OTHER; note = 2'-O-methyl modified nucleotide
  modified_base 85: mod_base = OTHER; note = 2'-O-methyl modified nucleotide
  modified_base 86: mod_base = OTHER; note = 2'-O-methyl modified nucleotide
  modified_base 87: mod_base = OTHER; note = 2'-O-methyl modified nucleotide
  modified_base 88: mod_base = OTHER; note = 2'-O-methyl modified nucleotide
  modified_base 89: mod_base = OTHER; note = 2'-O-methyl modified nucleotide
  modified_base 90: mod_base = OTHER; note = 2'-O-methyl modified nucleotide
  modified_base 91: mod_base = OTHER; note = 2'-O-methyl modified nucleotide
  modified_base 92: mod_base = OTHER; note = 2'-O-methyl modified nucleotide
  modified_base 93: mod_base = OTHER; note = 2'-O-methyl modified nucleotide
  modified_base 94: mod_base = OTHER; note = 2'-O-methyl modified nucleotide
  modified_base 95: mod_base = OTHER; note = 2'-O-methyl modified nucleotide
  modified_base 96: mod_base = OTHER; note = 2'-O-methyl modified nucleotide
  modified_base 128: mod_base = OTHER; note = Nucleotide with phosphorothioate linkage
  modified_base 129: mod_base = OTHER; note = 2'-O-methyl modified nucleotide with phosphorothioate linkage
  modified_base 130: mod_base = OTHER; note = 2'-O-methyl modified nucleotide with phosphorothioate linkage
  modified_base 131: mod_base = OTHER; note = 2'-O-methyl modified nucleotide
gagaatcaaaatcggtgaatgttttagagctagaaatagcaagttaaaataaggctagtccgttatcaacttgaaaaagtggcaccgagtcggtgcaagtctgtctgcctatttagtgcaccgattttgat

SEQ ID NO: 16038 - RNA, 130 nt, synthetic construct
  source 1..130: mol_type = other RNA
  modified_base 1: mod_base = OTHER; note = 2'-O-methyl modified nucleotide with phosphorothioate linkage
  modified_base 2: mod_base = OTHER; note = 2'-O-methyl modified nucleotide with phosphorothioate linkage
  modified_base 3: mod_base = OTHER; note = 2'-O-methyl modified nucleotide with phosphorothioate linkage
  modified_base 29: mod_base = OTHER; note = 2'-O-methyl modified nucleotide
  modified_base 30: mod_base = OTHER; note = 2'-O-methyl modified nucleotide
  modified_base 31: mod_base = OTHER; note = 2'-O-methyl modified nucleotide
  modified_base 32: mod_base = OTHER; note = 2'-O-methyl modified nucleotide
  modified_base 33: mod_base = OTHER; note = 2'-O-methyl modified nucleotide
  modified_base 34: mod_base = OTHER; note = 2'-O-methyl modified nucleotide
  modified_base 35: mod_base = OTHER; note = 2'-O-methyl modified nucleotide
  modified_base 36: mod_base = OTHER; note = 2'-O-methyl modified nucleotide
  modified_base 37: mod_base = OTHER; note = 2'-O-methyl modified nucleotide
  modified_base 38: mod_base = OTHER; note = 2'-O-methyl modified nucleotide
  modified_base 39: mod_base = OTHER; note = 2'-O-methyl modified nucleotide
  modified_base 40: mod_base = OTHER; note = 2'-O-methyl modified nucleotide
  modified_base 69: mod_base = OTHER; note = 2'-O-methyl modified nucleotide
  modified_base 70: mod_base = OTHER; note = 2'-O-methyl modified nucleotide
  modified_base 71: mod_base = OTHER; note = 2'-O-methyl modified nucleotide
  modified_base 72: mod_base = OTHER; note = 2'-O-methyl modified nucleotide
  modified_base 73: mod_base = OTHER; note = 2'-O-methyl modified nucleotide
  modified_base 74: mod_base = OTHER; note = 2'-O-methyl modified nucleotide
  modified_base 75: mod_base = OTHER; note = 2'-O-methyl modified nucleotide
  modified_base 76: mod_base = OTHER; note = 2'-O-methyl modified nucleotide
  modified_base 77: mod_base = OTHER; note = 2'-O-methyl modified nucleotide
  modified_base 78: mod_base = OTHER; note = 2'-O-methyl modified nucleotide
  modified_base 79: mod_base = OTHER; note = 2'-O-methyl modified nucleotide
  modified_base 80: mod_base = OTHER; note = 2'-O-methyl modified nucleotide
  modified_base 81: mod_base = OTHER; note = 2'-O-methyl modified nucleotide
  modified_base 82: mod_base = OTHER; note = 2'-O-methyl modified nucleotide
  modified_base 83: mod_base = OTHER; note = 2'-O-methyl modified nucleotide
  modified_base 84: mod_base = OTHER; note = 2'-O-methyl modified nucleotide
  modified_base 85: mod_base = OTHER; note = 2'-O-methyl modified nucleotide
  modified_base 86: mod_base = OTHER; note = 2'-O-methyl modified nucleotide
  modified_base 87: mod_base = OTHER; note = 2'-O-methyl modified nucleotide
  modified_base 88: mod_base = OTHER; note = 2'-O-methyl modified nucleotide
  modified_base 89: mod_base = OTHER; note = 2'-O-methyl modified nucleotide
  modified_base 90: mod_base = OTHER; note = 2'-O-methyl modified nucleotide
  modified_base 91: mod_base = OTHER; note = 2'-O-methyl modified nucleotide
  modified_base 92: mod_base = OTHER; note = 2'-O-methyl modified nucleotide
  modified_base 93: mod_base = OTHER; note = 2'-O-methyl modified nucleotide
  modified_base 94: mod_base = OTHER; note = 2'-O-methyl modified nucleotide
  modified_base 95: mod_base = OTHER; note = 2'-O-methyl modified nucleotide
  modified_base 96: mod_base = OTHER; note = 2'-O-methyl modified nucleotide
  modified_base 127: mod_base = OTHER; note = Nucleotide with phosphorothioate linkage
  modified_base 128: mod_base = OTHER; note = 2'-O-methyl modified nucleotide with phosphorothioate linkage
  modified_base 129: mod_base = OTHER; note = 2'-O-methyl modified nucleotide with phosphorothioate linkage
  modified_base 130: mod_base = OTHER; note = 2'-O-methyl modified nucleotide
gagaatcaaaatcggtgaatgttttagagctagaaatagcaagttaaaataaggctagtccgttatcaacttgaaaaagtggcaccgagtcggtgcaagtctgtctgcctatttagtgcaccgattttga

SEQ ID NO: 16039 - RNA, 129 nt, synthetic construct
  source 1..129: mol_type = other RNA
  modified_base 1: mod_base = OTHER; note = 2'-O-methyl modified nucleotide with phosphorothioate linkage
  modified_base 2: mod_base = OTHER; note = 2'-O-methyl modified nucleotide with phosphorothioate linkage
  modified_base 3: mod_base = OTHER; note = 2'-O-methyl modified nucleotide with phosphorothioate linkage
  modified_base 29: mod_base = OTHER; note = 2'-O-methyl modified nucleotide
  modified_base 30: mod_base = OTHER; note = 2'-O-methyl modified nucleotide
  modified_base 31: mod_base = OTHER; note = 2'-O-methyl modified nucleotide
  modified_base 32: mod_base = OTHER; note = 2'-O-methyl modified nucleotide
  modified_base 33: mod_base = OTHER; note = 2'-O-methyl modified nucleotide
  modified_base 34: mod_base = OTHER; note = 2'-O-methyl modified nucleotide
  modified_base 35: mod_base = OTHER; note = 2'-O-methyl modified nucleotide
  modified_base 36: mod_base = OTHER; note = 2'-O-methyl modified nucleotide
  modified_base 37: mod_base = OTHER; note = 2'-O-methyl modified nucleotide
  modified_base 38: mod_base = OTHER; note = 2'-O-methyl modified nucleotide
  modified_base 39: mod_base = OTHER; note = 2'-O-methyl modified nucleotide
  modified_base 40: mod_base = OTHER; note = 2'-O-methyl modified nucleotide
  modified_base 69: mod_base = OTHER; note = 2'-O-methyl modified nucleotide
  modified_base 70: mod_base = OTHER; note = 2'-O-methyl modified nucleotide
  modified_base 71: mod_base = OTHER; note = 2'-O-methyl modified nucleotide
  modified_base 72: mod_base = OTHER; note = 2'-O-methyl modified nucleotide
  modified_base 73: mod_base = OTHER; note = 2'-O-methyl modified nucleotide
  modified_base 74: mod_base = OTHER; note = 2'-O-methyl modified nucleotide
  modified_base 75: mod_base = OTHER; note = 2'-O-methyl modified nucleotide
  modified_base 76: mod_base = OTHER; note = 2'-O-methyl modified nucleotide
  modified_base 77: mod_base = OTHER; note = 2'-O-methyl modified nucleotide
  modified_base 78: mod_base = OTHER; note = 2'-O-methyl modified nucleotide
  modified_base 79: mod_base = OTHER; note = 2'-O-methyl modified nucleotide
  modified_base 80: mod_base = OTHER; note = 2'-O-methyl modified nucleotide
  modified_base 81: mod_base = OTHER; note = 2'-O-methyl modified nucleotide
  modified_base 82: mod_base = OTHER; note = 2'-O-methyl modified nucleotide
  modified_base 83: mod_base = OTHER; note = 2'-O-methyl modified nucleotide
  modified_base 84: mod_base = OTHER; note = 2'-O-methyl modified nucleotide
  modified_base 85: mod_base = OTHER; note = 2'-O-methyl modified nucleotide
  modified_base 86: mod_base = OTHER; note = 2'-O-methyl modified nucleotide
  modified_base 87: mod_base = OTHER; note = 2'-O-methyl modified nucleotide
  modified_base 88: mod_base = OTHER; note = 2'-O-methyl modified nucleotide
  modified_base 89: mod_base = OTHER; note = 2'-O-methyl modified nucleotide
  modified_base 90: mod_base = OTHER; note = 2'-O-methyl modified nucleotide
  modified_base 91: mod_base = OTHER; note = 2'-O-methyl modified nucleotide
  modified_base 92: mod_base = OTHER; note = 2'-O-methyl modified nucleotide
  modified_base 93: mod_base = OTHER; note = 2'-O-methyl modified nucleotide
  modified_base 94: mod_base = OTHER; note = 2'-O-methyl modified nucleotide
  modified_base 95: mod_base = OTHER; note = 2'-O-methyl modified nucleotide
  modified_base 96: mod_base = OTHER; note = 2'-O-methyl modified nucleotide
  modified_base 126: mod_base = OTHER; note = Nucleotide with phosphorothioate linkage
  modified_base 127: mod_base = OTHER; note = 2'-O-methyl modified nucleotide with phosphorothioate linkage
  modified_base 128: mod_base = OTHER; note = 2'-O-methyl modified nucleotide with phosphorothioate linkage
  modified_base 129: mod_base = OTHER; note = 2'-O-methyl modified nucleotide
gagaatcaaaatcggtgaatgttttagagctagaaatagcaagttaaaataaggctagtccgttatcaacttgaaaaagtggcaccgagtcggtgcaagtctgtctgcctatttagtgcaccgattttg

SEQ ID NO: 16040 - RNA, 128 nt, synthetic construct
  source 1..128: mol_type = other RNA
  modified_base 1: mod_base = OTHER; note = 2'-O-methyl modified nucleotide with phosphorothioate linkage
  modified_base 2: mod_base = OTHER; note = 2'-O-methyl modified nucleotide with phosphorothioate linkage
  modified_base 3: mod_base = OTHER; note = 2'-O-methyl modified nucleotide with phosphorothioate linkage
  modified_base 29: mod_base = OTHER; note = 2'-O-methyl modified nucleotide
  modified_base 30: mod_base = OTHER; note = 2'-O-methyl modified nucleotide
  modified_base 31: mod_base = OTHER; note = 2'-O-methyl modified nucleotide
  modified_base 32: mod_base = OTHER; note = 2'-O-methyl modified nucleotide
  modified_base 33: mod_base = OTHER; note = 2'-O-methyl modified nucleotide
  modified_base 34: mod_base = OTHER; note = 2'-O-methyl modified nucleotide
  modified_base 35: mod_base = OTHER; note = 2'-O-methyl modified nucleotide
  modified_base 36: mod_base = OTHER; note = 2'-O-methyl modified nucleotide
  modified_base 37: mod_base = OTHER; note = 2'-O-methyl modified nucleotide
  modified_base 38: mod_base = OTHER; note = 2'-O-methyl modified nucleotide
  modified_base 39: mod_base = OTHER; note = 2'-O-methyl modified nucleotide
  modified_base 40: mod_base = OTHER; note = 2'-O-methyl modified nucleotide
  modified_base 69: mod_base = OTHER; note = 2'-O-methyl modified nucleotide
  modified_base 70: mod_base = OTHER; note = 2'-O-methyl modified nucleotide
  modified_base 71: mod_base = OTHER; note = 2'-O-methyl modified nucleotide
  modified_base 72: mod_base = OTHER; note = 2'-O-methyl modified nucleotide
  modified_base 73: mod_base = OTHER; note = 2'-O-methyl modified nucleotide
  modified_base 74: mod_base = OTHER; note = 2'-O-methyl modified nucleotide
  modified_base 75: mod_base = OTHER; note = 2'-O-methyl modified nucleotide
  modified_base 76: mod_base = OTHER; note = 2'-O-methyl modified nucleotide
  modified_base 77: mod_base = OTHER; note = 2'-O-methyl modified nucleotide
  modified_base 78: mod_base = OTHER; note = 2'-O-methyl modified nucleotide
  modified_base 79: mod_base = OTHER; note = 2'-O-methyl modified nucleotide
  modified_base 80: mod_base = OTHER; note = 2'-O-methyl modified nucleotide
  modified_base 81: mod_base = OTHER; note = 2'-O-methyl modified nucleotide
  modified_base 82: mod_base = OTHER; note = 2'-O-methyl modified nucleotide
  modified_base 83: mod_base = OTHER; note = 2'-O-methyl modified nucleotide
  modified_base 84: mod_base = OTHER; note = 2'-O-methyl modified nucleotide
  modified_base 85: mod_base = OTHER; note = 2'-O-methyl modified nucleotide
  modified_base 86: mod_base = OTHER; note = 2'-O-methyl modified nucleotide
  modified_base 87: mod_base = OTHER; note = 2'-O-methyl modified nucleotide
  modified_base 88: mod_base = OTHER; note = 2'-O-methyl modified nucleotide
  modified_base 89: mod_base = OTHER; note = 2'-O-methyl modified nucleotide
  modified_base 90: mod_base = OTHER; note = 2'-O-methyl modified nucleotide
  modified_base 91: mod_base = OTHER; note = 2'-O-methyl modified nucleotide
  modified_base 92: mod_base = OTHER; note = 2'-O-methyl modified nucleotide
  modified_base 93: mod_base = OTHER; note = 2'-O-methyl modified nucleotide
  modified_base 94: mod_base = OTHER; note = 2'-O-methyl modified nucleotide
  modified_base 95: mod_base = OTHER; note = 2'-O-methyl modified nucleotide
  modified_base 96: mod_base = OTHER; note = 2'-O-methyl modified nucleotide
  modified_base 125: mod_base = OTHER; note = Nucleotide with phosphorothioate linkage
  modified_base 126: mod_base = OTHER; note = 2'-O-methyl modified nucleotide with phosphorothioate linkage
  modified_base 127: mod_base = OTHER; note = 2'-O-methyl modified nucleotide with phosphorothioate linkage
  modified_base 128: mod_base = OTHER; note = 2'-O-methyl modified nucleotide
gagaatcaaaatcggtgaatgttttagagctagaaatagcaagttaaaataaggctagtccgttatcaacttgaaaaagtggcaccgagtcggtgcaagtctgtctgcctatttagtgcaccgatttt

SEQ ID NO: 16041 - RNA, 127 nt, synthetic construct
  source 1..127: mol_type = other RNA
  modified_base 1: mod_base = OTHER; note = 2'-O-methyl modified nucleotide with phosphorothioate linkage
  modified_base 2: mod_base = OTHER; note = 2'-O-methyl modified nucleotide with phosphorothioate linkage
  modified_base 3: mod_base = OTHER; note = 2'-O-methyl modified nucleotide with phosphorothioate linkage
  modified_base 29: mod_base = OTHER; note = 2'-O-methyl modified nucleotide
  modified_base 30: mod_base = OTHER; note = 2'-O-methyl modified nucleotide
  modified_base 31: mod_base = OTHER; note = 2'-O-methyl modified nucleotide
  modified_base 32: mod_base = OTHER; note = 2'-O-methyl modified nucleotide
  modified_base 33: mod_base = OTHER; note = 2'-O-methyl modified nucleotide
  modified_base 34: mod_base = OTHER; note = 2'-O-methyl modified nucleotide
  modified_base 35: mod_base = OTHER; note = 2'-O-methyl modified nucleotide
  modified_base 36: mod_base = OTHER; note = 2'-O-methyl modified nucleotide
  modified_base 37: mod_base = OTHER; note = 2'-O-methyl modified nucleotide
  modified_base 38: mod_base = OTHER; note = 2'-O-methyl modified nucleotide
  modified_base 39: mod_base = OTHER; note = 2'-O-methyl modified nucleotide
  modified_base 40: mod_base = OTHER; note = 2'-O-methyl modified nucleotide
  modified_base 69: mod_base = OTHER; note = 2'-O-methyl modified nucleotide
  modified_base 70: mod_base = OTHER; note = 2'-O-methyl modified nucleotide
  modified_base 71: mod_base = OTHER; note = 2'-O-methyl modified nucleotide
  modified_base 72: mod_base = OTHER; note = 2'-O-methyl modified nucleotide
  modified_base 73: mod_base = OTHER; note = 2'-O-methyl modified nucleotide
  modified_base 74: mod_base = OTHER; note = 2'-O-methyl modified nucleotide
  modified_base 75: mod_base = OTHER; note = 2'-O-methyl modified nucleotide
  modified_base 76: mod_base = OTHER; note = 2'-O-methyl modified nucleotide
  modified_base 77: mod_base = OTHER; note = 2'-O-methyl modified nucleotide
  modified_base 78: mod_base = OTHER; note = 2'-O-methyl modified nucleotide
  modified_base 79: mod_base = OTHER; note = 2'-O-methyl modified nucleotide
  modified_base 80: mod_base = OTHER; note = 2'-O-methyl modified nucleotide
  modified_base 81: mod_base = OTHER; note = 2'-O-methyl modified nucleotide
  modified_base 82: mod_base = OTHER; note = 2'-O-methyl modified nucleotide
  modified_base 83: mod_base = OTHER; note = 2'-O-methyl modified nucleotide
  modified_base 84: mod_base = OTHER; note = 2'-O-methyl modified nucleotide
  modified_base 85: mod_base = OTHER; note = 2'-O-methyl modified nucleotide
  modified_base 86: mod_base = OTHER; note = 2'-O-methyl modified nucleotide
  modified_base 87: mod_base = OTHER; note = 2'-O-methyl modified nucleotide
  modified_base 88: mod_base = OTHER; note = 2'-O-methyl modified nucleotide
  modified_base 89: mod_base = OTHER; note = 2'-O-methyl modified nucleotide
  modified_base 90: mod_base = OTHER; note = 2'-O-methyl modified nucleotide
  modified_base 91: mod_base = OTHER; note = 2'-O-methyl modified nucleotide
  modified_base 92: mod_base = OTHER; note = 2'-O-methyl modified nucleotide
  modified_base 93: mod_base = OTHER; note = 2'-O-methyl modified nucleotide
  modified_base 94: mod_base = OTHER; note = 2'-O-methyl modified nucleotide
  modified_base 95: mod_base = OTHER; note = 2'-O-methyl modified nucleotide
  modified_base 96: mod_base = OTHER; note = 2'-O-methyl modified nucleotide
  modified_base 124: mod_base = OTHER; note = Nucleotide with phosphorothioate linkage
  modified_base 125: mod_base = OTHER; note = 2'-O-methyl modified nucleotide with phosphorothioate linkage
  modified_base 126: mod_base = OTHER; note = 2'-O-methyl modified nucleotide with phosphorothioate linkage
  modified_base 127: mod_base = OTHER; note = 2'-O-methyl modified nucleotide
gagaatcaaaatcggtgaatgttttagagctagaaatagcaagttaaaataaggctagtccgttatcaacttgaaaaagtggcaccgagtcggtgcaagtctgtctgcctatttagtgcaccgattt

SEQ ID NO: 16042 - RNA, 126 nt, synthetic construct
  source 1..126: mol_type = other RNA
  modified_base 1: mod_base = OTHER; note = 2'-O-methyl modified nucleotide with phosphorothioate linkage
  modified_base 2: mod_base = OTHER; note = 2'-O-methyl modified nucleotide with phosphorothioate linkage
  modified_base 3: mod_base = OTHER; note = 2'-O-methyl modified nucleotide with phosphorothioate linkage
  modified_base 29: mod_base = OTHER; note = 2'-O-methyl modified nucleotide
  modified_base 30: mod_base = OTHER; note = 2'-O-methyl modified nucleotide
  modified_base 31: mod_base = OTHER; note = 2'-O-methyl modified nucleotide
  modified_base 32: mod_base = OTHER; note = 2'-O-methyl modified nucleotide
  modified_base 33: mod_base = OTHER; note = 2'-O-methyl modified nucleotide
  modified_base 34: mod_base = OTHER; note = 2'-O-methyl modified nucleotide
  modified_base 35: mod_base = OTHER; note = 2'-O-methyl modified nucleotide
  modified_base 36: mod_base = OTHER; note = 2'-O-methyl modified nucleotide
  modified_base 37: mod_base = OTHER; note = 2'-O-methyl modified nucleotide
  modified_base 38: mod_base = OTHER; note = 2'-O-methyl modified nucleotide
  modified_base 39: mod_base = OTHER; note = 2'-O-methyl modified nucleotide
  modified_base 40: mod_base = OTHER; note = 2'-O-methyl modified nucleotide
  modified_base 69: mod_base = OTHER; note = 2'-O-methyl modified nucleotide
  modified_base 70: mod_base = OTHER; note = 2'-O-methyl modified nucleotide
  modified_base 71: mod_base = OTHER; note = 2'-O-methyl modified nucleotide
  modified_base 72: mod_base = OTHER; note = 2'-O-methyl modified nucleotide
  modified_base 73: mod_base = OTHER; note = 2'-O-methyl modified nucleotide
  modified_base 74: mod_base = OTHER; note = 2'-O-methyl modified nucleotide
  modified_base 75: mod_base = OTHER; note = 2'-O-methyl modified nucleotide
  modified_base 76: mod_base = OTHER; note = 2'-O-methyl modified nucleotide
  modified_base 77: mod_base = OTHER; note = 2'-O-methyl modified nucleotide
  modified_base 78: mod_base = OTHER; note = 2'-O-methyl modified nucleotide
  modified_base 79: mod_base = OTHER; note = 2'-O-methyl modified nucleotide
  modified_base 80: mod_base = OTHER; note = 2'-O-methyl modified nucleotide
  modified_base 81: mod_base = OTHER; note = 2'-O-methyl modified nucleotide
  modified_base 82: mod_base = OTHER; note = 2'-O-methyl modified nucleotide
  modified_base 83: mod_base = OTHER; note = 2'-O-methyl modified nucleotide
  modified_base 84: mod_base = OTHER; note = 2'-O-methyl modified nucleotide
  modified_base 85: mod_base = OTHER; note = 2'-O-methyl modified nucleotide
  modified_base 86: mod_base = OTHER; note = 2'-O-methyl modified nucleotide
  modified_base 87: mod_base = OTHER; note = 2'-O-methyl modified nucleotide
  modified_base 88: mod_base = OTHER; note = 2'-O-methyl modified nucleotide
  modified_base 89: mod_base = OTHER; note = 2'-O-methyl modified nucleotide
  modified_base 90: mod_base = OTHER; note = 2'-O-methyl modified nucleotide
  modified_base 91: mod_base = OTHER; note = 2'-O-methyl modified nucleotide
  modified_base 92: mod_base = OTHER; note = 2'-O-methyl modified nucleotide
  modified_base 93: mod_base = OTHER; note = 2'-O-methyl modified nucleotide
  modified_base 94: mod_base = OTHER; note = 2'-O-methyl modified nucleotide
  modified_base 95: mod_base = OTHER; note = 2'-O-methyl modified nucleotide
  modified_base 96: mod_base = OTHER; note = 2'-O-methyl modified nucleotide
  modified_base 123: mod_base = OTHER; note = Nucleotide with phosphorothioate linkage
  modified_base 124: mod_base = OTHER; note = 2'-O-methyl modified nucleotide with phosphorothioate linkage
  modified_base 125: mod_base = OTHER; note = 2'-O-methyl modified nucleotide with phosphorothioate linkage
  modified_base 126: mod_base = OTHER; note = 2'-O-methyl modified nucleotide
gagaatcaaaatcggtgaatgttttagagctagaaatagcaagttaaaataaggctagtccgttatcaacttgaaaaagtggcaccgagtcggtgcaagtctgtctgcctatttagtgcaccgatt

SEQ ID NO: 16043 - RNA, 121 nt, synthetic construct
  source 1..121: mol_type = other RNA
  modified_base 1: mod_base = OTHER; note = 2'-O-methyl modified nucleotide with phosphorothioate linkage
  modified_base 2: mod_base = OTHER; note = 2'-O-methyl modified nucleotide with phosphorothioate linkage
  modified_base 3: mod_base = OTHER; note = 2'-O-methyl modified nucleotide with phosphorothioate linkage
  modified_base 29: mod_base = OTHER; note = 2'-O-methyl modified nucleotide
  modified_base 30: mod_base = OTHER; note = 2'-O-methyl modified nucleotide
  modified_base 31: mod_base = OTHER; note = 2'-O-methyl modified nucleotide
  modified_base 32: mod_base = OTHER; note = 2'-O-methyl modified nucleotide
  modified_base 33: mod_base = OTHER; note = 2'-O-methyl modified nucleotide
  modified_base 34: mod_base = OTHER; note = 2'-O-methyl modified nucleotide
  modified_base 35: mod_base = OTHER; note = 2'-O-methyl modified nucleotide
  modified_base 36: mod_base = OTHER; note = 2'-O-methyl modified nucleotide
  modified_base 37: mod_base = OTHER; note = 2'-O-methyl modified nucleotide
  modified_base 38: mod_base = OTHER; note = 2'-O-methyl modified nucleotide
  modified_base 39: mod_base = OTHER; note = 2'-O-methyl modified nucleotide
  modified_base 40: mod_base = OTHER; note = 2'-O-methyl modified nucleotide
  modified_base 69: mod_base = OTHER; note = 2'-O-methyl modified nucleotide
  modified_base 70: mod_base = OTHER; note = 2'-O-methyl modified nucleotide
  modified_base 71: mod_base = OTHER; note = 2'-O-methyl modified nucleotide
  modified_base 72: mod_base = OTHER; note = 2'-O-methyl modified nucleotide
  modified_base 73: mod_base = OTHER; note = 2'-O-methyl modified nucleotide
  modified_base 74: mod_base = OTHER; note = 2'-O-methyl modified nucleotide
  modified_base 75: mod_base = OTHER; note = 2'-O-methyl modified nucleotide
  modified_base 76: mod_base = OTHER; note = 2'-O-methyl modified nucleotide
  modified_base 77: mod_base = OTHER; note = 2'-O-methyl modified nucleotide
  modified_base 78: mod_base = OTHER; note = 2'-O-methyl modified nucleotide
  modified_base 79: mod_base = OTHER; note = 2'-O-methyl modified nucleotide
  modified_base 80: mod_base = OTHER; note = 2'-O-methyl modified nucleotide
  modified_base 81: mod_base = OTHER; note = 2'-O-methyl modified nucleotide
  modified_base 82: mod_base = OTHER; note = 2'-O-methyl modified nucleotide
  modified_base 83: mod_base = OTHER; note = 2'-O-methyl modified nucleotide
  modified_base 84: mod_base = OTHER; note = 2'-O-methyl modified nucleotide
  modified_base 85: mod_base = OTHER; note = 2'-O-methyl modified nucleotide
  modified_base 86: mod_base = OTHER; note = 2'-O-methyl modified nucleotide
  modified_base 87: mod_base = OTHER; note = 2'-O-methyl modified nucleotide
  modified_base 88: mod_base = OTHER; note = 2'-O-methyl modified nucleotide
  modified_base 89: mod_base = OTHER; note = 2'-O-methyl modified nucleotide
  modified_base 90: mod_base = OTHER; note = 2'-O-methyl modified nucleotide
  modified_base 91: mod_base = OTHER; note = 2'-O-methyl modified nucleotide
  modified_base 92: mod_base = OTHER; note = 2'-O-methyl modified nucleotide
  modified_base 93: mod_base = OTHER; note = 2'-O-methyl modified nucleotide
  modified_base 94: mod_base = OTHER; note = 2'-O-methyl modified nucleotide
  modified_base 95: mod_base = OTHER; note = 2'-O-methyl modified nucleotide
  modified_base 96: mod_base = OTHER; note = 2'-O-methyl modified nucleotide
  modified_base 118: mod_base = OTHER; note = Nucleotide with phosphorothioate linkage
  modified_base 119: mod_base = OTHER; note = 2'-O-methyl modified nucleotide with phosphorothioate linkage
  modified_base 120: mod_base = OTHER; note = 2'-O-methyl modified nucleotide with phosphorothioate linkage
  modified_base 121: mod_base = OTHER; note = 2'-O-methyl modified nucleotide
gagaatcaaaatcggtgaatgttttagagctagaaatagcaagttaaaataaggctagtccgttatcaacttgaaaaagtggcaccgagtcggtgcctatttagttgacaccgattttgat

SEQ ID NO: 16044 - RNA, 120 nt, synthetic construct
  source 1..120: mol_type = other RNA
  modified_base 1: mod_base = OTHER; note = 2'-O-methyl modified nucleotide with phosphorothioate linkage
  modified_base 2: mod_base = OTHER; note = 2'-O-methyl modified nucleotide with phosphorothioate linkage
  modified_base 3: mod_base = OTHER; note = 2'-O-methyl modified nucleotide with phosphorothioate linkage
  modified_base 29: mod_base = OTHER; note = 2'-O-methyl modified nucleotide
  modified_base 30: mod_base = OTHER; note = 2'-O-methyl modified nucleotide
  modified_base 31: mod_base = OTHER; note = 2'-O-methyl modified nucleotide
  modified_base 32: mod_base = OTHER; note = 2'-O-methyl modified nucleotide
  modified_base 33: mod_base = OTHER; note = 2'-O-methyl modified nucleotide
  modified_base 34: mod_base = OTHER; note = 2'-O-methyl modified nucleotide
  modified_base 35: mod_base = OTHER; note = 2'-O-methyl modified nucleotide
  modified_base 36: mod_base = OTHER; note = 2'-O-methyl modified nucleotide
  modified_base 37: mod_base = OTHER; note = 2'-O-methyl modified nucleotide
  modified_base 38: mod_base = OTHER; note = 2'-O-methyl modified nucleotide
  modified_base 39: mod_base = OTHER; note = 2'-O-methyl modified nucleotide
  modified_base 40: mod_base = OTHER; note = 2'-O-methyl modified nucleotide
  modified_base 69: mod_base = OTHER; note = 2'-O-methyl modified nucleotide
  modified_base 70: mod_base = OTHER; note = 2'-O-methyl modified nucleotide
  modified_base 71: mod_base = OTHER; note = 2'-O-methyl modified nucleotide
  modified_base 72: mod_base = OTHER; note = 2'-O-methyl modified nucleotide
  modified_base 73: mod_base = OTHER; note = 2'-O-methyl modified nucleotide
  modified_base 74: mod_base = OTHER; note = 2'-O-methyl modified nucleotide
  modified_base 75: mod_base = OTHER; note = 2'-O-methyl modified nucleotide
  modified_base 76: mod_base = OTHER; note = 2'-O-methyl modified nucleotide
  modified_base 77: mod_base = OTHER; note = 2'-O-methyl modified nucleotide
  modified_base 78: mod_base = OTHER; note = 2'-O-methyl modified nucleotide
  modified_base 79: mod_base = OTHER; note = 2'-O-methyl modified nucleotide
  modified_base 80: mod_base = OTHER; note = 2'-O-methyl modified nucleotide
  modified_base 81: mod_base = OTHER; note = 2'-O-methyl modified nucleotide
  modified_base 82: mod_base = OTHER; note = 2'-O-methyl modified nucleotide
  modified_base 83: mod_base = OTHER; note = 2'-O-methyl modified nucleotide
  modified_base 84: mod_base = OTHER; note = 2'-O-methyl modified nucleotide
  modified_base 85: mod_base = OTHER; note = 2'-O-methyl modified nucleotide
  modified_base 86: mod_base = OTHER; note = 2'-O-methyl modified nucleotide
  modified_base 87: mod_base = OTHER; note = 2'-O-methyl modified nucleotide
  modified_base 88: mod_base = OTHER; note = 2'-O-methyl modified nucleotide
  modified_base 89: mod_base = OTHER; note = 2'-O-methyl modified nucleotide
  modified_base 90: mod_base = OTHER; note = 2'-O-methyl modified nucleotide
  modified_base 91: mod_base = OTHER; note = 2'-O-methyl modified nucleotide
  modified_base 92: mod_base = OTHER; note = 2'-O-methyl modified nucleotide
  modified_base 93: mod_base = OTHER; note = 2'-O-methyl modified nucleotide
  modified_base 94: mod_base = OTHER; note = 2'-O-methyl modified nucleotide
  modified_base 95: mod_base = OTHER; note = 2'-O-methyl modified nucleotide
  modified_base 96: mod_base = OTHER; note = 2'-O-methyl modified nucleotide
  modified_base 117: mod_base = OTHER; note = Nucleotide with phosphorothioate linkage
  modified_base 118: mod_base = OTHER; note = 2'-O-methyl modified nucleotide with phosphorothioate linkage
  modified_base 119: mod_base = OTHER; note = 2'-O-methyl modified nucleotide with phosphorothioate linkage
  modified_base 120: mod_base = OTHER; note = 2'-O-methyl modified nucleotide
gagaatcaaaatcggtgaatgttttagagctagaaatagcaagttaaaataaggctagtccgttatcaacttgaaaaagtggcaccgagtcggtgcctatttagttgacaccgattttga

SEQ ID NO: 16045 - RNA, 119 nt, synthetic construct
  source 1..119: mol_type = other RNA
  modified_base 1: mod_base = OTHER; note = 2'-O-methyl modified nucleotide with phosphorothioate linkage
  modified_base 2: mod_base = OTHER; note = 2'-O-methyl modified nucleotide with phosphorothioate linkage
  modified_base 3: mod_base = OTHER; note = 2'-O-methyl modified nucleotide with phosphorothioate linkage
  modified_base 29: mod_base = OTHER; note = 2'-O-methyl modified nucleotide
  modified_base 30: mod_base = OTHER; note = 2'-O-methyl modified nucleotide
  modified_base 31: mod_base = OTHER; note = 2'-O-methyl modified nucleotide
  modified_base 32: mod_base = OTHER; note = 2'-O-methyl modified nucleotide
  modified_base 33: mod_base = OTHER; note = 2'-O-methyl modified nucleotide
  modified_base 34: mod_base = OTHER; note = 2'-O-methyl modified nucleotide
  modified_base 35: mod_base = OTHER; note = 2'-O-methyl modified nucleotide
  modified_base 36: mod_base = OTHER; note = 2'-O-methyl modified nucleotide
  modified_base 37: mod_base = OTHER; note = 2'-O-methyl modified nucleotide
  modified_base 38: mod_base = OTHER; note = 2'-O-methyl modified nucleotide
  modified_base 39: mod_base = OTHER; note = 2'-O-methyl modified nucleotide
  modified_base 40: mod_base = OTHER; note = 2'-O-methyl modified nucleotide
  modified_base 69: mod_base = OTHER; note = 2'-O-methyl modified nucleotide
  modified_base 70: mod_base = OTHER; note = 2'-O-methyl modified nucleotide
  modified_base 71: mod_base = OTHER; note = 2'-O-methyl modified nucleotide
  modified_base 72: mod_base = OTHER; note = 2'-O-methyl modified nucleotide
  modified_base 73: mod_base = OTHER; note = 2'-O-methyl modified nucleotide
  modified_base 74: mod_base = OTHER; note = 2'-O-methyl modified nucleotide
  modified_base 75: mod_base = OTHER; note = 2'-O-methyl modified nucleotide
  modified_base 76: mod_base = OTHER; note = 2'-O-methyl modified nucleotide
  modified_base 77: mod_base = OTHER; note = 2'-O-methyl modified nucleotide
  modified_base 78: mod_base = OTHER; note = 2'-O-methyl modified nucleotide
  modified_base 79: mod_base = OTHER; note = 2'-O-methyl modified nucleotide
  modified_base 80: mod_base = OTHER; note = 2'-O-methyl modified nucleotide
  modified_base 81: mod_base = OTHER; note = 2'-O-methyl modified nucleotide
  modified_base 82: mod_base = OTHER; note = 2'-O-methyl modified nucleotide
  modified_base 83: mod_base = OTHER; note = 2'-O-methyl modified nucleotide
  modified_base 84: mod_base = OTHER; note = 2'-O-methyl modified nucleotide
  modified_base 85: mod_base = OTHER; note = 2'-O-methyl modified nucleotide
  modified_base 86: mod_base = OTHER; note = 2'-O-methyl modified nucleotide
  modified_base 87: mod_base = OTHER; note = 2'-O-methyl modified nucleotide
  modified_base 88: mod_base = OTHER; note = 2'-O-methyl modified nucleotide
  modified_base 89: mod_base = OTHER; note = 2'-O-methyl modified nucleotide
  modified_base 90: mod_base = OTHER; note = 2'-O-methyl modified nucleotide
  modified_base 91: mod_base = OTHER; note = 2'-O-methyl modified nucleotide
  modified_base 92: mod_base = OTHER; note = 2'-O-methyl modified nucleotide
  modified_base 93: mod_base = OTHER; note = 2'-O-methyl modified nucleotide
  modified_base 94: mod_base = OTHER; note = 2'-O-methyl modified nucleotide
  modified_base 95: mod_base = OTHER; note = 2'-O-methyl modified nucleotide
  modified_base 96: mod_base = OTHER; note = 2'-O-methyl modified nucleotide
  modified_base 116: mod_base = OTHER; note = Nucleotide with phosphorothioate linkage
  modified_base 117: mod_base = OTHER; note = 2'-O-methyl modified nucleotide with phosphorothioate linkage
  modified_base 118: mod_base = OTHER; note = 2'-O-methyl modified nucleotide with phosphorothioate linkage
  modified_base 119: mod_base = OTHER; note = 2'-O-methyl modified nucleotide
gagaatcaaaatcggtgaatgttttagagctagaaatagcaagttaaaataaggctagtccgttatcaacttgaaaaagtggcaccgagtcggtgcctatttagttgacaccgattttg

SEQ ID NO: 16046 - RNA, 118 nt, synthetic construct
  source 1..118: mol_type = other RNA
  modified_base 1: mod_base = OTHER; note = 2'-O-methyl modified nucleotide with phosphorothioate linkage
  modified_base 2: mod_base = OTHER; note = 2'-O-methyl modified nucleotide with phosphorothioate linkage
  modified_base 3: mod_base = OTHER; note = 2'-O-methyl modified nucleotide with phosphorothioate linkage
  modified_base 29: mod_base = OTHER; note = 2'-O-methyl modified nucleotide
  modified_base 30: mod_base = OTHER; note = 2'-O-methyl modified nucleotide
  modified_base 31: mod_base = OTHER; note = 2'-O-methyl modified nucleotide
  modified_base 32: mod_base = OTHER; note = 2'-O-methyl modified nucleotide
  modified_base 33: mod_base = OTHER; note = 2'-O-methyl modified nucleotide
  modified_base 34: mod_base = OTHER; note = 2'-O-methyl modified nucleotide
  modified_base 35: mod_base = OTHER; note = 2'-O-methyl modified nucleotide
  modified_base 36: mod_base = OTHER; note = 2'-O-methyl modified nucleotide
  modified_base 37: mod_base = OTHER; note = 2'-O-methyl modified nucleotide
  modified_base 38: mod_base = OTHER; note = 2'-O-methyl modified nucleotide
  modified_base 39: mod_base = OTHER; note = 2'-O-methyl modified nucleotide
  modified_base 40: mod_base = OTHER; note = 2'-O-methyl modified nucleotide
  modified_base 69: mod_base = OTHER; note = 2'-O-methyl modified nucleotide
  modified_base 70: mod_base = OTHER; note = 2'-O-methyl modified nucleotide
  modified_base 71: mod_base = OTHER; note = 2'-O-methyl modified nucleotide
  modified_base 72: mod_base = OTHER; note = 2'-O-methyl modified nucleotide
  modified_base 73: mod_base = OTHER; note = 2'-O-methyl modified nucleotide
  modified_base 74: mod_base = OTHER; note = 2'-O-methyl modified nucleotide
  modified_base 75: mod_base = OTHER; note = 2'-O-methyl modified nucleotide
  modified_base 76: mod_base = OTHER; note = 2'-O-methyl modified nucleotide
  modified_base 77: mod_base = OTHER; note = 2'-O-methyl modified nucleotide
  modified_base 78: mod_base = OTHER; note = 2'-O-methyl modified nucleotide
  modified_base 79: mod_base = OTHER; note = 2'-O-methyl modified nucleotide
  modified_base 80: mod_base = OTHER; note = 2'-O-methyl modified nucleotide
  modified_base 81: mod_base = OTHER; note = 2'-O-methyl modified nucleotide
  modified_base 82: mod_base = OTHER; note = 2'-O-methyl modified nucleotide
  modified_base 83: mod_base = OTHER; note = 2'-O-methyl modified nucleotide
  modified_base 84: mod_base = OTHER; note = 2'-O-methyl modified nucleotide
  modified_base 85: mod_base = OTHER; note = 2'-O-methyl modified nucleotide
  modified_base 86: mod_base = OTHER; note = 2'-O-methyl modified nucleotide
  modified_base 87: mod_base = OTHER; note = 2'-O-methyl modified nucleotide
  modified_base 88: mod_base = OTHER; note = 2'-O-methyl modified nucleotide
  modified_base 89: mod_base = OTHER; note = 2'-O-methyl modified nucleotide
  modified_base 90: mod_base = OTHER; note = 2'-O-methyl modified nucleotide
  modified_base 91: mod_base = OTHER; note = 2'-O-methyl modified nucleotide
  modified_base 92: mod_base = OTHER; note = 2'-O-methyl modified nucleotide
  modified_base 93: mod_base = OTHER; note = 2'-O-methyl modified nucleotide
  modified_base 94: mod_base = OTHER; note = 2'-O-methyl modified nucleotide
  modified_base 95: mod_base = OTHER; note = 2'-O-methyl modified nucleotide
  modified_base 96: mod_base = OTHER; note = 2'-O-methyl modified nucleotide
  modified_base 115: mod_base = OTHER; note = Nucleotide with phosphorothioate linkage
  modified_base 116: mod_base = OTHER; note = 2'-O-methyl modified nucleotide with phosphorothioate linkage
  modified_base 117: mod_base = OTHER; note = 2'-O-methyl modified nucleotide with phosphorothioate linkage
  modified_base 118: mod_base = OTHER; note = 2'-O-methyl modified nucleotide
gagaatcaaaatcggtgaatgttttagagctagaaatagcaagttaaaataaggctagtccgttatcaacttgaaaaagtggcaccgagtcggtgcctatttagttgacaccgatttt

SEQ ID NO: 16047 - RNA, 117 nt, synthetic construct
  source 1..117: mol_type = other RNA
  modified_base 1: mod_base = OTHER; note = 2'-O-methyl modified nucleotide with phosphorothioate linkage
  modified_base 2: mod_base = OTHER; note = 2'-O-methyl modified nucleotide with phosphorothioate linkage
  modified_base 3: mod_base = OTHER; note = 2'-O-methyl modified nucleotide with phosphorothioate linkage
  modified_base 29: mod_base = OTHER; note = 2'-O-methyl modified nucleotide
  modified_base 30: mod_base = OTHER; note = 2'-O-methyl modified nucleotide
  modified_base 31: mod_base = OTHER; note = 2'-O-methyl modified nucleotide
  modified_base 32: mod_base = OTHER; note = 2'-O-methyl modified nucleotide
  modified_base 33: mod_base = OTHER; note = 2'-O-methyl modified nucleotide
  modified_base 34: mod_base = OTHER; note = 2'-O-methyl modified nucleotide
  modified_base 35: mod_base = OTHER; note = 2'-O-methyl modified nucleotide
  modified_base 36: mod_base = OTHER; note = 2'-O-methyl modified nucleotide
  modified_base 37: mod_base = OTHER; note = 2'-O-methyl modified nucleotide
  modified_base 38: mod_base = OTHER; note = 2'-O-methyl modified nucleotide
  modified_base 39: mod_base = OTHER; note = 2'-O-methyl modified nucleotide
  modified_base 40: mod_base = OTHER; note = 2'-O-methyl modified nucleotide
  modified_base 69: mod_base = OTHER; note = 2'-O-methyl modified nucleotide
  modified_base 70: mod_base = OTHER; note = 2'-O-methyl modified nucleotide
  modified_base 71: mod_base = OTHER; note = 2'-O-methyl modified nucleotide
  modified_base 72: mod_base = OTHER; note = 2'-O-methyl modified nucleotide
  modified_base 73: mod_base = OTHER; note = 2'-O-methyl modified nucleotide
  modified_base 74: mod_base = OTHER; note = 2'-O-methyl modified nucleotide
  modified_base 75: mod_base = OTHER; note = 2'-O-methyl modified nucleotide
  modified_base 76: mod_base = OTHER; note = 2'-O-methyl modified nucleotide
  modified_base 77: mod_base = OTHER; note = 2'-O-methyl modified nucleotide
  modified_base 78: mod_base = OTHER; note = 2'-O-methyl modified nucleotide
  modified_base 79: mod_base = OTHER; note = 2'-O-methyl modified nucleotide
  modified_base 80: mod_base = OTHER; note = 2'-O-methyl modified nucleotide
  modified_base 81: mod_base = OTHER; note = 2'-O-methyl modified nucleotide
  modified_base 82: mod_base = OTHER; note = 2'-O-methyl modified nucleotide
  modified_base 83: mod_base = OTHER; note = 2'-O-methyl modified nucleotide
  modified_base 84: mod_base = OTHER; note = 2'-O-methyl modified nucleotide
  modified_base 85: mod_base = OTHER; note = 2'-O-methyl modified nucleotide
  modified_base 86: mod_base = OTHER; note = 2'-O-methyl modified nucleotide
  modified_base 87: mod_base = OTHER; note = 2'-O-methyl modified nucleotide
  modified_base 88: mod_base = OTHER; note = 2'-O-methyl modified nucleotide
  modified_base 89: mod_base = OTHER; note = 2'-O-methyl modified nucleotide
  modified_base 90: mod_base = OTHER; note = 2'-O-methyl modified nucleotide
  modified_base 91: mod_base = OTHER; note = 2'-O-methyl modified nucleotide
  modified_base 92: mod_base = OTHER; note = 2'-O-methyl modified nucleotide
  modified_base 93: mod_base = OTHER; note = 2'-O-methyl modified nucleotide
  modified_base 94: mod_base = OTHER; note = 2'-O-methyl modified nucleotide
  modified_base 95: mod_base = OTHER; note = 2'-O-methyl modified nucleotide
  modified_base 96: mod_base = OTHER; note = 2'-O-methyl modified nucleotide
  modified_base 114: mod_base = OTHER; note = Nucleotide with phosphorothioate linkage
  modified_base 115: mod_base = OTHER; note = 2'-O-methyl modified nucleotide with phosphorothioate linkage
  modified_base 116: mod_base = OTHER; note = 2'-O-methyl modified nucleotide with phosphorothioate linkage
  modified_base 117: mod_base = OTHER; note = 2'-O-methyl modified nucleotide
gagaatcaaaatcggtgaatgttttagagctagaaatagcaagttaaaataaggctagtccgttatcaacttgaaaaagtggcaccgagtcggtgcctatttagttgacaccgattt

SEQ ID NO: 16048 - RNA, 116 nt, synthetic construct
  source 1..116: mol_type = other RNA
  modified_base 1: mod_base = OTHER; note = 2'-O-methyl modified nucleotide with phosphorothioate linkage
  modified_base 2: mod_base = OTHER; note = 2'-O-methyl modified nucleotide with phosphorothioate linkage
  modified_base 3: mod_base = OTHER; note = 2'-O-methyl modified nucleotide with phosphorothioate linkage
  modified_base 29: mod_base = OTHER; note = 2'-O-methyl modified nucleotide
  modified_base 30: mod_base = OTHER; note = 2'-O-methyl modified nucleotide
  modified_base 31: mod_base = OTHER; note = 2'-O-methyl modified nucleotide
  modified_base 32: mod_base = OTHER; note = 2'-O-methyl modified nucleotide
  modified_base 33: mod_base = OTHER; note = 2'-O-methyl modified nucleotide
  modified_base 34: mod_base = OTHER; note = 2'-O-methyl modified nucleotide
  modified_base 35: mod_base = OTHER; note = 2'-O-methyl modified nucleotide
  modified_base 36: mod_base = OTHER; note = 2'-O-methyl modified nucleotide
  modified_base 37: mod_base = OTHER; note = 2'-O-methyl modified nucleotide
  modified_base 38: mod_base = OTHER; note = 2'-O-methyl modified nucleotide
  modified_base 39: mod_base = OTHER; note = 2'-O-methyl modified nucleotide
  modified_base 40: mod_base = OTHER; note = 2'-O-methyl modified nucleotide
  modified_base 69: mod_base = OTHER; note = 2'-O-methyl modified nucleotide
  modified_base 70: mod_base = OTHER; note = 2'-O-methyl modified nucleotide
  modified_base 71: mod_base = OTHER; note = 2'-O-methyl modified nucleotide
  modified_base 72: mod_base = OTHER; note = 2'-O-methyl modified nucleotide
  modified_base 73: mod_base = OTHER; note = 2'-O-methyl modified nucleotide
  modified_base 74: mod_base = OTHER; note = 2'-O-methyl modified nucleotide
  modified_base 75: mod_base = OTHER; note = 2'-O-methyl modified nucleotide
  modified_base 76: mod_base = OTHER; note = 2'-O-methyl modified nucleotide
  modified_base 77: mod_base = OTHER; note = 2'-O-methyl modified nucleotide
  modified_base 78: mod_base = OTHER; note = 2'-O-methyl modified nucleotide
  modified_base 79: mod_base = OTHER; note = 2'-O-methyl modified nucleotide
  modified_base 80: mod_base = OTHER; note = 2'-O-methyl modified nucleotide
  modified_base 81: mod_base = OTHER; note = 2'-O-methyl modified nucleotide
  modified_base 82: mod_base = OTHER; note = 2'-O-methyl modified nucleotide
  modified_base 83: mod_base = OTHER; note = 2'-O-methyl modified nucleotide
  modified_base 84: mod_base = OTHER; note = 2'-O-methyl modified nucleotide
  modified_base 85: mod_base = OTHER; note = 2'-O-methyl modified nucleotide
  modified_base 86: mod_base = OTHER; note = 2'-O-methyl modified nucleotide
  modified_base 87: mod_base = OTHER; note = 2'-O-methyl modified nucleotide
  modified_base 88: mod_base = OTHER; note = 2'-O-methyl modified nucleotide
  modified_base 89: mod_base = OTHER; note = 2'-O-methyl modified nucleotide
  modified_base 90: mod_base = OTHER; note = 2'-O-methyl modified nucleotide
  modified_base 91: mod_base = OTHER; note = 2'-O-methyl modified nucleotide
  modified_base 92: mod_base = OTHER; note = 2'-O-methyl modified nucleotide
  modified_base 93: mod_base = OTHER; note = 2'-O-methyl modified nucleotide
  modified_base 94: mod_base = OTHER; note = 2'-O-methyl modified nucleotide
  modified_base 95: mod_base = OTHER; note = 2'-O-methyl modified nucleotide
  modified_base 96: mod_base = OTHER; note = 2'-O-methyl modified nucleotide
  modified_base 113: mod_base = OTHER; note = Nucleotide with phosphorothioate linkage
  modified_base 114: mod_base = OTHER; note = 2'-O-methyl modified nucleotide with phosphorothioate linkage
  modified_base 115: mod_base = OTHER; note = 2'-O-methyl modified nucleotide with phosphorothioate linkage
  modified_base 116: mod_base = OTHER; note = 2'-O-methyl modified nucleotide
gagaatcaaaatcggtgaatgttttagagctagaaatagcaagttaaaataaggctagtccgttatcaacttgaaaaagtggcaccgagtcggtgcctatttagttgacaccgatt

SEQ ID NO: 16049 - RNA, 123 nt, synthetic construct
  source 1..123: mol_type = other RNA
  modified_base 1: mod_base = OTHER; note = 2'-O-methyl modified nucleotide with phosphorothioate linkage
  modified_base 2: mod_base = OTHER; note = 2'-O-methyl modified nucleotide with phosphorothioate linkage
  modified_base 3: mod_base = OTHER; note = 2'-O-methyl modified nucleotide with phosphorothioate linkage
  modified_base 29: mod_base = OTHER; note = 2'-O-methyl modified nucleotide
  modified_base 30: mod_base = OTHER; note = 2'-O-methyl modified nucleotide
  modified_base 31: mod_base = OTHER; note = 2'-O-methyl modified nucleotide
  modified_base 32: mod_base = OTHER; note = 2'-O-methyl modified nucleotide
  modified_base 33: mod_base = OTHER; note = 2'-O-methyl modified nucleotide
  modified_base 34: mod_base = OTHER; note = 2'-O-methyl modified nucleotide
  modified_base 35: mod_base = OTHER; note = 2'-O-methyl modified nucleotide
  modified_base 36: mod_base = OTHER; note = 2'-O-methyl modified nucleotide
  modified_base 37: mod_base = OTHER; note = 2'-O-methyl modified nucleotide
  modified_base 38: mod_base = OTHER; note = 2'-O-methyl modified nucleotide
  modified_base 39: mod_base = OTHER; note = 2'-O-methyl modified nucleotide
  modified_base 40: mod_base = OTHER; note = 2'-O-methyl modified nucleotide
  modified_base 69: mod_base = OTHER; note = 2'-O-methyl modified nucleotide
  modified_base 70: mod_base = OTHER; note = 2'-O-methyl modified nucleotide
  modified_base 71: mod_base = OTHER; note = 2'-O-methyl modified nucleotide
  modified_base 72: mod_base = OTHER; note = 2'-O-methyl modified nucleotide
  modified_base 73: mod_base = OTHER; note = 2'-O-methyl modified nucleotide
  modified_base 74: mod_base = OTHER; note = 2'-O-methyl modified nucleotide
  modified_base 75: mod_base = OTHER; note = 2'-O-methyl modified nucleotide
  modified_base 76: mod_base = OTHER; note = 2'-O-methyl modified nucleotide
  modified_base 77: mod_base = OTHER; note = 2'-O-methyl modified nucleotide
  modified_base 78: mod_base = OTHER; note = 2'-O-methyl modified nucleotide
  modified_base 79: mod_base = OTHER; note = 2'-O-methyl modified nucleotide
  modified_base 80: mod_base = OTHER; note = 2'-O-methyl modified nucleotide
  modified_base 81: mod_base = OTHER; note = 2'-O-methyl modified nucleotide
  modified_base 82: mod_base = OTHER; note = 2'-O-methyl modified nucleotide
  modified_base 83: mod_base = OTHER; note = 2'-O-methyl modified nucleotide
  modified_base 84: mod_base = OTHER; note = 2'-O-methyl modified nucleotide
  modified_base 85: mod_base = OTHER; note = 2'-O-methyl modified nucleotide
  modified_base 86: mod_base = OTHER; note = 2'-O-methyl modified nucleotide
  modified_base 87: mod_base = OTHER; note = 2'-O-methyl modified nucleotide
  modified_base 88: mod_base = OTHER; note = 2'-O-methyl modified nucleotide
  modified_base 89: mod_base = OTHER; note = 2'-O-methyl modified nucleotide
  modified_base 90: mod_base = OTHER; note = 2'-O-methyl modified nucleotide
  modified_base 91: mod_base = OTHER; note = 2'-O-methyl modified nucleotide
  modified_base 92: mod_base = OTHER; note = 2'-O-methyl modified nucleotide
  modified_base 93: mod_base = OTHER; note = 2'-O-methyl modified nucleotide
  modified_base 94: mod_base = OTHER; note = 2'-O-methyl modified nucleotide
  modified_base 95: mod_base = OTHER; note = 2'-O-methyl modified nucleotide
  modified_base 96: mod_base = OTHER; note = 2'-O-methyl modified nucleotide
  modified_base 120: mod_base = OTHER; note = Nucleotide with phosphorothioate linkage
  modified_base 121: mod_base = OTHER; note = 2'-O-methyl modified nucleotide with phosphorothioate linkage
  modified_base 122: mod_base = OTHER; note = 2'-O-methyl modified nucleotide with phosphorothioate linkage
  modified_base 123: mod_base = OTHER; note = 2'-O-methyl modified nucleotide
gagaatcaaaatcggtgaatgttttagagctagaaatagcaagttaaaataaggctagtccgttatcaacttgaaaaagtggcaccgagtcggtgcgcctatttagttgacaccgattttgat

SEQ ID NO: 16050 - RNA, 122 nt, synthetic construct
  source 1..122: mol_type = other RNA
  modified_base 1: mod_base = OTHER; note = 2'-O-methyl modified nucleotide with phosphorothioate linkage
  modified_base 2: mod_base = OTHER; note = 2'-O-methyl modified nucleotide with phosphorothioate linkage
  modified_base 3: mod_base = OTHER; note = 2'-O-methyl modified nucleotide with phosphorothioate linkage
  modified_base 29: mod_base = OTHER; note = 2'-O-methyl modified nucleotide
  modified_base 30: mod_base = OTHER; note = 2'-O-methyl modified nucleotide
  modified_base 31: mod_base = OTHER; note = 2'-O-methyl modified nucleotide
  modified_base 32: mod_base = OTHER; note = 2'-O-methyl modified nucleotide
  modified_base 33: mod_base = OTHER; note = 2'-O-methyl modified nucleotide
  modified_base 34: mod_base = OTHER; note = 2'-O-methyl modified nucleotide
  modified_base 35: mod_base = OTHER; note = 2'-O-methyl modified nucleotide
  modified_base 36: mod_base = OTHER; note = 2'-O-methyl modified nucleotide
  modified_base 37: mod_base = OTHER; note = 2'-O-methyl modified nucleotide
  modified_base 38: mod_base = OTHER; note = 2'-O-methyl modified nucleotide
  modified_base 39: mod_base = OTHER; note = 2'-O-methyl modified nucleotide
  modified_base 40: mod_base = OTHER; note = 2'-O-methyl modified nucleotide
  modified_base 69: mod_base = OTHER; note = 2'-O-methyl modified nucleotide
  modified_base 70: mod_base = OTHER; note = 2'-O-methyl modified nucleotide
  modified_base 71: mod_base = OTHER; note = 2'-O-methyl modified nucleotide
  modified_base 72: mod_base = OTHER; note = 2'-O-methyl modified nucleotide
  modified_base 73: mod_base = OTHER; note = 2'-O-methyl modified nucleotide
  modified_base 74: mod_base = OTHER; note = 2'-O-methyl modified nucleotide
  modified_base 75: mod_base = OTHER; note = 2'-O-methyl modified nucleotide
  modified_base 76: mod_base = OTHER; note = 2'-O-methyl modified nucleotide
  modified_base 77: mod_base = OTHER; note = 2'-O-methyl modified nucleotide
  modified_base 78: mod_base = OTHER; note = 2'-O-methyl modified nucleotide
  modified_base 79: mod_base = OTHER; note = 2'-O-methyl modified nucleotide
  modified_base 80: mod_base = OTHER; note = 2'-O-methyl modified nucleotide
  modified_base 81: mod_base = OTHER; note = 2'-O-methyl modified nucleotide
  modified_base 82: mod_base = OTHER; note = 2'-O-methyl modified nucleotide
  modified_base 83: mod_base = OTHER; note = 2'-O-methyl modified nucleotide
  modified_base 84: mod_base = OTHER; note = 2'-O-methyl modified nucleotide
  modified_base 85: mod_base = OTHER; note = 2'-O-methyl modified nucleotide
  modified_base 86: mod_base = OTHER; note = 2'-O-methyl modified nucleotide
  modified_base 87: mod_base = OTHER; note = 2'-O-methyl modified nucleotide
  modified_base 88: mod_base = OTHER; note = 2'-O-methyl modified nucleotide
  modified_base 89: mod_base = OTHER; note = 2'-O-methyl modified nucleotide
  modified_base 90: mod_base = OTHER; note = 2'-O-methyl modified nucleotide
  modified_base 91: mod_base = OTHER; note = 2'-O-methyl modified nucleotide
  modified_base 92: mod_base = OTHER; note = 2'-O-methyl modified nucleotide
  modified_base 93: mod_base = OTHER; note = 2'-O-methyl modified nucleotide
  modified_base 94: mod_base = OTHER; note = 2'-O-methyl modified nucleotide
  modified_base 95: mod_base = OTHER; note = 2'-O-methyl modified nucleotide
  modified_base 96: mod_base = OTHER; note = 2'-O-methyl modified nucleotide
  modified_base 119: mod_base = OTHER; note = Nucleotide with phosphorothioate linkage
  modified_base 120: mod_base = OTHER; note = 2'-O-methyl modified nucleotide with phosphorothioate linkage
  modified_base 121: mod_base = OTHER; note = 2'-O-methyl modified nucleotide with phosphorothioate linkage
  modified_base 122: mod_base = OTHER; note = 2'-O-methyl modified nucleotide
gagaatcaaaatcggtgaatgttttagagctagaaatagcaagttaaaataaggctagtccgttatcaacttgaaaaagtggcaccgagtcggtgcgcctatttagttgacaccgattttga

SEQ ID NO: 16051 - RNA, 121 nt, synthetic construct
  source 1..121: mol_type = other RNA
  modified_base 1: mod_base = OTHER; note = 2'-O-methyl modified nucleotide with phosphorothioate linkage
  modified_base 2: mod_base = OTHER; note = 2'-O-methyl modified nucleotide with phosphorothioate linkage
  modified_base 3: mod_base = OTHER; note = 2'-O-methyl modified nucleotide with phosphorothioate linkage
  modified_base 29: mod_base = OTHER; note = 2'-O-methyl modified nucleotide
  modified_base 30: mod_base = OTHER; note = 2'-O-methyl modified nucleotide
  modified_base 31: mod_base = OTHER; note = 2'-O-methyl modified nucleotide
  modified_base 32: mod_base = OTHER; note = 2'-O-methyl modified nucleotide
  modified_base 33: mod_base = OTHER; note = 2'-O-methyl modified nucleotide
  modified_base 34: mod_base = OTHER; note = 2'-O-methyl modified nucleotide
  modified_base 35: mod_base = OTHER; note = 2'-O-methyl modified nucleotide
  modified_base 36: mod_base = OTHER; note = 2'-O-methyl modified nucleotide
  modified_base 37: mod_base = OTHER; note = 2'-O-methyl modified nucleotide
  modified_base 38: mod_base = OTHER; note = 2'-O-methyl modified nucleotide
  modified_base 39: mod_base = OTHER; note = 2'-O-methyl modified nucleotide
  modified_base 40: mod_base = OTHER; note = 2'-O-methyl modified nucleotide
  modified_base 69: mod_base = OTHER; note = 2'-O-methyl modified nucleotide
  modified_base 70: mod_base = OTHER; note = 2'-O-methyl modified nucleotide
  modified_base 71: mod_base = OTHER; note = 2'-O-methyl modified nucleotide
  modified_base 72: mod_base = OTHER; note = 2'-O-methyl modified nucleotide
  modified_base 73: mod_base = OTHER; note = 2'-O-methyl modified nucleotide
  modified_base 74: mod_base = OTHER; note = 2'-O-methyl modified nucleotide
  modified_base 75: mod_base = OTHER; note = 2'-O-methyl modified nucleotide
  modified_base 76: mod_base = OTHER; note = 2'-O-methyl modified nucleotide
  modified_base 77: mod_base = OTHER; note = 2'-O-methyl modified nucleotide
  modified_base 78: mod_base = OTHER; note = 2'-O-methyl modified nucleotide
  modified_base 79: mod_base = OTHER; note = 2'-O-methyl modified nucleotide
  modified_base 80: mod_base = OTHER; note = 2'-O-methyl modified nucleotide
  modified_base 81: mod_base = OTHER; note = 2'-O-methyl modified nucleotide
  modified_base 82: mod_base = OTHER; note = 2'-O-methyl modified nucleotide
  modified_base 83: mod_base = OTHER; note = 2'-O-methyl modified nucleotide
  modified_base 84: mod_base = OTHER; note = 2'-O-methyl modified nucleotide
  modified_base 85: mod_base = OTHER; note = 2'-O-methyl modified nucleotide
  modified_base 86: mod_base = OTHER; note = 2'-O-methyl modified nucleotide
  modified_base 87: mod_base = OTHER; note = 2'-O-methyl modified nucleotide
  modified_base 88: mod_base = OTHER; note = 2'-O-methyl modified nucleotide
  modified_base 89: mod_base = OTHER; note = 2'-O-methyl modified nucleotide
  modified_base 90: mod_base = OTHER; note = 2'-O-methyl modified nucleotide
  modified_base 91: mod_base = OTHER; note = 2'-O-methyl modified nucleotide
  modified_base 92: mod_base = OTHER; note = 2'-O-methyl modified nucleotide
  modified_base 93: mod_base = OTHER; note = 2'-O-methyl modified nucleotide
  modified_base 94: mod_base = OTHER; note = 2'-O-methyl modified nucleotide
  modified_base 95: mod_base = OTHER; note = 2'-O-methyl modified nucleotide
  modified_base 96: mod_base = OTHER; note = 2'-O-methyl modified nucleotide
  modified_base 118: mod_base = OTHER; note = Nucleotide with phosphorothioate linkage
  modified_base 119: mod_base = OTHER; note = 2'-O-methyl modified nucleotide with phosphorothioate linkage
  modified_base 120: mod_base = OTHER; note = 2'-O-methyl modified nucleotide with phosphorothioate linkage
  modified_base 121: mod_base = OTHER; note = 2'-O-methyl modified nucleotide
gagaatcaaaatcggtgaatgttttagagctagaaatagcaagttaaaataaggctagtccgttatcaacttgaaaaagtggcaccgagtcggtgcgcctatttagttgacaccgattttg

SEQ ID NO: 16052 - RNA, 120 nt, synthetic construct
  source 1..120: mol_type = other RNA
  modified_base 1: mod_base = OTHER; note = 2'-O-methyl modified nucleotide with phosphorothioate linkage
  modified_base 2: mod_base = OTHER; note = 2'-O-methyl modified nucleotide with phosphorothioate linkage
  modified_base 3: mod_base = OTHER; note = 2'-O-methyl modified nucleotide with phosphorothioate linkage
  modified_base 29: mod_base = OTHER; note = 2'-O-methyl modified nucleotide
  modified_base 30: mod_base = OTHER; note = 2'-O-methyl modified nucleotide
  modified_base 31: mod_base = OTHER; note = 2'-O-methyl modified nucleotide
  modified_base 32: mod_base = OTHER; note = 2'-O-methyl modified nucleotide
  modified_base 33: mod_base = OTHER; note = 2'-O-methyl modified nucleotide
  modified_base 34: mod_base = OTHER; note = 2'-O-methyl modified nucleotide
  modified_base 35: mod_base = OTHER; note = 2'-O-methyl modified nucleotide
  modified_base 36: mod_base = OTHER; note = 2'-O-methyl modified nucleotide
  modified_base 37: mod_base = OTHER; note = 2'-O-methyl modified nucleotide
  modified_base 38: mod_base = OTHER; note = 2'-O-methyl modified nucleotide
  modified_base 39: mod_base = OTHER; note = 2'-O-methyl modified nucleotide
  modified_base 40: mod_base = OTHER; note = 2'-O-methyl modified nucleotide
  modified_base 69: mod_base = OTHER; note = 2'-O-methyl modified nucleotide
  modified_base 70: mod_base = OTHER; note = 2'-O-methyl modified nucleotide
  modified_base 71: mod_base = OTHER; note = 2'-O-methyl modified nucleotide
  modified_base 72: mod_base = OTHER; note = 2'-O-methyl modified nucleotide
  modified_base 73: mod_base = OTHER; note = 2'-O-methyl modified nucleotide
  modified_base 74: mod_base = OTHER; note = 2'-O-methyl modified nucleotide
  modified_base 75: mod_base = OTHER; note = 2'-O-methyl modified nucleotide
  modified_base 76: mod_base = OTHER; note = 2'-O-methyl modified nucleotide
  modified_base 77: mod_base = OTHER; note = 2'-O-methyl modified nucleotide
  modified_base 78: mod_base = OTHER; note = 2'-O-methyl modified nucleotide
  modified_base 79: mod_base = OTHER; note = 2'-O-methyl modified nucleotide
  modified_base 80: mod_base = OTHER; note = 2'-O-methyl modified nucleotide
  modified_base 81: mod_base = OTHER; note = 2'-O-methyl modified nucleotide
  modified_base 82: mod_base = OTHER; note = 2'-O-methyl modified nucleotide
  modified_base 83: mod_base = OTHER; note = 2'-O-methyl modified nucleotide
  modified_base 84: mod_base = OTHER; note = 2'-O-methyl modified nucleotide
  modified_base 85: mod_base = OTHER; note = 2'-O-methyl modified nucleotide
  modified_base 86: mod_base = OTHER; note = 2'-O-methyl modified nucleotide
  modified_base 87: mod_base = OTHER; note = 2'-O-methyl modified nucleotide
  modified_base 88: mod_base = OTHER; note = 2'-O-methyl modified nucleotide
  modified_base 89: mod_base = OTHER; note = 2'-O-methyl modified nucleotide
  modified_base 90: mod_base = OTHER; note = 2'-O-methyl modified nucleotide
  modified_base 91: mod_base = OTHER; note = 2'-O-methyl modified nucleotide
  modified_base 92: mod_base = OTHER; note = 2'-O-methyl modified nucleotide
  modified_base 93: mod_base = OTHER; note = 2'-O-methyl modified nucleotide
  modified_base 94: mod_base = OTHER; note = 2'-O-methyl modified nucleotide
  modified_base 95: mod_base = OTHER; note = 2'-O-methyl modified nucleotide
  modified_base 96: mod_base = OTHER; note = 2'-O-methyl modified nucleotide
  modified_base 117: mod_base = OTHER; note = Nucleotide with phosphorothioate linkage
  modified_base 118: mod_base = OTHER; note = 2'-O-methyl modified nucleotide with phosphorothioate linkage
  modified_base 119: mod_base = OTHER; note = 2'-O-methyl modified nucleotide with phosphorothioate linkage
  modified_base 120: mod_base = OTHER; note = 2'-O-methyl modified nucleotide
gagaatcaaaatcggtgaatgttttagagctagaaatagcaagttaaaataaggctagtccgttatcaacttgaaaaagtggcaccgagtcggtgcgcctatttagttgacaccgatttt

SEQ ID NO: 16053 - RNA, 119 nt, synthetic construct
  source 1..119: mol_type = other RNA
  modified_base 1: mod_base = OTHER; note = 2'-O-methyl modified nucleotide with phosphorothioate linkage
  modified_base 2: mod_base = OTHER; note = 2'-O-methyl modified nucleotide with phosphorothioate linkage
  modified_base 3: mod_base = OTHER; note = 2'-O-methyl modified nucleotide with phosphorothioate linkage
  modified_base 29: mod_base = OTHER; note = 2'-O-methyl modified nucleotide
  modified_base 30: mod_base = OTHER; note = 2'-O-methyl modified nucleotide
  modified_base 31: mod_base = OTHER; note = 2'-O-methyl modified nucleotide
  modified_base 32: mod_base = OTHER; note = 2'-O-methyl modified nucleotide
  modified_base 33: mod_base = OTHER; note = 2'-O-methyl modified nucleotide
  modified_base 34: mod_base = OTHER; note = 2'-O-methyl modified nucleotide
  modified_base 35: mod_base = OTHER; note = 2'-O-methyl modified nucleotide
  modified_base 36: mod_base = OTHER; note = 2'-O-methyl modified nucleotide
  modified_base 37: mod_base = OTHER; note = 2'-O-methyl modified nucleotide
  modified_base 38: mod_base = OTHER; note = 2'-O-methyl modified nucleotide
  modified_base 39: mod_base = OTHER; note = 2'-O-methyl modified nucleotide
  modified_base 40: mod_base = OTHER; note = 2'-O-methyl modified nucleotide
  modified_base 69: mod_base = OTHER; note = 2'-O-methyl modified nucleotide
  modified_base 70: mod_base = OTHER; note = 2'-O-methyl modified nucleotide
  modified_base 71: mod_base = OTHER; note = 2'-O-methyl modified nucleotide
  modified_base 72: mod_base = OTHER; note = 2'-O-methyl modified nucleotide
  modified_base 73: mod_base = OTHER; note = 2'-O-methyl modified nucleotide
  modified_base 74: mod_base = OTHER; note = 2'-O-methyl modified nucleotide
  modified_base 75: mod_base = OTHER; note = 2'-O-methyl modified nucleotide
  modified_base 76: mod_base = OTHER; note = 2'-O-methyl modified nucleotide
  modified_base 77: mod_base = OTHER; note = 2'-O-methyl modified nucleotide
  modified_base 78: mod_base = OTHER; note = 2'-O-methyl modified nucleotide
  modified_base 79: mod_base = OTHER; note = 2'-O-methyl modified nucleotide
  modified_base 80: mod_base = OTHER; note = 2'-O-methyl modified nucleotide
  modified_base 81: mod_base = OTHER; note = 2'-O-methyl modified nucleotide
  modified_base 82: mod_base = OTHER; note = 2'-O-methyl modified nucleotide
  modified_base 83: mod_base = OTHER; note = 2'-O-methyl modified nucleotide
  modified_base 84: mod_base = OTHER; note = 2'-O-methyl modified nucleotide
  modified_base 85: mod_base = OTHER; note = 2'-O-methyl modified nucleotide
  modified_base 86: mod_base = OTHER; note = 2'-O-methyl modified nucleotide
  modified_base 87: mod_base = OTHER; note = 2'-O-methyl modified nucleotide
  modified_base 88: mod_base = OTHER; note = 2'-O-methyl modified nucleotide
  modified_base 89: mod_base = OTHER; note = 2'-O-methyl modified nucleotide
  modified_base 90: mod_base = OTHER; note = 2'-O-methyl modified nucleotide
  modified_base 91: mod_base = OTHER; note = 2'-O-methyl modified nucleotide
  modified_base 92: mod_base = OTHER; note = 2'-O-methyl modified nucleotide
  modified_base 93: mod_base = OTHER; note = 2'-O-methyl modified nucleotide
  modified_base 94: mod_base = OTHER; note = 2'-O-methyl modified nucleotide
  modified_base 95: mod_base = OTHER; note = 2'-O-methyl modified nucleotide
  modified_base 96: mod_base = OTHER; note = 2'-O-methyl modified nucleotide
  modified_base 116: mod_base = OTHER; note = Nucleotide with phosphorothioate linkage
  modified_base 117: mod_base = OTHER; note = 2'-O-methyl modified nucleotide with phosphorothioate linkage
  modified_base 118: mod_base = OTHER; note = 2'-O-methyl modified nucleotide with phosphorothioate linkage
  modified_base 119: mod_base = OTHER; note = 2'-O-methyl modified nucleotide
gagaatcaaaatcggtgaatgttttagagctagaaatagcaagttaaaataaggctagtccgttatcaacttgaaaaagtggcaccgagtcggtgcgcctatttagttgacaccgattt

SEQ ID NO: 16054 - RNA, 118 nt, synthetic construct
  source 1..118: mol_type = other RNA
  modified_base 1: mod_base = OTHER; note = 2'-O-methyl modified nucleotide with phosphorothioate linkage
  modified_base 2: mod_base = OTHER; note = 2'-O-methyl modified nucleotide with phosphorothioate linkage
  modified_base 3: mod_base = OTHER; note = 2'-O-methyl modified nucleotide with phosphorothioate linkage
  modified_base 29: mod_base = OTHER; note = 2'-O-methyl modified nucleotide
  modified_base 30: mod_base = OTHER; note = 2'-O-methyl modified nucleotide
  modified_base 31: mod_base = OTHER; note = 2'-O-methyl modified nucleotide
  modified_base 32: mod_base = OTHER; note = 2'-O-methyl modified nucleotide
  modified_base 33: mod_base = OTHER; note = 2'-O-methyl modified nucleotide
  modified_base 34: mod_base = OTHER; note = 2'-O-methyl modified nucleotide
  modified_base 35: mod_base = OTHER; note = 2'-O-methyl modified nucleotide
  modified_base 36: mod_base = OTHER; note = 2'-O-methyl modified nucleotide
  modified_base 37: mod_base = OTHER; note = 2'-O-methyl modified nucleotide
  modified_base 38: mod_base = OTHER; note = 2'-O-methyl modified nucleotide
  modified_base 39: mod_base = OTHER; note = 2'-O-methyl modified nucleotide
  modified_base 40: mod_base = OTHER; note = 2'-O-methyl modified nucleotide
  modified_base 69: mod_base = OTHER; note = 2'-O-methyl modified nucleotide
  modified_base 70: mod_base = OTHER; note = 2'-O-methyl modified nucleotide
  modified_base 71: mod_base = OTHER; note = 2'-O-methyl modified nucleotide
  modified_base 72: mod_base = OTHER; note = 2'-O-methyl modified nucleotide
  modified_base 73: mod_base = OTHER; note = 2'-O-methyl modified nucleotide
  modified_base 74: mod_base = OTHER; note = 2'-O-methyl modified nucleotide
  modified_base 75: mod_base = OTHER; note = 2'-O-methyl modified nucleotide
  modified_base 76: mod_base = OTHER; note = 2'-O-methyl modified nucleotide
  modified_base 77: mod_base = OTHER; note = 2'-O-methyl modified nucleotide
  modified_base 78: mod_base = OTHER; note = 2'-O-methyl modified nucleotide
  modified_base 79: mod_base = OTHER; note = 2'-O-methyl modified nucleotide
  modified_base 80: mod_base = OTHER; note = 2'-O-methyl modified nucleotide
  modified_base 81: mod_base = OTHER; note = 2'-O-methyl modified nucleotide
  modified_base 82: mod_base = OTHER; note = 2'-O-methyl modified nucleotide
  modified_base 83: mod_base = OTHER; note = 2'-O-methyl modified nucleotide
  modified_base 84: mod_base = OTHER; note = 2'-O-methyl modified nucleotide
  modified_base 85: mod_base = OTHER; note = 2'-O-methyl modified nucleotide
  modified_base 86: mod_base = OTHER; note = 2'-O-methyl modified nucleotide
  modified_base 87: mod_base = OTHER; note = 2'-O-methyl modified nucleotide
  modified_base 88: mod_base = OTHER; note = 2'-O-methyl modified nucleotide
  modified_base 89: mod_base = OTHER; note = 2'-O-methyl modified nucleotide
  modified_base 90: mod_base = OTHER; note = 2'-O-methyl modified nucleotide
  modified_base 91: mod_base = OTHER; note = 2'-O-methyl modified nucleotide
  modified_base 92: mod_base = OTHER; note = 2'-O-methyl modified nucleotide
  modified_base 93: mod_base = OTHER; note = 2'-O-methyl modified nucleotide
  modified_base 94: mod_base = OTHER; note = 2'-O-methyl modified nucleotide
  modified_base 95: mod_base = OTHER; note = 2'-O-methyl modified nucleotide
  modified_base 96: mod_base = OTHER; note = 2'-O-methyl modified nucleotide
  modified_base 115: mod_base = OTHER; note = Nucleotide with phosphorothioate linkage
  modified_base 116: mod_base = OTHER; note = 2'-O-methyl modified nucleotide with phosphorothioate linkage
  modified_base 117: mod_base = OTHER; note = 2'-O-methyl modified nucleotide with phosphorothioate linkage
  modified_base 118: mod_base = OTHER; note = 2'-O-methyl modified nucleotide
gagaatcaaaatcggtgaatgttttagagctagaaatagcaagttaaaataaggctagtccgttatcaacttgaaaaagtggcaccgagtcggtgcgcctatttagttgacaccgatt

SEQ ID NO: 16055 - RNA, 125 nt, synthetic construct
  source 1..125: mol_type = other RNA
  modified_base 1: mod_base = OTHER; note = 2'-O-methyl modified nucleotide with phosphorothioate linkage
  modified_base 2: mod_base = OTHER; note = 2'-O-methyl modified nucleotide with phosphorothioate linkage
  modified_base 3: mod_base = OTHER; note = 2'-O-methyl modified nucleotide with phosphorothioate linkage
  modified_base 29: mod_base = OTHER; note = 2'-O-methyl modified nucleotide
  modified_base 30: mod_base = OTHER; note = 2'-O-methyl modified nucleotide
  modified_base 31: mod_base = OTHER; note = 2'-O-methyl modified nucleotide
  modified_base 32: mod_base = OTHER; note = 2'-O-methyl modified nucleotide
  modified_base 33: mod_base = OTHER; note = 2'-O-methyl modified nucleotide
  modified_base 34: mod_base = OTHER; note = 2'-O-methyl modified nucleotide
  modified_base 35: mod_base = OTHER; note = 2'-O-methyl modified nucleotide
  modified_base 36: mod_base = OTHER; note = 2'-O-methyl modified nucleotide
  modified_base 37: mod_base = OTHER; note = 2'-O-methyl modified nucleotide
  modified_base 38: mod_base = OTHER; note = 2'-O-methyl modified nucleotide
  modified_base 39: mod_base = OTHER; note = 2'-O-methyl modified nucleotide
  modified_base 40: mod_base = OTHER; note = 2'-O-methyl modified nucleotide
  modified_base 69: mod_base = OTHER; note = 2'-O-methyl modified nucleotide
  modified_base 70: mod_base = OTHER; note = 2'-O-methyl modified nucleotide
  modified_base 71: mod_base = OTHER; note = 2'-O-methyl modified nucleotide
  modified_base 72: mod_base = OTHER; note = 2'-O-methyl modified nucleotide
  modified_base 73: mod_base = OTHER; note = 2'-O-methyl modified nucleotide
  modified_base 74: mod_base = OTHER; note = 2'-O-methyl modified nucleotide
  modified_base 75: mod_base = OTHER; note = 2'-O-methyl modified nucleotide
  modified_base 76: mod_base = OTHER; note = 2'-O-methyl modified nucleotide
  modified_base 77: mod_base = OTHER; note = 2'-O-methyl modified nucleotide
  modified_base 78: mod_base = OTHER; note = 2'-O-methyl modified nucleotide
  modified_base 79: mod_base = OTHER; note = 2'-O-methyl modified nucleotide
  modified_base 80: mod_base = OTHER; note = 2'-O-methyl modified nucleotide
  modified_base 81: mod_base = OTHER; note = 2'-O-methyl modified nucleotide
  modified_base 82: mod_base = OTHER; note = 2'-O-methyl modified nucleotide
  modified_base 83: mod_base = OTHER; note = 2'-O-methyl modified nucleotide
  modified_base 84: mod_base = OTHER; note = 2'-O-methyl modified nucleotide
  modified_base 85: mod_base = OTHER; note = 2'-O-methyl modified nucleotide
  modified_base 86: mod_base = OTHER; note = 2'-O-methyl modified nucleotide
  modified_base 87: mod_base = OTHER; note = 2'-O-methyl modified nucleotide
  modified_base 88: mod_base = OTHER; note = 2'-O-methyl modified nucleotide
  modified_base 89: mod_base = OTHER; note = 2'-O-methyl modified nucleotide
  modified_base 90: mod_base = OTHER; note = 2'-O-methyl modified nucleotide
  modified_base 91: mod_base = OTHER; note = 2'-O-methyl modified nucleotide
  modified_base 92: mod_base = OTHER; note = 2'-O-methyl modified nucleotide
  modified_base 93: mod_base = OTHER; note = 2'-O-methyl modified nucleotide
  modified_base 94: mod_base = OTHER; note = 2'-O-methyl modified nucleotide
  modified_base 95: mod_base = OTHER; note = 2'-O-methyl modified nucleotide
  modified_base 96: mod_base = OTHER; note = 2'-O-methyl modified nucleotide
  modified_base 122: mod_base = OTHER; note = Nucleotide with phosphorothioate linkage
  modified_base 123: mod_base = OTHER; note = 2'-O-methyl modified nucleotide with phosphorothioate linkage
  modified_base 124: mod_base = OTHER; note = 2'-O-methyl modified nucleotide with phosphorothioate linkage
  modified_base 125: mod_base = OTHER; note = 2'-O-methyl modified nucleotide
gagaatcaaaatcggtgaatgttttagagctagaaatagcaagttaaaataaggctagtccgttatcaacttgaaaaagtggcaccgagtcggtgcctgcctatttagttgacaccgattttgat

SEQ ID NO: 16056 - RNA, 124 nt, synthetic construct
  source 1..124: mol_type = other RNA
  modified_base 1: mod_base = OTHER; note = 2'-O-methyl modified nucleotide with phosphorothioate linkage
  modified_base 2: mod_base = OTHER; note = 2'-O-methyl modified nucleotide with phosphorothioate linkage
  modified_base 3: mod_base = OTHER; note = 2'-O-methyl modified nucleotide with phosphorothioate linkage
  modified_base 29: mod_base = OTHER; note = 2'-O-methyl modified nucleotide
  modified_base 30: mod_base = OTHER; note = 2'-O-methyl modified nucleotide
  modified_base 31: mod_base = OTHER; note = 2'-O-methyl modified nucleotide
  modified_base 32: mod_base = OTHER; note = 2'-O-methyl modified nucleotide
  modified_base 33: mod_base = OTHER; note = 2'-O-methyl modified nucleotide
  modified_base 34: mod_base = OTHER; note = 2'-O-methyl modified nucleotide
  modified_base 35: mod_base = OTHER; note = 2'-O-methyl modified nucleotide
  modified_base 36: mod_base = OTHER; note = 2'-O-methyl modified nucleotide
  modified_base 37: mod_base = OTHER; note = 2'-O-methyl modified nucleotide
  modified_base 38: mod_base = OTHER; note = 2'-O-methyl modified nucleotide
  modified_base 39: mod_base = OTHER; note = 2'-O-methyl modified nucleotide
  modified_base 40: mod_base = OTHER; note = 2'-O-methyl modified nucleotide
  modified_base 69: mod_base = OTHER; note = 2'-O-methyl modified nucleotide
  modified_base 70: mod_base = OTHER; note = 2'-O-methyl modified nucleotide
  modified_base 71: mod_base = OTHER; note = 2'-O-methyl modified nucleotide
  modified_base 72: mod_base = OTHER; note = 2'-O-methyl modified nucleotide
  modified_base 73: mod_base = OTHER; note = 2'-O-methyl modified nucleotide
  modified_base 74: mod_base = OTHER; note = 2'-O-methyl modified nucleotide
  modified_base 75: mod_base = OTHER; note = 2'-O-methyl modified nucleotide
  modified_base 76: mod_base = OTHER; note = 2'-O-methyl modified nucleotide
  modified_base 77: mod_base = OTHER; note = 2'-O-methyl modified nucleotide
  modified_base 78: mod_base = OTHER; note = 2'-O-methyl modified nucleotide
  modified_base 79: mod_base = OTHER; note = 2'-O-methyl modified nucleotide
  modified_base 80: mod_base = OTHER; note = 2'-O-methyl modified nucleotide
  modified_base 81: mod_base = OTHER; note = 2'-O-methyl modified nucleotide
  modified_base 82: mod_base = OTHER; note = 2'-O-methyl modified nucleotide
  modified_base 83: mod_base = OTHER; note = 2'-O-methyl modified nucleotide
  modified_base 84: mod_base = OTHER; note = 2'-O-methyl modified nucleotide
  modified_base 85: mod_base = OTHER; note = 2'-O-methyl modified nucleotide
  modified_base 86: mod_base = OTHER; note = 2'-O-methyl modified nucleotide
  modified_base 87: mod_base = OTHER; note = 2'-O-methyl modified nucleotide
  modified_base 88: mod_base = OTHER; note = 2'-O-methyl modified nucleotide
  modified_base 89: mod_base = OTHER; note = 2'-O-methyl modified nucleotide
  modified_base 90: mod_base = OTHER; note = 2'-O-methyl modified nucleotide
  modified_base 91: mod_base = OTHER; note = 2'-O-methyl modified nucleotide
  modified_base 92: mod_base = OTHER; note = 2'-O-methyl modified nucleotide
  modified_base 93: mod_base = OTHER; note = 2'-O-methyl modified nucleotide
  modified_base 94: mod_base = OTHER; note = 2'-O-methyl modified nucleotide
  modified_base 95: mod_base = OTHER; note = 2'-O-methyl modified nucleotide
  modified_base 96: mod_base = OTHER; note = 2'-O-methyl modified nucleotide
  modified_base 121: mod_base = OTHER; note = Nucleotide with phosphorothioate linkage
  modified_base 122: mod_base = OTHER; note = 2'-O-methyl modified nucleotide with phosphorothioate linkage
  modified_base 123: mod_base = OTHER; note = 2'-O-methyl modified nucleotide with phosphorothioate linkage
  modified_base 124: mod_base = OTHER; note = 2'-O-methyl modified nucleotide
gagaatcaaaatcggtgaatgttttagagctagaaatagcaagttaaaataaggctagtccgttatcaacttgaaaaagtggcaccgagtcggtgcctgcctatttagttgacaccgattttga

SEQ ID NO: 16057 - RNA, 123 nt, synthetic construct
  source 1..123: mol_type = other RNA
  modified_base 1: mod_base = OTHER; note = 2'-O-methyl modified nucleotide with phosphorothioate linkage
  modified_base 2: mod_base = OTHER; note = 2'-O-methyl modified nucleotide with phosphorothioate linkage
  modified_base 3: mod_base = OTHER; note = 2'-O-methyl modified nucleotide with phosphorothioate linkage
  modified_base 29: mod_base = OTHER; note = 2'-O-methyl modified nucleotide
  modified_base 30: mod_base = OTHER; note = 2'-O-methyl modified nucleotide
  modified_base 31: mod_base = OTHER; note = 2'-O-methyl modified nucleotide
  modified_base 32: mod_base = OTHER; note = 2'-O-methyl modified nucleotide
  modified_base 33: mod_base = OTHER; note = 2'-O-methyl modified nucleotide
  modified_base 34: mod_base = OTHER; note = 2'-O-methyl modified nucleotide
  modified_base 35: mod_base = OTHER; note = 2'-O-methyl modified nucleotide
  modified_base 36: mod_base = OTHER; note = 2'-O-methyl modified nucleotide
  modified_base 37: mod_base = OTHER; note = 2'-O-methyl modified nucleotide
  modified_base 38: mod_base = OTHER; note = 2'-O-methyl modified nucleotide
  modified_base 39: mod_base = OTHER; note = 2'-O-methyl modified nucleotide
  modified_base 40: mod_base = OTHER; note = 2'-O-methyl modified nucleotide
  modified_base 69: mod_base = OTHER; note = 2'-O-methyl modified nucleotide
  modified_base 70: mod_base = OTHER; note = 2'-O-methyl modified nucleotide
  modified_base 71: mod_base = OTHER; note = 2'-O-methyl modified nucleotide
  modified_base 72: mod_base = OTHER; note = 2'-O-methyl modified nucleotide
  modified_base 73: mod_base = OTHER; note = 2'-O-methyl modified nucleotide
  modified_base 74: mod_base = OTHER; note = 2'-O-methyl modified nucleotide
  modified_base 75: mod_base = OTHER; note = 2'-O-methyl modified nucleotide
  modified_base 76: mod_base = OTHER; note = 2'-O-methyl modified nucleotide
  modified_base 77: mod_base = OTHER; note = 2'-O-methyl modified nucleotide
  modified_base 78: mod_base = OTHER; note = 2'-O-methyl modified nucleotide
  modified_base 79: mod_base = OTHER; note = 2'-O-methyl modified nucleotide
  modified_base 80: mod_base = OTHER; note = 2'-O-methyl modified nucleotide
  modified_base 81: mod_base = OTHER; note = 2'-O-methyl modified nucleotide
  modified_base 82: mod_base = OTHER; note = 2'-O-methyl modified nucleotide
  modified_base 83: mod_base = OTHER; note = 2'-O-methyl modified nucleotide
  modified_base 84: mod_base = OTHER; note = 2'-O-methyl modified nucleotide
  modified_base 85: mod_base = OTHER; note = 2'-O-methyl modified nucleotide
  modified_base 86: mod_base = OTHER; note = 2'-O-methyl modified nucleotide
  modified_base 87: mod_base = OTHER; note = 2'-O-methyl modified nucleotide
  modified_base 88: mod_base = OTHER; note = 2'-O-methyl modified nucleotide
  modified_base 89: mod_base = OTHER; note = 2'-O-methyl modified nucleotide
  modified_base 90: mod_base = OTHER; note = 2'-O-methyl modified nucleotide
  modified_base 91: mod_base = OTHER; note = 2'-O-methyl modified nucleotide
  modified_base 92: mod_base = OTHER; note = 2'-O-methyl modified nucleotide
  modified_base 93: mod_base = OTHER; note = 2'-O-methyl modified nucleotide
  modified_base 94: mod_base = OTHER; note = 2'-O-methyl modified nucleotide
  modified_base 95: mod_base = OTHER; note = 2'-O-methyl modified nucleotide
  modified_base 96: mod_base = OTHER; note = 2'-O-methyl modified nucleotide
  modified_base 120: mod_base = OTHER; note = Nucleotide with phosphorothioate linkage
  modified_base 121: mod_base = OTHER; note = 2'-O-methyl modified nucleotide with phosphorothioate linkage
  modified_base 122: mod_base = OTHER; note = 2'-O-methyl modified nucleotide with phosphorothioate linkage
  modified_base 123: mod_base = OTHER; note = 2'-O-methyl modified nucleotide
gagaatcaaaatcggtgaatgttttagagctagaaatagcaagttaaaataaggctagtccgttatcaacttgaaaaagtggcaccgagtcggtgcctgcctatttagttgacaccgattttg

SEQ ID NO: 16058 - RNA, 122 nt, synthetic construct
  source 1..122: mol_type = other RNA
  modified_base 1: mod_base = OTHER; note = 2'-O-methyl modified nucleotide with phosphorothioate linkage
  modified_base 2: mod_base = OTHER; note = 2'-O-methyl modified nucleotide with phosphorothioate linkage
  modified_base 3: mod_base = OTHER; note = 2'-O-methyl modified nucleotide with phosphorothioate linkage
  modified_base 29: mod_base = OTHER; note = 2'-O-methyl modified nucleotide
  modified_base 30: mod_base = OTHER; note = 2'-O-methyl modified nucleotide
  modified_base 31: mod_base = OTHER; note = 2'-O-methyl modified nucleotide
  modified_base 32: mod_base = OTHER; note = 2'-O-methyl modified nucleotide
  modified_base 33: mod_base = OTHER; note = 2'-O-methyl modified nucleotide
  modified_base 34: mod_base = OTHER; note = 2'-O-methyl modified nucleotide
  modified_base 35: mod_base = OTHER; note = 2'-O-methyl modified nucleotide
  modified_base 36: mod_base = OTHER; note = 2'-O-methyl modified nucleotide
  modified_base 37: mod_base = OTHER; note = 2'-O-methyl modified nucleotide
  modified_base 38: mod_base = OTHER; note = 2'-O-methyl modified nucleotide
  modified_base 39: mod_base = OTHER; note = 2'-O-methyl modified nucleotide
  modified_base 40: mod_base = OTHER; note = 2'-O-methyl modified nucleotide
  modified_base 69: mod_base = OTHER; note = 2'-O-methyl modified nucleotide
  modified_base 70: mod_base = OTHER; note = 2'-O-methyl modified nucleotide
  modified_base 71: mod_base = OTHER; note = 2'-O-methyl modified nucleotide
  modified_base 72: mod_base = OTHER; note = 2'-O-methyl modified nucleotide
  modified_base 73: mod_base = OTHER; note = 2'-O-methyl modified nucleotide
  modified_base 74: mod_base = OTHER; note = 2'-O-methyl modified nucleotide
  modified_base 75: mod_base = OTHER; note = 2'-O-methyl modified nucleotide
  modified_base 76: mod_base = OTHER; note = 2'-O-methyl modified nucleotide
  modified_base 77: mod_base = OTHER; note = 2'-O-methyl modified nucleotide
  modified_base 78: mod_base = OTHER; note = 2'-O-methyl modified nucleotide
  modified_base 79: mod_base = OTHER; note = 2'-O-methyl modified nucleotide
  modified_base 80: mod_base = OTHER; note = 2'-O-methyl modified nucleotide
  modified_base 81: mod_base = OTHER; note = 2'-O-methyl modified nucleotide
  modified_base 82: mod_base = OTHER; note = 2'-O-methyl modified nucleotide
  modified_base 83: mod_base = OTHER; note = 2'-O-methyl modified nucleotide
  modified_base 84: mod_base = OTHER; note = 2'-O-methyl modified nucleotide
  modified_base 85: mod_base = OTHER; note = 2'-O-methyl modified nucleotide
  modified_base 86: mod_base = OTHER; note = 2'-O-methyl modified nucleotide
  modified_base 87: mod_base = OTHER; note = 2'-O-methyl modified nucleotide
  modified_base 88: mod_base = OTHER; note = 2'-O-methyl modified nucleotide
  modified_base 89: mod_base = OTHER; note = 2'-O-methyl modified nucleotide
  modified_base 90: mod_base = OTHER; note = 2'-O-methyl modified nucleotide
  modified_base 91: mod_base = OTHER; note = 2'-O-methyl modified nucleotide
  modified_base 92: mod_base = OTHER; note = 2'-O-methyl modified nucleotide
  modified_base 93: mod_base = OTHER; note = 2'-O-methyl modified nucleotide
  modified_base 94: mod_base = OTHER; note = 2'-O-methyl modified nucleotide
  modified_base 95: mod_base = OTHER; note = 2'-O-methyl modified nucleotide
  modified_base 96: mod_base = OTHER; note = 2'-O-methyl modified nucleotide
  modified_base 119: mod_base = OTHER; note = Nucleotide with phosphorothioate linkage
  modified_base 120: mod_base = OTHER; note = 2'-O-methyl modified nucleotide with phosphorothioate linkage
  modified_base 121: mod_base = OTHER; note = 2'-O-methyl modified nucleotide with phosphorothioate linkage
  modified_base 122: mod_base = OTHER; note = 2'-O-methyl modified nucleotide
gagaatcaaaatcggtgaatgttttagagctagaaatagcaagttaaaataaggctagtccgttatcaacttgaaaaagtggcaccgagtcggtgcctgcctatttagttgacaccgatttt

SEQ ID NO: 16059 - RNA, 121 nt, synthetic construct
  source 1..121: mol_type = other RNA
  modified_base 1: mod_base = OTHER; note = 2'-O-methyl modified nucleotide with phosphorothioate linkage
  modified_base 2: mod_base = OTHER; note = 2'-O-methyl modified nucleotide with phosphorothioate linkage
  modified_base 3: mod_base = OTHER; note = 2'-O-methyl modified nucleotide with phosphorothioate linkage
  modified_base 29: mod_base = OTHER; note = 2'-O-methyl modified nucleotide
  modified_base 30: mod_base = OTHER; note = 2'-O-methyl modified nucleotide
  modified_base 31: mod_base = OTHER; note = 2'-O-methyl modified nucleotide
  modified_base 32: mod_base = OTHER; note = 2'-O-methyl modified nucleotide
  modified_base 33: mod_base = OTHER; note = 2'-O-methyl modified nucleotide
  modified_base 34: mod_base = OTHER; note = 2'-O-methyl modified nucleotide
  modified_base 35: mod_base = OTHER; note = 2'-O-methyl modified nucleotide
  modified_base 36: mod_base = OTHER; note = 2'-O-methyl modified nucleotide
  modified_base 37: mod_base = OTHER; note = 2'-O-methyl modified nucleotide
  modified_base 38: mod_base = OTHER; note = 2'-O-methyl modified nucleotide
  modified_base 39: mod_base = OTHER; note = 2'-O-methyl modified nucleotide
  modified_base 40: mod_base = OTHER; note = 2'-O-methyl modified nucleotide
  modified_base 69: mod_base = OTHER; note = 2'-O-methyl modified nucleotide
  modified_base 70: mod_base = OTHER; note = 2'-O-methyl modified nucleotide
  modified_base 71: mod_base = OTHER; note = 2'-O-methyl modified nucleotide
  modified_base 72: mod_base = OTHER; note = 2'-O-methyl modified nucleotide
  modified_base 73: mod_base = OTHER; note = 2'-O-methyl modified nucleotide
  modified_base 74: mod_base = OTHER; note = 2'-O-methyl modified nucleotide
  modified_base 75: mod_base = OTHER; note = 2'-O-methyl modified nucleotide
  modified_base 76: mod_base = OTHER; note = 2'-O-methyl modified nucleotide
  modified_base 77: mod_base = OTHER; note = 2'-O-methyl modified nucleotide
  modified_base 78: mod_base = OTHER; note = 2'-O-methyl modified nucleotide
  modified_base 79: mod_base = OTHER; note = 2'-O-methyl modified nucleotide
  modified_base 80: mod_base = OTHER; note = 2'-O-methyl modified nucleotide
  modified_base 81: mod_base = OTHER; note = 2'-O-methyl modified nucleotide
  modified_base 82: mod_base = OTHER; note = 2'-O-methyl modified nucleotide
  modified_base 83: mod_base = OTHER; note = 2'-O-methyl modified nucleotide
  modified_base 84: mod_base = OTHER; note = 2'-O-methyl modified nucleotide
  modified_base 85: mod_base = OTHER; note = 2'-O-methyl modified nucleotide
  modified_base 86: mod_base = OTHER; note = 2'-O-methyl modified nucleotide
  modified_base 87: mod_base = OTHER; note = 2'-O-methyl modified nucleotide
  modified_base 88: mod_base = OTHER; note = 2'-O-methyl modified nucleotide
  modified_base 89: mod_base = OTHER; note = 2'-O-methyl modified nucleotide
  modified_base 90: mod_base = OTHER; note = 2'-O-methyl modified nucleotide
  modified_base 91: mod_base = OTHER; note = 2'-O-methyl modified nucleotide
  modified_base 92: mod_base = OTHER; note = 2'-O-methyl modified nucleotide
  modified_base 93: mod_base = OTHER; note = 2'-O-methyl modified nucleotide
  modified_base 94: mod_base = OTHER; note = 2'-O-methyl modified nucleotide
  modified_base 95: mod_base = OTHER; note = 2'-O-methyl modified nucleotide
  modified_base 96: mod_base = OTHER; note = 2'-O-methyl modified nucleotide
  modified_base 118: mod_base = OTHER; note = Nucleotide with phosphorothioate linkage
  modified_base 119: mod_base = OTHER; note = 2'-O-methyl modified nucleotide with phosphorothioate linkage
  modified_base 120: mod_base = OTHER; note = 2'-O-methyl modified nucleotide with phosphorothioate linkage
  modified_base 121: mod_base = OTHER; note = 2'-O-methyl modified nucleotide
gagaatcaaaatcggtgaatgttttagagctagaaatagcaagttaaaataaggctagtccgttatcaacttgaaaaagtggcaccgagtcggtgcctgcctatttagttgacaccgattt

SEQ ID NO: 16060 - RNA, 120 nt, synthetic construct
  source 1..120: mol_type = other RNA
  modified_base 1: mod_base = OTHER; note = 2'-O-methyl modified nucleotide with phosphorothioate linkage
  modified_base 2: mod_base = OTHER; note = 2'-O-methyl modified nucleotide with phosphorothioate linkage
  modified_base 3: mod_base = OTHER; note = 2'-O-methyl modified nucleotide with phosphorothioate linkage
  modified_base 29: mod_base = OTHER; note = 2'-O-methyl modified nucleotide
  modified_base 30: mod_base = OTHER; note = 2'-O-methyl modified nucleotide
  modified_base 31: mod_base = OTHER; note = 2'-O-methyl modified nucleotide
  modified_base 32: mod_base = OTHER; note = 2'-O-methyl modified nucleotide
  modified_base 33: mod_base = OTHER; note = 2'-O-methyl modified nucleotide
  modified_base 34: mod_base = OTHER; note = 2'-O-methyl modified nucleotide
  modified_base 35: mod_base = OTHER; note = 2'-O-methyl modified nucleotide
  modified_base 36: mod_base = OTHER; note = 2'-O-methyl modified nucleotide
  modified_base 37: mod_base = OTHER; note = 2'-O-methyl modified nucleotide
  modified_base 38: mod_base = OTHER; note = 2'-O-methyl modified nucleotide
  modified_base 39: mod_base = OTHER; note = 2'-O-methyl modified nucleotide
  modified_base 40: mod_base = OTHER; note = 2'-O-methyl modified nucleotide
  modified_base 69: mod_base = OTHER; note = 2'-O-methyl modified nucleotide
  modified_base 70: mod_base = OTHER; note = 2'-O-methyl modified nucleotide
  modified_base 71: mod_base = OTHER; note = 2'-O-methyl modified nucleotide
  modified_base 72: mod_base = OTHER; note = 2'-O-methyl modified nucleotide
  modified_base 73: mod_base = OTHER; note = 2'-O-methyl modified nucleotide
  modified_base 74: mod_base = OTHER; note = 2'-O-methyl modified nucleotide
  modified_base 75: mod_base = OTHER; note = 2'-O-methyl modified nucleotide
  modified_base 76: mod_base = OTHER; note = 2'-O-methyl modified nucleotide
  modified_base 77: mod_base = OTHER; note = 2'-O-methyl modified nucleotide
  modified_base 78: mod_base = OTHER; note = 2'-O-methyl modified nucleotide
  modified_base 79: mod_base = OTHER; note = 2'-O-methyl modified nucleotide
  modified_base 80: mod_base = OTHER; note = 2'-O-methyl modified nucleotide
  modified_base 81: mod_base = OTHER; note = 2'-O-methyl modified nucleotide
  modified_base 82: mod_base = OTHER; note = 2'-O-methyl modified nucleotide
  modified_base 83: mod_base = OTHER; note = 2'-O-methyl modified nucleotide
  modified_base 84: mod_base = OTHER; note = 2'-O-methyl modified nucleotide
  modified_base 85: mod_base = OTHER; note = 2'-O-methyl modified nucleotide
  modified_base 86: mod_base = OTHER; note = 2'-O-methyl modified nucleotide
  modified_base 87: mod_base = OTHER; note = 2'-O-methyl modified nucleotide
  modified_base 88: mod_base = OTHER; note = 2'-O-methyl modified nucleotide
  modified_base 89: mod_base = OTHER; note = 2'-O-methyl modified nucleotide
  modified_base 90: mod_base = OTHER; note = 2'-O-methyl modified nucleotide
  modified_base 91: mod_base = OTHER; note = 2'-O-methyl modified nucleotide
  modified_base 92: mod_base = OTHER; note = 2'-O-methyl modified nucleotide
  modified_base 93: mod_base = OTHER; note = 2'-O-methyl modified nucleotide
  modified_base 94: mod_base = OTHER; note = 2'-O-methyl modified nucleotide
  modified_base 95: mod_base = OTHER; note = 2'-O-methyl modified nucleotide
  modified_base 96: mod_base = OTHER; note = 2'-O-methyl modified nucleotide
  modified_base 117: mod_base = OTHER; note = Nucleotide with phosphorothioate linkage
  modified_base 118: mod_base = OTHER; note = 2'-O-methyl modified nucleotide with phosphorothioate linkage
  modified_base 119: mod_base = OTHER; note = 2'-O-methyl modified nucleotide with phosphorothioate linkage
  modified_base 120: mod_base = OTHER; note = 2'-O-methyl modified nucleotide
gagaatcaaaatcggtgaatgttttagagctagaaatagcaagttaaaataaggctagtccgttatcaacttgaaaaagtggcaccgagtcggtgcctgcctatttagttgacaccgatt

SEQ ID NO: 16061 - RNA, 127 nt, synthetic construct
  source 1..127: mol_type = other RNA
  modified_base 1: mod_base = OTHER; note = 2'-O-methyl modified nucleotide with phosphorothioate linkage
  modified_base 2: mod_base = OTHER; note = 2'-O-methyl modified nucleotide with phosphorothioate linkage
  modified_base 3: mod_base = OTHER; note = 2'-O-methyl modified nucleotide with phosphorothioate linkage
  modified_base 29: mod_base = OTHER; note = 2'-O-methyl modified nucleotide
  modified_base 30: mod_base = OTHER; note = 2'-O-methyl modified nucleotide
  modified_base 31: mod_base = OTHER; note = 2'-O-methyl modified nucleotide
  modified_base 32: mod_base = OTHER; note = 2'-O-methyl modified nucleotide
  modified_base 33: mod_base = OTHER; note = 2'-O-methyl modified nucleotide
  modified_base 34: mod_base = OTHER; note = 2'-O-methyl modified nucleotide
  modified_base 35: mod_base = OTHER; note = 2'-O-methyl modified nucleotide
  modified_base 36: mod_base = OTHER; note = 2'-O-methyl modified nucleotide
  modified_base 37: mod_base = OTHER; note = 2'-O-methyl modified nucleotide
  modified_base 38: mod_base = OTHER; note = 2'-O-methyl modified nucleotide
  modified_base 39: mod_base = OTHER; note = 2'-O-methyl modified nucleotide
  modified_base 40: mod_base = OTHER; note = 2'-O-methyl modified nucleotide
  modified_base 69: mod_base = OTHER; note = 2'-O-methyl modified nucleotide
  modified_base 70: mod_base = OTHER; note = 2'-O-methyl modified nucleotide
  modified_base 71: mod_base = OTHER; note = 2'-O-methyl modified nucleotide
  modified_base 72: mod_base = OTHER; note = 2'-O-methyl modified nucleotide
  modified_base 73: mod_base = OTHER; note = 2'-O-methyl modified nucleotide
  modified_base 74: mod_base = OTHER; note = 2'-O-methyl modified nucleotide
  modified_base 75: mod_base = OTHER; note = 2'-O-methyl modified nucleotide
  modified_base 76: mod_base = OTHER; note = 2'-O-methyl modified nucleotide
  modified_base 77: mod_base = OTHER; note = 2'-O-methyl modified nucleotide
  modified_base 78: mod_base = OTHER; note = 2'-O-methyl modified nucleotide
  modified_base 79: mod_base = OTHER; note = 2'-O-methyl modified nucleotide
  modified_base 80: mod_base = OTHER; note = 2'-O-methyl modified nucleotide
  modified_base 81: mod_base = OTHER; note = 2'-O-methyl modified nucleotide
  modified_base 82: mod_base = OTHER; note = 2'-O-methyl modified nucleotide
  modified_base 83: mod_base = OTHER; note = 2'-O-methyl modified nucleotide
  modified_base 84: mod_base = OTHER; note = 2'-O-methyl modified nucleotide
  modified_base 85: mod_base = OTHER; note = 2'-O-methyl modified nucleotide
  modified_base 86: mod_base = OTHER; note = 2'-O-methyl modified nucleotide
  modified_base 87: mod_base = OTHER; note = 2'-O-methyl modified nucleotide
  modified_base 88: mod_base = OTHER; note = 2'-O-methyl modified nucleotide
  modified_base 89: mod_base = OTHER; note = 2'-O-methyl modified nucleotide
  modified_base 90: mod_base = OTHER; note = 2'-O-methyl modified nucleotide
  modified_base 91: mod_base = OTHER; note = 2'-O-methyl modified nucleotide
  modified_base 92: mod_base = OTHER; note = 2'-O-methyl modified nucleotide
  modified_base 93: mod_base = OTHER; note = 2'-O-methyl modified nucleotide
  modified_base 94: mod_base = OTHER; note = 2'-O-methyl modified nucleotide
  modified_base 95: mod_base = OTHER; note = 2'-O-methyl modified nucleotide
  modified_base 96: mod_base = OTHER; note = 2'-O-methyl modified nucleotide
  modified_base 124: mod_base = OTHER; note = Nucleotide with phosphorothioate linkage
  modified_base 125: mod_base = OTHER; note = 2'-O-methyl modified nucleotide with phosphorothioate linkage
  modified_base 126: mod_base = OTHER; note = 2'-O-methyl modified nucleotide with phosphorothioate linkage
  modified_base 127: mod_base = OTHER; note = 2'-O-methyl modified nucleotide
gagaatcaaaatcggtgaatgttttagagctagaaatagcaagttaaaataaggctagtccgttatcaacttgaaaaagtggcaccgagtcggtgcgtctgcctatttagttgacaccgattttgat

SEQ ID NO: 16062 - RNA, 126 nt, synthetic construct
  source 1..126: mol_type = other RNA
  modified_base 1: mod_base = OTHER; note = 2'-O-methyl modified nucleotide with phosphorothioate linkage
  modified_base 2: mod_base = OTHER; note = 2'-O-methyl modified nucleotide with phosphorothioate linkage
  modified_base 3: mod_base = OTHER; note = 2'-O-methyl modified nucleotide with phosphorothioate linkage
  modified_base 29: mod_base = OTHER; note = 2'-O-methyl modified nucleotide
  modified_base 30: mod_base = OTHER; note = 2'-O-methyl modified nucleotide
  modified_base 31: mod_base = OTHER; note = 2'-O-methyl modified nucleotide
  modified_base 32: mod_base = OTHER; note = 2'-O-methyl modified nucleotide
  modified_base 33: mod_base = OTHER; note = 2'-O-methyl modified nucleotide
  modified_base 34: mod_base = OTHER; note = 2'-O-methyl modified nucleotide
  modified_base 35: mod_base = OTHER; note = 2'-O-methyl modified nucleotide
  modified_base 36: mod_base = OTHER; note = 2'-O-methyl modified nucleotide
  modified_base 37: mod_base = OTHER; note = 2'-O-methyl modified nucleotide
  modified_base 38: mod_base = OTHER; note = 2'-O-methyl modified nucleotide
  modified_base 39: mod_base = OTHER; note = 2'-O-methyl modified nucleotide
  modified_base 40: mod_base = OTHER; note = 2'-O-methyl modified nucleotide
  modified_base 69: mod_base = OTHER; note = 2'-O-methyl modified nucleotide
  modified_base 70: mod_base = OTHER; note = 2'-O-methyl modified nucleotide
  modified_base 71: mod_base = OTHER; note = 2'-O-methyl modified nucleotide
  modified_base 72: mod_base = OTHER; note = 2'-O-methyl modified nucleotide
  modified_base 73: mod_base = OTHER; note = 2'-O-methyl modified nucleotide
  modified_base 74: mod_base = OTHER; note = 2'-O-methyl modified nucleotide
  modified_base 75: mod_base = OTHER; note = 2'-O-methyl modified nucleotide
  modified_base 76: mod_base = OTHER; note = 2'-O-methyl modified nucleotide
  modified_base 77: mod_base = OTHER; note = 2'-O-methyl modified nucleotide
  modified_base 78: mod_base = OTHER; note = 2'-O-methyl modified nucleotide
  modified_base 79: mod_base = OTHER; note = 2'-O-methyl modified nucleotide
  modified_base 80: mod_base = OTHER; note = 2'-O-methyl modified nucleotide
  modified_base 81: mod_base = OTHER; note = 2'-O-methyl modified nucleotide
  modified_base 82: mod_base = OTHER; note = 2'-O-methyl modified nucleotide
  modified_base 83: mod_base = OTHER; note = 2'-O-methyl modified nucleotide
  modified_base 84: mod_base = OTHER; note = 2'-O-methyl modified nucleotide
  modified_base 85: mod_base = OTHER; note = 2'-O-methyl modified nucleotide
  modified_base 86: mod_base = OTHER; note = 2'-O-methyl modified nucleotide
  modified_base 87: mod_base = OTHER; note = 2'-O-methyl modified nucleotide
  modified_base 88: mod_base = OTHER; note = 2'-O-methyl modified nucleotide
  modified_base 89: mod_base = OTHER; note = 2'-O-methyl modified nucleotide
  modified_base 90: mod_base = OTHER; note = 2'-O-methyl modified nucleotide
  modified_base 91: mod_base = OTHER; note = 2'-O-methyl modified nucleotide
  modified_base 92: mod_base = OTHER; note = 2'-O-methyl modified nucleotide
  modified_base 93: mod_base = OTHER; note = 2'-O-methyl modified nucleotide
  modified_base 94: mod_base = OTHER; note = 2'-O-methyl modified nucleotide
  modified_base 95: mod_base = OTHER; note = 2'-O-methyl modified nucleotide
  modified_base 96: mod_base = OTHER; note = 2'-O-methyl modified nucleotide
  modified_base 123: mod_base = OTHER; note = Nucleotide with phosphorothioate linkage
  modified_base 124: mod_base = OTHER; note = 2'-O-methyl modified nucleotide with phosphorothioate linkage
  modified_base 125: mod_base = OTHER; note = 2'-O-methyl modified nucleotide with phosphorothioate linkage
  modified_base 126: mod_base = OTHER; note = 2'-O-methyl modified nucleotide
gagaatcaaaatcggtgaatgttttagagctagaaatagcaagttaaaataaggctagtccgttatcaacttgaaaaagtggcaccgagtcggtgcgtctgcctatttagttgacaccgattttga

SEQ ID NO: 16063 - RNA, 125 nt, synthetic construct
  source 1..125: mol_type = other RNA
  modified_base 1: mod_base = OTHER; note = 2'-O-methyl modified nucleotide with phosphorothioate linkage
  modified_base 2: mod_base = OTHER; note = 2'-O-methyl modified nucleotide with phosphorothioate linkage
  modified_base 3: mod_base = OTHER; note = 2'-O-methyl modified nucleotide with phosphorothioate linkage
  modified_base 29: mod_base = OTHER; note = 2'-O-methyl modified nucleotide
  modified_base 30: mod_base = OTHER; note = 2'-O-methyl modified nucleotide
  modified_base 31: mod_base = OTHER; note = 2'-O-methyl modified nucleotide
  modified_base 32: mod_base = OTHER; note = 2'-O-methyl modified nucleotide
  modified_base 33: mod_base = OTHER; note = 2'-O-methyl modified nucleotide
  modified_base 34: mod_base = OTHER; note = 2'-O-methyl modified nucleotide
  modified_base 35: mod_base = OTHER; note = 2'-O-methyl modified nucleotide
  modified_base 36: mod_base = OTHER; note = 2'-O-methyl modified nucleotide
  modified_base 37: mod_base = OTHER; note = 2'-O-methyl modified nucleotide
  modified_base 38: mod_base = OTHER; note = 2'-O-methyl modified nucleotide
  modified_base 39: mod_base = OTHER; note = 2'-O-methyl modified nucleotide
  modified_base 40: mod_base = OTHER; note = 2'-O-methyl modified nucleotide
  modified_base 69: mod_base = OTHER; note = 2'-O-methyl modified nucleotide
  modified_base 70: mod_base = OTHER; note = 2'-O-methyl modified nucleotide
  modified_base 71: mod_base = OTHER; note = 2'-O-methyl modified nucleotide
  modified_base 72: mod_base = OTHER; note = 2'-O-methyl modified nucleotide
  modified_base 73: mod_base = OTHER; note = 2'-O-methyl modified nucleotide
  modified_base 74: mod_base = OTHER; note = 2'-O-methyl modified nucleotide
  modified_base 75: mod_base = OTHER; note = 2'-O-methyl modified nucleotide
  modified_base 76: mod_base = OTHER; note = 2'-O-methyl modified nucleotide
  modified_base 77: mod_base = OTHER; note = 2'-O-methyl modified nucleotide
  modified_base 78: mod_base = OTHER; note = 2'-O-methyl modified nucleotide
  modified_base 79: mod_base = OTHER; note = 2'-O-methyl modified nucleotide
  modified_base 80: mod_base = OTHER; note = 2'-O-methyl modified nucleotide
  modified_base 81: mod_base = OTHER; note = 2'-O-methyl modified nucleotide
  modified_base 82: mod_base = OTHER; note = 2'-O-methyl modified nucleotide
  modified_base 83: mod_base = OTHER; note = 2'-O-methyl modified nucleotide
  modified_base 84: mod_base = OTHER; note = 2'-O-methyl modified nucleotide
  modified_base 85: mod_base = OTHER; note = 2'-O-methyl modified nucleotide
  modified_base 86: mod_base = OTHER; note = 2'-O-methyl modified nucleotide
  modified_base 87: mod_base = OTHER; note = 2'-O-methyl modified nucleotide
  modified_base 88: mod_base = OTHER; note = 2'-O-methyl modified nucleotide
  modified_base 89: mod_base = OTHER; note = 2'-O-methyl modified nucleotide
  modified_base 90: mod_base = OTHER; note = 2'-O-methyl modified nucleotide
  modified_base 91: mod_base = OTHER; note = 2'-O-methyl modified nucleotide
  modified_base 92: mod_base = OTHER; note = 2'-O-methyl modified nucleotide
  modified_base 93: mod_base = OTHER; note = 2'-O-methyl modified nucleotide
  modified_base 94: mod_base = OTHER; note = 2'-O-methyl modified nucleotide
  modified_base 95: mod_base = OTHER; note = 2'-O-methyl modified nucleotide
  modified_base 96: mod_base = OTHER; note = 2'-O-methyl modified nucleotide
  modified_base 122: mod_base = OTHER; note = Nucleotide with phosphorothioate linkage
  modified_base 123: mod_base = OTHER; note = 2'-O-methyl modified nucleotide with phosphorothioate linkage
  modified_base 124: mod_base = OTHER; note = 2'-O-methyl modified nucleotide with phosphorothioate linkage
  modified_base 125: mod_base = OTHER; note = 2'-O-methyl modified nucleotide
gagaatcaaaatcggtgaatgttttagagctagaaatagcaagttaaaataaggctagtccgttatcaacttgaaaaagtggcaccgagtcggtgcgtctgcctatttagttgacaccgattttg

SEQ ID NO: 16064 - RNA, 124 nt, synthetic construct
  source 1..124: mol_type = other RNA
  modified_base 1: mod_base = OTHER; note = 2'-O-methyl modified nucleotide with phosphorothioate linkage
  modified_base 2: mod_base = OTHER; note = 2'-O-methyl modified nucleotide with phosphorothioate linkage
  modified_base 3: mod_base = OTHER; note = 2'-O-methyl modified nucleotide with phosphorothioate linkage
  modified_base 29: mod_base = OTHER; note = 2'-O-methyl modified nucleotide
  modified_base 30: mod_base = OTHER; note = 2'-O-methyl modified nucleotide
  modified_base 31: mod_base = OTHER; note = 2'-O-methyl modified nucleotide
  modified_base 32: mod_base = OTHER; note = 2'-O-methyl modified nucleotide
  modified_base 33: mod_base = OTHER; note = 2'-O-methyl modified nucleotide
  modified_base 34: mod_base = OTHER; note = 2'-O-methyl modified nucleotide
  modified_base 35: mod_base = OTHER; note = 2'-O-methyl modified nucleotide
  modified_base 36: mod_base = OTHER; note = 2'-O-methyl modified nucleotide
  modified_base 37: mod_base = OTHER; note = 2'-O-methyl modified nucleotide
  modified_base 38: mod_base = OTHER; note = 2'-O-methyl modified nucleotide
  modified_base 39: mod_base = OTHER; note = 2'-O-methyl modified nucleotide
  modified_base 40: mod_base = OTHER; note = 2'-O-methyl modified nucleotide
  modified_base 69: mod_base = OTHER; note = 2'-O-methyl modified nucleotide
  modified_base 70: mod_base = OTHER; note = 2'-O-methyl modified nucleotide
  modified_base 71: mod_base = OTHER; note = 2'-O-methyl modified nucleotide
  modified_base 72: mod_base = OTHER; note = 2'-O-methyl modified nucleotide
  modified_base 73: mod_base = OTHER; note = 2'-O-methyl modified nucleotide
  modified_base 74: mod_base = OTHER; note = 2'-O-methyl modified nucleotide
  modified_base 75: mod_base = OTHER; note = 2'-O-methyl modified nucleotide
  modified_base 76: mod_base = OTHER; note = 2'-O-methyl modified nucleotide
  modified_base 77: mod_base = OTHER; note = 2'-O-methyl modified nucleotide
  modified_base 78: mod_base = OTHER; note = 2'-O-methyl modified nucleotide
  modified_base 79: mod_base = OTHER; note = 2'-O-methyl modified nucleotide
  modified_base 80: mod_base = OTHER; note = 2'-O-methyl modified nucleotide
  modified_base 81: mod_base = OTHER; note = 2'-O-methyl modified nucleotide
  modified_base 82: mod_base = OTHER; note = 2'-O-methyl modified nucleotide
  modified_base 83: mod_base = OTHER; note = 2'-O-methyl modified nucleotide
  modified_base 84: mod_base = OTHER; note = 2'-O-methyl modified nucleotide
  modified_base 85: mod_base = OTHER; note = 2'-O-methyl modified nucleotide
  modified_base 86: mod_base = OTHER; note = 2'-O-methyl modified nucleotide
  modified_base 87: mod_base = OTHER; note = 2'-O-methyl modified nucleotide
  modified_base 88: mod_base = OTHER; note = 2'-O-methyl modified nucleotide
  modified_base 89: mod_base = OTHER; note = 2'-O-methyl modified nucleotide
  modified_base 90: mod_base = OTHER; note = 2'-O-methyl modified nucleotide
  modified_base 91: mod_base = OTHER; note = 2'-O-methyl modified nucleotide
  modified_base 92: mod_base = OTHER; note = 2'-O-methyl modified nucleotide
  modified_base 93: mod_base = OTHER; note = 2'-O-methyl modified nucleotide
  modified_base 94: mod_base = OTHER; note = 2'-O-methyl modified nucleotide
  modified_base 95: mod_base = OTHER; note = 2'-O-methyl modified nucleotide
  modified_base 96: mod_base = OTHER; note = 2'-O-methyl modified nucleotide
  modified_base 121: mod_base = OTHER; note = Nucleotide with phosphorothioate linkage
  modified_base 122: mod_base = OTHER; note = 2'-O-methyl modified nucleotide with phosphorothioate linkage
  modified_base 123: mod_base = OTHER; note = 2'-O-methyl modified nucleotide with phosphorothioate linkage
  modified_base 124: mod_base = OTHER; note = 2'-O-methyl modified nucleotide
gagaatcaaaatcggtgaatgttttagagctagaaatagcaagttaaaataaggctagtccgttatcaacttgaaaaagtggcaccgagtcggtgcgtctgcctatttagttgacaccgatttt

SEQ ID NO: 16065 - RNA, 123 nt, synthetic construct
  source 1..123: mol_type = other RNA
  modified_base 1: mod_base = OTHER; note = 2'-O-methyl modified nucleotide with phosphorothioate linkage
  modified_base 2: mod_base = OTHER; note = 2'-O-methyl modified nucleotide with phosphorothioate linkage
  modified_base 3: mod_base = OTHER; note = 2'-O-methyl modified nucleotide with phosphorothioate linkage
  modified_base 29: mod_base = OTHER; note = 2'-O-methyl modified nucleotide
  modified_base 30: mod_base = OTHER; note = 2'-O-methyl modified nucleotide
  modified_base 31: mod_base = OTHER; note = 2'-O-methyl modified nucleotide
  modified_base 32: mod_base = OTHER; note = 2'-O-methyl modified nucleotide
  modified_base 33: mod_base = OTHER; note = 2'-O-methyl modified nucleotide
  modified_base 34: mod_base = OTHER; note = 2'-O-methyl modified nucleotide
  modified_base 35: mod_base = OTHER; note = 2'-O-methyl modified nucleotide
  modified_base 36: mod_base = OTHER; note = 2'-O-methyl modified nucleotide
  modified_base 37: mod_base = OTHER; note = 2'-O-methyl modified nucleotide
  modified_base 38: mod_base = OTHER; note = 2'-O-methyl modified nucleotide
  modified_base 39: mod_base = OTHER; note = 2'-O-methyl modified nucleotide
  modified_base 40: mod_base = OTHER; note = 2'-O-methyl modified nucleotide
  modified_base 69: mod_base = OTHER; note = 2'-O-methyl modified nucleotide
  modified_base 70: mod_base = OTHER; note = 2'-O-methyl modified nucleotide
  modified_base 71: mod_base = OTHER; note = 2'-O-methyl modified nucleotide
  modified_base 72: mod_base = OTHER; note = 2'-O-methyl modified nucleotide
  modified_base 73: mod_base = OTHER; note = 2'-O-methyl modified nucleotide
  modified_base 74: mod_base = OTHER; note = 2'-O-methyl modified nucleotide
  modified_base 75: mod_base = OTHER; note = 2'-O-methyl modified nucleotide
  modified_base 76: mod_base = OTHER; note = 2'-O-methyl modified nucleotide
  modified_base 77: mod_base = OTHER; note = 2'-O-methyl modified nucleotide
  modified_base 78: mod_base = OTHER; note = 2'-O-methyl modified nucleotide
  modified_base 79: mod_base = OTHER; note = 2'-O-methyl modified nucleotide
  modified_base 80: mod_base = OTHER; note = 2'-O-methyl modified nucleotide
  modified_base 81: mod_base = OTHER; note = 2'-O-methyl modified nucleotide
  modified_base 82: mod_base = OTHER; note = 2'-O-methyl modified nucleotide
  modified_base 83: mod_base = OTHER; note = 2'-O-methyl modified nucleotide
  modified_base 84: mod_base = OTHER; note = 2'-O-methyl modified nucleotide
  modified_base 85: mod_base = OTHER; note = 2'-O-methyl modified nucleotide
  modified_base 86: mod_base = OTHER; note = 2'-O-methyl modified nucleotide
  modified_base 87: mod_base = OTHER; note = 2'-O-methyl modified nucleotide
  modified_base 88: mod_base = OTHER; note = 2'-O-methyl modified nucleotide
  modified_base 89: mod_base = OTHER; note = 2'-O-methyl modified nucleotide
  modified_base 90: mod_base = OTHER; note = 2'-O-methyl modified nucleotide
  modified_base 91: mod_base = OTHER; note = 2'-O-methyl modified nucleotide
  modified_base 92: mod_base = OTHER; note = 2'-O-methyl modified nucleotide
  modified_base 93: mod_base = OTHER; note = 2'-O-methyl modified nucleotide
  modified_base 94: mod_base = OTHER; note = 2'-O-methyl modified nucleotide
  modified_base 95: mod_base = OTHER; note = 2'-O-methyl modified nucleotide
  modified_base 96: mod_base = OTHER; note = 2'-O-methyl modified nucleotide
  modified_base 120: mod_base = OTHER; note = Nucleotide with phosphorothioate linkage
  modified_base 121: mod_base = OTHER; note = 2'-O-methyl modified nucleotide with phosphorothioate linkage
  modified_base 122: mod_base = OTHER; note = 2'-O-methyl modified nucleotide with phosphorothioate linkage
  modified_base 123: mod_base = OTHER; note = 2'-O-methyl modified nucleotide
gagaatcaaaatcggtgaatgttttagagctagaaatagcaagttaaaataaggctagtccgttatcaacttgaaaaagtggcaccgagtcggtgcgtctgcctatttagttgacaccgattt

SEQ ID NO: 16066 - RNA, 122 nt, synthetic construct
  source 1..122: mol_type = other RNA
  modified_base 1: mod_base = OTHER; note = 2'-O-methyl modified nucleotide with phosphorothioate linkage
  modified_base 2: mod_base = OTHER; note = 2'-O-methyl modified nucleotide with phosphorothioate linkage
  modified_base 3: mod_base = OTHER; note = 2'-O-methyl modified nucleotide with phosphorothioate linkage
  modified_base 29: mod_base = OTHER; note = 2'-O-methyl modified nucleotide
  modified_base 30: mod_base = OTHER; note = 2'-O-methyl modified nucleotide
  modified_base 31: mod_base = OTHER; note = 2'-O-methyl modified nucleotide
  modified_base 32: mod_base = OTHER; note = 2'-O-methyl modified nucleotide
  modified_base 33: mod_base = OTHER; note = 2'-O-methyl modified nucleotide
  modified_base 34: mod_base = OTHER; note = 2'-O-methyl modified nucleotide
  modified_base 35: mod_base = OTHER; note = 2'-O-methyl modified nucleotide
  modified_base 36: mod_base = OTHER; note = 2'-O-methyl modified nucleotide
  modified_base 37: mod_base = OTHER; note = 2'-O-methyl modified nucleotide
  modified_base 38: mod_base = OTHER; note = 2'-O-methyl modified nucleotide
  modified_base 39: mod_base = OTHER; note = 2'-O-methyl modified nucleotide
  modified_base 40: mod_base = OTHER; note = 2'-O-methyl modified nucleotide
  modified_base 69: mod_base = OTHER; note = 2'-O-methyl modified nucleotide
  modified_base 70: mod_base = OTHER; note = 2'-O-methyl modified nucleotide
  modified_base 71: mod_base = OTHER; note = 2'-O-methyl modified nucleotide
  modified_base 72: mod_base = OTHER; note = 2'-O-methyl modified nucleotide
  modified_base 73: mod_base = OTHER; note = 2'-O-methyl modified nucleotide
  modified_base 74: mod_base = OTHER; note = 2'-O-methyl modified nucleotide
  modified_base 75: mod_base = OTHER; note = 2'-O-methyl modified nucleotide
  modified_base 76: mod_base = OTHER; note = 2'-O-methyl modified nucleotide
  modified_base 77: mod_base = OTHER; note = 2'-O-methyl modified nucleotide
  modified_base 78: mod_base = OTHER; note = 2'-O-methyl modified nucleotide
  modified_base 79: mod_base = OTHER; note = 2'-O-methyl modified nucleotide
  modified_base 80: mod_base = OTHER; note = 2'-O-methyl modified nucleotide
  modified_base 81: mod_base = OTHER; note = 2'-O-methyl modified nucleotide
  modified_base 82: mod_base = OTHER; note = 2'-O-methyl modified nucleotide
  modified_base 83: mod_base = OTHER; note = 2'-O-methyl modified nucleotide
  modified_base 84: mod_base = OTHER; note = 2'-O-methyl modified nucleotide
  modified_base 85: mod_base = OTHER; note = 2'-O-methyl modified nucleotide
  modified_base 86: mod_base = OTHER; note = 2'-O-methyl modified nucleotide
  modified_base 87: mod_base = OTHER; note = 2'-O-methyl modified nucleotide
  modified_base 88: mod_base = OTHER; note = 2'-O-methyl modified nucleotide
  modified_base 89: mod_base = OTHER; note = 2'-O-methyl modified nucleotide
  modified_base 90: mod_base = OTHER; note = 2'-O-methyl modified nucleotide
  modified_base 91: mod_base = OTHER; note = 2'-O-methyl modified nucleotide
  modified_base 92: mod_base = OTHER; note = 2'-O-methyl modified nucleotide
  modified_base 93: mod_base = OTHER; note = 2'-O-methyl modified nucleotide
  modified_base 94: mod_base = OTHER; note = 2'-O-methyl modified nucleotide
  modified_base 95: mod_base = OTHER; note = 2'-O-methyl modified nucleotide
  modified_base 96: mod_base = OTHER; note = 2'-O-methyl modified nucleotide
  modified_base 119: mod_base = OTHER; note = Nucleotide with phosphorothioate linkage
  modified_base 120: mod_base = OTHER; note = 2'-O-methyl modified nucleotide with phosphorothioate linkage
  modified_base 121: mod_base = OTHER; note = 2'-O-methyl modified nucleotide with phosphorothioate linkage
  modified_base 122: mod_base = OTHER; note = 2'-O-methyl modified nucleotide
gagaatcaaaatcggtgaatgttttagagctagaaatagcaagttaaaataaggctagtccgttatcaacttgaaaaagtggcaccgagtcggtgcgtctgcctatttagttgacaccgatt

SEQ ID NO: 16067 - RNA, 129 nt, synthetic construct
  source 1..129: mol_type = other RNA
  modified_base 1: mod_base = OTHER; note = 2'-O-methyl modified nucleotide with phosphorothioate linkage
  modified_base 2: mod_base = OTHER; note = 2'-O-methyl modified nucleotide with phosphorothioate linkage
  modified_base 3: mod_base = OTHER; note = 2'-O-methyl modified nucleotide with phosphorothioate linkage
  modified_base 29: mod_base = OTHER; note = 2'-O-methyl modified nucleotide
  modified_base 30: mod_base = OTHER; note = 2'-O-methyl modified nucleotide
  modified_base 31: mod_base = OTHER; note = 2'-O-methyl modified nucleotide
  modified_base 32: mod_base = OTHER; note = 2'-O-methyl modified nucleotide
  modified_base 33: mod_base = OTHER; note = 2'-O-methyl modified nucleotide
  modified_base 34: mod_base = OTHER; note = 2'-O-methyl modified nucleotide
  modified_base 35: mod_base = OTHER; note = 2'-O-methyl modified nucleotide
  modified_base 36: mod_base = OTHER; note = 2'-O-methyl modified nucleotide
  modified_base 37: mod_base = OTHER; note = 2'-O-methyl modified nucleotide
  modified_base 38: mod_base = OTHER; note = 2'-O-methyl modified nucleotide
  modified_base 39: mod_base = OTHER; note = 2'-O-methyl modified nucleotide
  modified_base 40: mod_base = OTHER; note = 2'-O-methyl modified nucleotide
  modified_base 69: mod_base = OTHER; note = 2'-O-methyl modified nucleotide
  modified_base 70: mod_base = OTHER; note = 2'-O-methyl modified nucleotide
  modified_base 71: mod_base = OTHER; note = 2'-O-methyl modified nucleotide
  modified_base 72: mod_base = OTHER; note = 2'-O-methyl modified nucleotide
  modified_base 73: mod_base = OTHER; note = 2'-O-methyl modified nucleotide
  modified_base 74: mod_base = OTHER; note = 2'-O-methyl modified nucleotide
  modified_base 75: mod_base = OTHER; note = 2'-O-methyl modified nucleotide
  modified_base 76: mod_base = OTHER; note = 2'-O-methyl modified nucleotide
  modified_base 77: mod_base = OTHER; note = 2'-O-methyl modified nucleotide
  modified_base 78: mod_base = OTHER; note = 2'-O-methyl modified nucleotide
  modified_base 79: mod_base = OTHER; note = 2'-O-methyl modified nucleotide
  modified_base 80: mod_base = OTHER; note = 2'-O-methyl modified nucleotide
  modified_base 81: mod_base = OTHER; note = 2'-O-methyl modified nucleotide
  modified_base 82: mod_base = OTHER; note = 2'-O-methyl modified nucleotide
  modified_base 83: mod_base = OTHER; note = 2'-O-methyl modified nucleotide
  modified_base 84: mod_base = OTHER; note = 2'-O-methyl modified nucleotide
  modified_base 85: mod_base = OTHER; note = 2'-O-methyl modified nucleotide
  modified_base 86: mod_base = OTHER; note = 2'-O-methyl modified nucleotide
  modified_base 87: mod_base = OTHER; note = 2'-O-methyl modified nucleotide
  modified_base 88: mod_base = OTHER; note = 2'-O-methyl modified nucleotide
  modified_base 89: mod_base = OTHER; note = 2'-O-methyl modified nucleotide
  modified_base 90: mod_base = OTHER; note = 2'-O-methyl modified nucleotide
  modified_base 91: mod_base = OTHER; note = 2'-O-methyl modified nucleotide
  modified_base 92: mod_base = OTHER; note = 2'-O-methyl modified nucleotide
  modified_base 93: mod_base = OTHER; note = 2'-O-methyl modified nucleotide
  modified_base 94: mod_base = OTHER; note = 2'-O-methyl modified nucleotide
  modified_base 95: mod_base = OTHER; note = 2'-O-methyl modified nucleotide
  modified_base 96: mod_base = OTHER; note = 2'-O-methyl modified nucleotide
  modified_base 126: mod_base = OTHER; note = Nucleotide with phosphorothioate linkage
  modified_base 127: mod_base = OTHER; note = 2'-O-methyl modified nucleotide with phosphorothioate linkage
  modified_base 128: mod_base = OTHER; note = 2'-O-methyl modified nucleotide with phosphorothioate linkage
  modified_base 129: mod_base = OTHER; note = 2'-O-methyl modified nucleotide
gagaatcaaaatcggtgaatgttttagagctagaaatagcaagttaaaataaggctagtccgttatcaacttgaaaaagtggcaccgagtcggtgcctgtctgcctatttagttgacaccgattttgat

SEQ ID NO: 16068 - RNA, 128 nt, synthetic construct
  source 1..128: mol_type = other RNA
  modified_base 1: mod_base = OTHER; note = 2'-O-methyl modified nucleotide with phosphorothioate linkage
  modified_base 2: mod_base = OTHER; note = 2'-O-methyl modified nucleotide with phosphorothioate linkage
  modified_base 3: mod_base = OTHER; note = 2'-O-methyl modified nucleotide with phosphorothioate linkage
  modified_base 29: mod_base = OTHER; note = 2'-O-methyl modified nucleotide
  modified_base 30: mod_base = OTHER; note = 2'-O-methyl modified nucleotide
  modified_base 31: mod_base = OTHER; note = 2'-O-methyl modified nucleotide
  modified_base 32: mod_base = OTHER; note = 2'-O-methyl modified nucleotide
  modified_base 33: mod_base = OTHER; note = 2'-O-methyl modified nucleotide
  modified_base 34: mod_base = OTHER; note = 2'-O-methyl modified nucleotide
  modified_base 35: mod_base = OTHER; note = 2'-O-methyl modified nucleotide
  modified_base 36: mod_base = OTHER; note = 2'-O-methyl modified nucleotide
  modified_base 37: mod_base = OTHER; note = 2'-O-methyl modified nucleotide
  modified_base 38: mod_base = OTHER; note = 2'-O-methyl modified nucleotide
  modified_base 39: mod_base = OTHER; note = 2'-O-methyl modified nucleotide
  modified_base 40: mod_base = OTHER; note = 2'-O-methyl modified nucleotide
  modified_base 69: mod_base = OTHER; note = 2'-O-methyl modified nucleotide
  modified_base 70: mod_base = OTHER; note = 2'-O-methyl modified nucleotide
  modified_base 71: mod_base = OTHER; note = 2'-O-methyl modified nucleotide
  modified_base 72: mod_base = OTHER; note = 2'-O-methyl modified nucleotide
  modified_base 73: mod_base = OTHER; note = 2'-O-methyl modified nucleotide
  modified_base 74: mod_base = OTHER; note = 2'-O-methyl modified nucleotide
  modified_base 75: mod_base = OTHER; note = 2'-O-methyl modified nucleotide
  modified_base 76: mod_base = OTHER; note = 2'-O-methyl modified nucleotide
  modified_base 77: mod_base = OTHER; note = 2'-O-methyl modified nucleotide
  modified_base 78: mod_base = OTHER; note = 2'-O-methyl modified nucleotide
  modified_base 79: mod_base = OTHER; note = 2'-O-methyl modified nucleotide
  modified_base 80: mod_base = OTHER; note = 2'-O-methyl modified nucleotide
  modified_base 81: mod_base = OTHER; note = 2'-O-methyl modified nucleotide
  modified_base 82: mod_base = OTHER; note = 2'-O-methyl modified nucleotide
  modified_base 83: mod_base = OTHER; note = 2'-O-methyl modified nucleotide
  modified_base 84: mod_base = OTHER; note = 2'-O-methyl modified nucleotide
  modified_base 85: mod_base = OTHER; note = 2'-O-methyl modified nucleotide
  modified_base 86: mod_base = OTHER; note = 2'-O-methyl modified nucleotide
  modified_base 87: mod_base = OTHER; note = 2'-O-methyl modified nucleotide
  modified_base 88: mod_base = OTHER; note = 2'-O-methyl modified nucleotide
  modified_base 89: mod_base = OTHER; note = 2'-O-methyl modified nucleotide
  modified_base 90: mod_base = OTHER; note = 2'-O-methyl modified nucleotide
  modified_base 91: mod_base = OTHER; note = 2'-O-methyl modified nucleotide
  modified_base 92: mod_base = OTHER; note = 2'-O-methyl modified nucleotide
  modified_base 93: mod_base = OTHER; note = 2'-O-methyl modified nucleotide
  modified_base 94: mod_base = OTHER; note = 2'-O-methyl modified nucleotide
  modified_base 95: mod_base = OTHER; note = 2'-O-methyl modified nucleotide
  modified_base 96: mod_base = OTHER; note = 2'-O-methyl modified nucleotide
  modified_base 125: mod_base = OTHER; note = Nucleotide with phosphorothioate linkage
  modified_base 126: mod_base = OTHER; note = 2'-O-methyl modified nucleotide with phosphorothioate linkage
  modified_base 127: mod_base = OTHER; note = 2'-O-methyl modified nucleotide with phosphorothioate linkage
  modified_base 128: mod_base = OTHER; note = 2'-O-methyl modified nucleotide
gagaatcaaaatcggtgaatgttttagagctagaaatagcaagttaaaataaggctagtccgttatcaacttgaaaaagtggcaccgagtcggtgcctgtctgcctatttagttgacaccgattttga

SEQ ID NO: 16069 - RNA, 127 nt, synthetic construct
  source 1..127: mol_type = other RNA
  modified_base 1: mod_base = OTHER; note = 2'-O-methyl modified nucleotide with phosphorothioate linkage
  modified_base 2: mod_base = OTHER; note = 2'-O-methyl modified nucleotide with phosphorothioate linkage
  modified_base 3: mod_base = OTHER; note = 2'-O-methyl modified nucleotide with phosphorothioate linkage
  modified_base 29: mod_base = OTHER; note = 2'-O-methyl modified nucleotide
  modified_base 30: mod_base = OTHER; note = 2'-O-methyl modified nucleotide
  modified_base 31: mod_base = OTHER; note = 2'-O-methyl modified nucleotide
  modified_base 32: mod_base = OTHER; note = 2'-O-methyl modified nucleotide
  modified_base 33: mod_base = OTHER; note = 2'-O-methyl modified nucleotide
  modified_base 34: mod_base = OTHER; note = 2'-O-methyl modified nucleotide
  modified_base 35: mod_base = OTHER; note = 2'-O-methyl modified nucleotide
  modified_base 36: mod_base = OTHER; note = 2'-O-methyl modified nucleotide
  modified_base 37: mod_base = OTHER; note = 2'-O-methyl modified nucleotide
  modified_base 38: mod_base = OTHER; note = 2'-O-methyl modified nucleotide
  modified_base 39: mod_base = OTHER; note = 2'-O-methyl modified nucleotide
  modified_base 40: mod_base = OTHER; note = 2'-O-methyl modified nucleotide
  modified_base 69: mod_base = OTHER; note = 2'-O-methyl modified nucleotide
  modified_base 70: mod_base = OTHER; note = 2'-O-methyl modified nucleotide
  modified_base 71: mod_base = OTHER; note = 2'-O-methyl modified nucleotide
  modified_base 72: mod_base = OTHER; note = 2'-O-methyl modified nucleotide
  modified_base 73: mod_base = OTHER; note = 2'-O-methyl modified nucleotide
  modified_base 74: mod_base = OTHER; note = 2'-O-methyl modified nucleotide
  modified_base 75: mod_base = OTHER; note = 2'-O-methyl modified nucleotide
  modified_base 76: mod_base = OTHER; note = 2'-O-methyl modified nucleotide
  modified_base 77: mod_base = OTHER; note = 2'-O-methyl modified nucleotide
  modified_base 78: mod_base = OTHER; note = 2'-O-methyl modified nucleotide
  modified_base 79: mod_base = OTHER; note = 2'-O-methyl modified nucleotide
  modified_base 80: mod_base = OTHER; note = 2'-O-methyl modified nucleotide
  modified_base 81: mod_base = OTHER; note = 2'-O-methyl modified nucleotide
  modified_base 82: mod_base = OTHER; note = 2'-O-methyl modified nucleotide
  modified_base 83: mod_base = OTHER; note = 2'-O-methyl modified nucleotide
  modified_base 84: mod_base = OTHER; note = 2'-O-methyl modified nucleotide
  modified_base 85: mod_base = OTHER; note = 2'-O-methyl modified nucleotide
  modified_base 86: mod_base = OTHER; note = 2'-O-methyl modified nucleotide
  modified_base 87: mod_base = OTHER; note = 2'-O-methyl modified nucleotide
  modified_base 88: mod_base = OTHER; note = 2'-O-methyl modified nucleotide
  modified_base 89: mod_base = OTHER; note = 2'-O-methyl modified nucleotide
  modified_base 90: mod_base = OTHER; note = 2'-O-methyl modified nucleotide
  modified_base 91: mod_base = OTHER; note = 2'-O-methyl modified nucleotide
  modified_base 92: mod_base = OTHER; note = 2'-O-methyl modified nucleotide
  modified_base 93: mod_base = OTHER; note = 2'-O-methyl modified nucleotide
  modified_base 94: mod_base = OTHER; note = 2'-O-methyl modified nucleotide
  modified_base 95: mod_base = OTHER; note = 2'-O-methyl modified nucleotide
  modified_base 96: mod_base = OTHER; note = 2'-O-methyl modified nucleotide
  modified_base 124: mod_base = OTHER; note = Nucleotide with phosphorothioate linkage
  modified_base 125: mod_base = OTHER; note = 2'-O-methyl modified nucleotide with phosphorothioate linkage
  modified_base 126: mod_base = OTHER; note = 2'-O-methyl modified nucleotide with phosphorothioate linkage
  modified_base 127: mod_base = OTHER; note = 2'-O-methyl modified nucleotide
gagaatcaaaatcggtgaatgttttagagctagaaatagcaagttaaaataaggctagtccgttatcaacttgaaaaagtggcaccgagtcggtgcctgtctgcctatttagttgacaccgattttg

SEQ ID NO: 16070 - RNA, 126 nt, synthetic construct
  source 1..126: mol_type = other RNA
  modified_base 1: mod_base = OTHER; note = 2'-O-methyl modified nucleotide with phosphorothioate linkage
  modified_base 2: mod_base = OTHER; note = 2'-O-methyl modified nucleotide with phosphorothioate linkage
  modified_base 3: mod_base = OTHER; note = 2'-O-methyl modified nucleotide with phosphorothioate linkage
  modified_base 29: mod_base = OTHER; note = 2'-O-methyl modified nucleotide
  modified_base 30: mod_base = OTHER; note = 2'-O-methyl modified nucleotide
  modified_base 31: mod_base = OTHER; note = 2'-O-methyl modified nucleotide
  modified_base 32: mod_base = OTHER; note = 2'-O-methyl modified nucleotide
  modified_base 33: mod_base = OTHER; note = 2'-O-methyl modified nucleotide
  modified_base 34: mod_base = OTHER; note = 2'-O-methyl modified nucleotide
  modified_base 35: mod_base = OTHER; note = 2'-O-methyl modified nucleotide
  modified_base 36: mod_base = OTHER; note = 2'-O-methyl modified nucleotide
  modified_base 37: mod_base = OTHER; note = 2'-O-methyl modified nucleotide
  modified_base 38: mod_base = OTHER; note = 2'-O-methyl modified nucleotide
  modified_base 39: mod_base = OTHER; note = 2'-O-methyl modified nucleotide
  modified_base 40: mod_base = OTHER; note = 2'-O-methyl modified nucleotide
  modified_base 69: mod_base = OTHER; note = 2'-O-methyl modified nucleotide
  modified_base 70: mod_base = OTHER; note = 2'-O-methyl modified nucleotide
  modified_base 71: mod_base = OTHER; note = 2'-O-methyl modified nucleotide
  modified_base 72: mod_base = OTHER; note = 2'-O-methyl modified nucleotide
  modified_base 73: mod_base = OTHER; note = 2'-O-methyl modified nucleotide
  modified_base 74: mod_base = OTHER; note = 2'-O-methyl modified nucleotide
  modified_base 75: mod_base = OTHER; note = 2'-O-methyl modified nucleotide
  modified_base 76: mod_base = OTHER; note = 2'-O-methyl modified nucleotide
  modified_base 77: mod_base = OTHER; note = 2'-O-methyl modified nucleotide
  modified_base 78: mod_base = OTHER; note = 2'-O-methyl modified nucleotide
  modified_base 79: mod_base = OTHER; note = 2'-O-methyl modified nucleotide
  modified_base 80: mod_base = OTHER; note = 2'-O-methyl modified nucleotide
  modified_base 81: mod_base = OTHER; note = 2'-O-methyl modified nucleotide
  modified_base 82: mod_base = OTHER; note = 2'-O-methyl modified nucleotide
  modified_base 83: mod_base = OTHER; note = 2'-O-methyl modified nucleotide
  modified_base 84: mod_base = OTHER; note = 2'-O-methyl modified nucleotide
  modified_base 85: mod_base = OTHER; note = 2'-O-methyl modified nucleotide
  modified_base 86: mod_base = OTHER; note = 2'-O-methyl modified nucleotide
  modified_base 87: mod_base = OTHER; note = 2'-O-methyl modified nucleotide
  modified_base 88: mod_base = OTHER; note = 2'-O-methyl modified nucleotide
  modified_base 89: mod_base = OTHER; note = 2'-O-methyl modified nucleotide
  modified_base 90: mod_base = OTHER; note = 2'-O-methyl modified nucleotide
  modified_base 91: mod_base = OTHER; note = 2'-O-methyl modified nucleotide
  modified_base 92: mod_base = OTHER; note = 2'-O-methyl modified nucleotide
  modified_base 93: mod_base = OTHER; note = 2'-O-methyl modified nucleotide
  modified_base 94: mod_base = OTHER; note = 2'-O-methyl modified nucleotide
  modified_base 95: mod_base = OTHER; note = 2'-O-methyl modified nucleotide
  modified_base 96: mod_base = OTHER; note = 2'-O-methyl modified nucleotide
  modified_base 123: mod_base = OTHER; note = Nucleotide with phosphorothioate linkage
  modified_base 124: mod_base = OTHER; note = 2'-O-methyl modified nucleotide with phosphorothioate linkage
  modified_base 125: mod_base = OTHER; note = 2'-O-methyl modified nucleotide with phosphorothioate linkage
  modified_base 126: mod_base = OTHER; note = 2'-O-methyl modified nucleotide
gagaatcaaaatcggtgaatgttttagagctagaaatagcaagttaaaataaggctagtccgttatcaacttgaaaaagtggcaccgagtcggtgcctgtctgcctatttagttgacaccgatttt

SEQ ID NO: 16071 - RNA, 125 nt, synthetic construct
  source 1..125: mol_type = other RNA
  modified_base 1: mod_base = OTHER; note = 2'-O-methyl modified nucleotide with phosphorothioate linkage
  modified_base 2: mod_base = OTHER; note = 2'-O-methyl modified nucleotide with phosphorothioate linkage
  modified_base 3: mod_base = OTHER; note = 2'-O-methyl modified nucleotide with phosphorothioate linkage
  modified_base 29: mod_base = OTHER; note = 2'-O-methyl modified nucleotide
  modified_base 30: mod_base = OTHER; note = 2'-O-methyl modified nucleotide
  modified_base 31: mod_base = OTHER; note = 2'-O-methyl modified nucleotide
  modified_base 32: mod_base = OTHER; note = 2'-O-methyl modified nucleotide
  modified_base 33: mod_base = OTHER; note = 2'-O-methyl modified nucleotide
  modified_base 34: mod_base = OTHER; note = 2'-O-methyl modified nucleotide
  modified_base 35: mod_base = OTHER; note = 2'-O-methyl modified nucleotide
  modified_base 36: mod_base = OTHER; note = 2'-O-methyl modified nucleotide
  modified_base 37: mod_base = OTHER; note = 2'-O-methyl modified nucleotide
  modified_base 38: mod_base = OTHER; note = 2'-O-methyl modified nucleotide
  modified_base 39: mod_base = OTHER; note = 2'-O-methyl modified nucleotide
  modified_base 40: mod_base = OTHER; note = 2'-O-methyl modified nucleotide
  modified_base 69: mod_base = OTHER; note = 2'-O-methyl modified nucleotide
  modified_base 70: mod_base = OTHER; note = 2'-O-methyl modified nucleotide
  modified_base 71: mod_base = OTHER; note = 2'-O-methyl modified nucleotide
  modified_base 72: mod_base = OTHER; note = 2'-O-methyl modified nucleotide
  modified_base 73: mod_base = OTHER; note = 2'-O-methyl modified nucleotide
  modified_base 74: mod_base = OTHER; note = 2'-O-methyl modified nucleotide
  modified_base 75: mod_base = OTHER; note = 2'-O-methyl modified nucleotide
  modified_base 76: mod_base = OTHER; note = 2'-O-methyl modified nucleotide
  modified_base 77: mod_base = OTHER; note = 2'-O-methyl modified nucleotide
  modified_base 78: mod_base = OTHER; note = 2'-O-methyl modified nucleotide
  modified_base 79: mod_base = OTHER; note = 2'-O-methyl modified nucleotide
  modified_base 80: mod_base = OTHER; note = 2'-O-methyl modified nucleotide
  modified_base 81: mod_base = OTHER; note = 2'-O-methyl modified nucleotide
  modified_base 82: mod_base = OTHER; note = 2'-O-methyl modified nucleotide
  modified_base 83: mod_base = OTHER; note = 2'-O-methyl modified nucleotide
  modified_base 84: mod_base = OTHER; note = 2'-O-methyl modified nucleotide
  modified_base 85: mod_base = OTHER; note = 2'-O-methyl modified nucleotide
  modified_base 86: mod_base = OTHER; note = 2'-O-methyl modified nucleotide
  modified_base 87: mod_base = OTHER; note = 2'-O-methyl modified nucleotide
  modified_base 88: mod_base = OTHER; note = 2'-O-methyl modified nucleotide
  modified_base 89: mod_base = OTHER; note = 2'-O-methyl modified nucleotide
  modified_base 90: mod_base = OTHER; note = 2'-O-methyl modified nucleotide
  modified_base 91: mod_base = OTHER; note = 2'-O-methyl modified nucleotide
  modified_base 92: mod_base = OTHER; note = 2'-O-methyl modified nucleotide
  modified_base 93: mod_base = OTHER; note = 2'-O-methyl modified nucleotide
  modified_base 94: mod_base = OTHER; note = 2'-O-methyl modified nucleotide
  modified_base 95: mod_base = OTHER; note = 2'-O-methyl modified nucleotide
  modified_base 96: mod_base = OTHER; note = 2'-O-methyl modified nucleotide
  modified_base 122: mod_base = OTHER; note = Nucleotide with phosphorothioate linkage
  modified_base 123: mod_base = OTHER; note = 2'-O-methyl modified nucleotide with phosphorothioate linkage
  modified_base 124: mod_base = OTHER; note = 2'-O-methyl modified nucleotide with phosphorothioate linkage
  modified_base 125: mod_base = OTHER; note = 2'-O-methyl modified nucleotide
gagaatcaaaatcggtgaatgttttagagctagaaatagcaagttaaaataaggctagtccgttatcaacttgaaaaagtggcaccgagtcggtgcctgtctgcctatttagttgacaccgattt

SEQ ID NO: 16072 - RNA, 124 nt, synthetic construct
  source 1..124: mol_type = other RNA
  modified_base 1: mod_base = OTHER; note = 2'-O-methyl modified nucleotide with phosphorothioate linkage
  modified_base 2: mod_base = OTHER; note = 2'-O-methyl modified nucleotide with phosphorothioate linkage
  modified_base 3: mod_base = OTHER; note = 2'-O-methyl modified nucleotide with phosphorothioate linkage
  modified_base 29: mod_base = OTHER; note = 2'-O-methyl modified nucleotide
  modified_base 30: mod_base = OTHER; note = 2'-O-methyl modified nucleotide
  modified_base 31: mod_base = OTHER; note = 2'-O-methyl modified nucleotide
  modified_base 32: mod_base = OTHER; note = 2'-O-methyl modified nucleotide
  modified_base 33: mod_base = OTHER; note = 2'-O-methyl modified nucleotide
  modified_base 34: mod_base = OTHER; note = 2'-O-methyl modified nucleotide
  modified_base 35: mod_base = OTHER; note = 2'-O-methyl modified nucleotide
  modified_base 36: mod_base = OTHER; note = 2'-O-methyl modified nucleotide
  modified_base 37: mod_base = OTHER; note = 2'-O-methyl modified nucleotide
  modified_base 38: mod_base = OTHER; note = 2'-O-methyl modified nucleotide
  modified_base 39: mod_base = OTHER; note = 2'-O-methyl modified nucleotide
  modified_base 40: mod_base = OTHER; note = 2'-O-methyl modified nucleotide
  modified_base 69: mod_base = OTHER; note = 2'-O-methyl modified nucleotide
  modified_base 70: mod_base = OTHER; note = 2'-O-methyl modified nucleotide
  modified_base 71: mod_base = OTHER; note = 2'-O-methyl modified nucleotide
  modified_base 72: mod_base = OTHER; note = 2'-O-methyl modified nucleotide
  modified_base 73: mod_base = OTHER; note = 2'-O-methyl modified nucleotide
  modified_base 74: mod_base = OTHER; note = 2'-O-methyl modified nucleotide
  modified_base 75: mod_base = OTHER; note = 2'-O-methyl modified nucleotide
  modified_base 76: mod_base = OTHER; note = 2'-O-methyl modified nucleotide
  modified_base 77: mod_base = OTHER; note = 2'-O-methyl modified nucleotide
  modified_base 78: mod_base = OTHER; note = 2'-O-methyl modified nucleotide
  modified_base 79: mod_base = OTHER; note = 2'-O-methyl modified nucleotide
  modified_base 80: mod_base = OTHER; note = 2'-O-methyl modified nucleotide
  modified_base 81: mod_base = OTHER; note = 2'-O-methyl modified nucleotide
  modified_base 82: mod_base = OTHER; note = 2'-O-methyl modified nucleotide
  modified_base 83: mod_base = OTHER; note = 2'-O-methyl modified nucleotide
  modified_base 84: mod_base = OTHER; note = 2'-O-methyl modified nucleotide
  modified_base 85: mod_base = OTHER; note = 2'-O-methyl modified nucleotide
  modified_base 86: mod_base = OTHER; note = 2'-O-methyl modified nucleotide
  modified_base 87: mod_base = OTHER; note = 2'-O-methyl modified nucleotide
  modified_base 88: mod_base = OTHER; note = 2'-O-methyl modified nucleotide
  modified_base 89: mod_base = OTHER; note = 2'-O-methyl modified nucleotide
  modified_base 90: mod_base = OTHER; note = 2'-O-methyl modified nucleotide
  modified_base 91: mod_base = OTHER; note = 2'-O-methyl modified nucleotide
  modified_base 92: mod_base = OTHER; note = 2'-O-methyl modified nucleotide
  modified_base 93: mod_base = OTHER; note = 2'-O-methyl modified nucleotide
  modified_base 94: mod_base = OTHER; note = 2'-O-methyl modified nucleotide
  modified_base 95: mod_base = OTHER; note = 2'-O-methyl modified nucleotide
  modified_base 96: mod_base = OTHER; note = 2'-O-methyl modified nucleotide
  modified_base 121: mod_base = OTHER; note = Nucleotide with phosphorothioate linkage
  modified_base 122: mod_base = OTHER; note = 2'-O-methyl modified nucleotide with phosphorothioate linkage
  modified_base 123: mod_base = OTHER; note = 2'-O-methyl modified nucleotide with phosphorothioate linkage
  modified_base 124: mod_base = OTHER; note = 2'-O-methyl modified nucleotide
gagaatcaaaatcggtgaatgttttagagctagaaatagcaagttaaaataaggctagtccgttatcaacttgaaaaagtggcaccgagtcggtgcctgtctgcctatttagttgacaccgatt

SEQ ID NO: 16073 - RNA, 131 nt, synthetic construct
  source 1..131: mol_type = other RNA
  modified_base 1: mod_base = OTHER; note = 2'-O-methyl modified nucleotide with phosphorothioate linkage
  modified_base 2: mod_base = OTHER; note = 2'-O-methyl modified nucleotide with phosphorothioate linkage
  modified_base 3: mod_base = OTHER; note = 2'-O-methyl modified nucleotide with phosphorothioate linkage
  modified_base 29: mod_base = OTHER; note = 2'-O-methyl modified nucleotide
  modified_base 30: mod_base = OTHER; note = 2'-O-methyl modified nucleotide
  modified_base 31: mod_base = OTHER; note = 2'-O-methyl modified nucleotide
  modified_base 32: mod_base = OTHER; note = 2'-O-methyl modified nucleotide
  modified_base 33: mod_base = OTHER; note = 2'-O-methyl modified nucleotide
  modified_base 34: mod_base = OTHER; note = 2'-O-methyl modified nucleotide
  modified_base 35: mod_base = OTHER; note = 2'-O-methyl modified nucleotide
  modified_base 36: mod_base = OTHER; note = 2'-O-methyl modified nucleotide
  modified_base 37: mod_base = OTHER; note = 2'-O-methyl modified nucleotide
  modified_base 38: mod_base = OTHER; note = 2'-O-methyl modified nucleotide
  modified_base 39: mod_base = OTHER; note = 2'-O-methyl modified nucleotide
  modified_base 40: mod_base = OTHER; note = 2'-O-methyl modified nucleotide
  modified_base 69: mod_base = OTHER; note = 2'-O-methyl modified nucleotide
  modified_base 70: mod_base = OTHER; note = 2'-O-methyl modified nucleotide
  modified_base 71: mod_base = OTHER; note = 2'-O-methyl modified nucleotide
  modified_base 72: mod_base = OTHER; note = 2'-O-methyl modified nucleotide
  modified_base 73: mod_base = OTHER; note = 2'-O-methyl modified nucleotide
  modified_base 74: mod_base = OTHER; note = 2'-O-methyl modified nucleotide
  modified_base 75: mod_base = OTHER; note = 2'-O-methyl modified nucleotide
  modified_base 76: mod_base = OTHER; note = 2'-O-methyl modified nucleotide
  modified_base 77: mod_base = OTHER; note = 2'-O-methyl modified nucleotide
  modified_base 78: mod_base = OTHER; note = 2'-O-methyl modified nucleotide
  modified_base 79: mod_base = OTHER; note = 2'-O-methyl modified nucleotide
  modified_base 80: mod_base = OTHER; note = 2'-O-methyl modified nucleotide
  modified_base 81: mod_base = OTHER; note = 2'-O-methyl modified nucleotide
  modified_base 82: mod_base = OTHER; note = 2'-O-methyl modified nucleotide
  modified_base 83: mod_base = OTHER; note = 2'-O-methyl modified nucleotide
  modified_base 84: mod_base = OTHER; note = 2'-O-methyl modified nucleotide
  modified_base 85: mod_base = OTHER; note = 2'-O-methyl modified nucleotide
  modified_base 86: mod_base = OTHER; note = 2'-O-methyl modified nucleotide
  modified_base 87: mod_base = OTHER; note = 2'-O-methyl modified nucleotide
  modified_base 88: mod_base = OTHER; note = 2'-O-methyl modified nucleotide
  modified_base 89: mod_base = OTHER; note = 2'-O-methyl modified nucleotide
  modified_base 90: mod_base = OTHER; note = 2'-O-methyl modified nucleotide
  modified_base 91: mod_base = OTHER; note = 2'-O-methyl modified nucleotide
  modified_base 92: mod_base = OTHER; note = 2'-O-methyl modified nucleotide
  modified_base 93: mod_base = OTHER; note = 2'-O-methyl modified nucleotide
  modified_base 94: mod_base = OTHER; note = 2'-O-methyl modified nucleotide
  modified_base 95: mod_base = OTHER; note = 2'-O-methyl modified nucleotide
  modified_base 96: mod_base = OTHER; note = 2'-O-methyl modified nucleotide
  modified_base 128: mod_base = OTHER; note = Nucleotide with phosphorothioate linkage
  modified_base 129: mod_base = OTHER; note = 2'-O-methyl modified nucleotide with phosphorothioate linkage
  modified_base 130: mod_base = OTHER; note = 2'-O-methyl modified nucleotide with phosphorothioate linkage
  modified_base 131: mod_base = OTHER; note = 2'-O-methyl modified nucleotide
gagaatcaaaatcggtgaatgttttagagctagaaatagcaagttaaaataaggctagtccgttatcaacttgaaaaagtggcaccgagtcggtgcgtctgtctgcctatttagttgacaccgattttgat

SEQ ID NO: 16074 - RNA, 130 nt, synthetic construct
  source 1..130: mol_type = other RNA
  modified_base 1: mod_base = OTHER; note = 2'-O-methyl modified nucleotide with phosphorothioate linkage
  modified_base 2: mod_base = OTHER; note = 2'-O-methyl modified nucleotide with phosphorothioate linkage
  modified_base 3: mod_base = OTHER; note = 2'-O-methyl modified nucleotide with phosphorothioate linkage
  modified_base 29: mod_base = OTHER; note = 2'-O-methyl modified nucleotide
  modified_base 30: mod_base = OTHER; note = 2'-O-methyl modified nucleotide
  modified_base 31: mod_base = OTHER; note = 2'-O-methyl modified nucleotide
  modified_base 32: mod_base = OTHER; note = 2'-O-methyl modified nucleotide
  modified_base 33: mod_base = OTHER; note = 2'-O-methyl modified nucleotide
  modified_base 34: mod_base = OTHER; note = 2'-O-methyl modified nucleotide
  modified_base 35: mod_base = OTHER; note = 2'-O-methyl modified nucleotide
  modified_base 36: mod_base = OTHER; note = 2'-O-methyl modified nucleotide
  modified_base 37: mod_base = OTHER; note = 2'-O-methyl modified nucleotide
  modified_base 38: mod_base = OTHER; note = 2'-O-methyl modified nucleotide
  modified_base 39: mod_base = OTHER; note = 2'-O-methyl modified nucleotide
  modified_base 40: mod_base = OTHER; note = 2'-O-methyl modified nucleotide
  modified_base 69: mod_base = OTHER; note = 2'-O-methyl modified nucleotide
  modified_base 70: mod_base = OTHER; note = 2'-O-methyl modified nucleotide
  modified_base 71: mod_base = OTHER; note = 2'-O-methyl modified nucleotide
  modified_base 72: mod_base = OTHER; note = 2'-O-methyl modified nucleotide
  modified_base 73: mod_base = OTHER; note = 2'-O-methyl modified nucleotide
  modified_base 74: mod_base = OTHER; note = 2'-O-methyl modified nucleotide
  modified_base 75: mod_base = OTHER; note = 2'-O-methyl modified nucleotide
  modified_base 76: mod_base = OTHER; note = 2'-O-methyl modified nucleotide
  modified_base 77: mod_base = OTHER; note = 2'-O-methyl modified nucleotide
  modified_base 78: mod_base = OTHER; note = 2'-O-methyl modified nucleotide
  modified_base 79: mod_base = OTHER; note = 2'-O-methyl modified nucleotide
  modified_base 80: mod_base = OTHER; note = 2'-O-methyl modified nucleotide
  modified_base 81: mod_base = OTHER; note = 2'-O-methyl modified nucleotide
  modified_base 82: mod_base = OTHER; note = 2'-O-methyl modified nucleotide
  modified_base 83: mod_base = OTHER; note = 2'-O-methyl modified nucleotide
  modified_base 84: mod_base = OTHER; note = 2'-O-methyl modified nucleotide
  modified_base 85: mod_base = OTHER; note = 2'-O-methyl modified nucleotide
  modified_base 86: mod_base = OTHER; note = 2'-O-methyl modified nucleotide
  modified_base 87: mod_base = OTHER; note = 2'-O-methyl modified nucleotide
  modified_base 88: mod_base = OTHER; note = 2'-O-methyl modified nucleotide
  modified_base 89: mod_base = OTHER; note = 2'-O-methyl modified nucleotide
  modified_base 90: mod_base = OTHER; note = 2'-O-methyl modified nucleotide
  modified_base 91: mod_base = OTHER; note = 2'-O-methyl modified nucleotide
  modified_base 92: mod_base = OTHER; note = 2'-O-methyl modified nucleotide
  modified_base 93: mod_base = OTHER; note = 2'-O-methyl modified nucleotide
  modified_base 94: mod_base = OTHER; note = 2'-O-methyl modified nucleotide
  modified_base 95: mod_base = OTHER; note = 2'-O-methyl modified nucleotide
  modified_base 96: mod_base = OTHER; note = 2'-O-methyl modified nucleotide
  modified_base 127: mod_base = OTHER; note = Nucleotide with phosphorothioate linkage
  modified_base 128: mod_base = OTHER; note = 2'-O-methyl modified nucleotide with phosphorothioate linkage
  modified_base 129: mod_base = OTHER; note = 2'-O-methyl modified nucleotide with phosphorothioate linkage
  modified_base 130: mod_base = OTHER; note = 2'-O-methyl modified nucleotide
gagaatcaaaatcggtgaatgttttagagctagaaatagcaagttaaaataaggctagtccgttatcaacttgaaaaagtggcaccgagtcggtgcgtctgtctgcctatttagttgacaccgattttga

SEQ ID NO: 16075 - RNA, 129 nt, synthetic construct
  source 1..129: mol_type = other RNA
  modified_base 1: mod_base = OTHER; note = 2'-O-methyl modified nucleotide with phosphorothioate linkage
  modified_base 2: mod_base = OTHER; note = 2'-O-methyl modified nucleotide with phosphorothioate linkage
  modified_base 3: mod_base = OTHER; note = 2'-O-methyl modified nucleotide with phosphorothioate linkage
  modified_base 29: mod_base = OTHER; note = 2'-O-methyl modified nucleotide
  modified_base 30: mod_base = OTHER; note = 2'-O-methyl modified nucleotide
  modified_base 31: mod_base = OTHER; note = 2'-O-methyl modified nucleotide
  modified_base 32: mod_base = OTHER; note = 2'-O-methyl modified nucleotide
  modified_base 33: mod_base = OTHER; note = 2'-O-methyl modified nucleotide
  modified_base 34: mod_base = OTHER; note = 2'-O-methyl modified nucleotide
  modified_base 35: mod_base = OTHER; note = 2'-O-methyl modified nucleotide
  modified_base 36: mod_base = OTHER; note = 2'-O-methyl modified nucleotide
  modified_base 37: mod_base = OTHER; note = 2'-O-methyl modified nucleotide
  modified_base 38: mod_base = OTHER; note = 2'-O-methyl modified nucleotide
  modified_base 39: mod_base = OTHER; note = 2'-O-methyl modified nucleotide
  modified_base 40: mod_base = OTHER; note = 2'-O-methyl modified nucleotide
  modified_base 69: mod_base = OTHER; note = 2'-O-methyl modified nucleotide
  modified_base 70: mod_base = OTHER; note = 2'-O-methyl modified nucleotide
  modified_base 71: mod_base = OTHER; note = 2'-O-methyl modified nucleotide
  modified_base 72: mod_base = OTHER; note = 2'-O-methyl modified nucleotide
  modified_base 73: mod_base = OTHER; note = 2'-O-methyl modified nucleotide
  modified_base 74: mod_base = OTHER; note = 2'-O-methyl modified nucleotide
  modified_base 75: mod_base = OTHER; note = 2'-O-methyl modified nucleotide
  modified_base 76: mod_base = OTHER; note = 2'-O-methyl modified nucleotide
  modified_base 77: mod_base = OTHER; note = 2'-O-methyl modified nucleotide
  modified_base 78: mod_base = OTHER; note = 2'-O-methyl modified nucleotide
  modified_base 79: mod_base = OTHER; note = 2'-O-methyl modified nucleotide
  modified_base 80: mod_base = OTHER; note = 2'-O-methyl modified nucleotide
  modified_base 81: mod_base = OTHER; note = 2'-O-methyl modified nucleotide
  modified_base 82: mod_base = OTHER; note = 2'-O-methyl modified nucleotide
  modified_base 83: mod_base = OTHER; note = 2'-O-methyl modified nucleotide
  modified_base 84: mod_base = OTHER; note = 2'-O-methyl modified nucleotide
  modified_base 85: mod_base = OTHER; note = 2'-O-methyl modified nucleotide
  modified_base 86: mod_base = OTHER; note = 2'-O-methyl modified nucleotide
  modified_base 87: mod_base = OTHER; note = 2'-O-methyl modified nucleotide
  modified_base 88: mod_base = OTHER; note = 2'-O-methyl modified nucleotide
  modified_base 89: mod_base = OTHER; note = 2'-O-methyl modified nucleotide
  modified_base 90: mod_base = OTHER; note = 2'-O-methyl modified nucleotide
  modified_base 91: mod_base = OTHER; note = 2'-O-methyl modified nucleotide
  modified_base 92: mod_base = OTHER; note = 2'-O-methyl modified nucleotide
  modified_base 93: mod_base = OTHER; note = 2'-O-methyl modified nucleotide
  modified_base 94: mod_base = OTHER; note = 2'-O-methyl modified nucleotide
  modified_base 95: mod_base = OTHER; note = 2'-O-methyl modified nucleotide
  modified_base 96: mod_base = OTHER; note = 2'-O-methyl modified nucleotide
  modified_base 126: mod_base = OTHER; note = Nucleotide with phosphorothioate linkage
  modified_base 127: mod_base = OTHER; note = 2'-O-methyl modified nucleotide with phosphorothioate linkage
  modified_base 128: mod_base = OTHER; note = 2'-O-methyl modified nucleotide with phosphorothioate linkage
  modified_base 129: mod_base = OTHER; note = 2'-O-methyl modified nucleotide
gagaatcaaaatcggtgaatgttttagagctagaaatagcaagttaaaataaggctagtccgttatcaacttgaaaaagtggcaccgagtcggtgcgtctgtctgcctatttagttgacaccgattttg

SEQ ID NO: 16076 - RNA, 128 nt, synthetic construct
  source 1..128: mol_type = other RNA
  modified_base 1: mod_base = OTHER; note = 2'-O-methyl modified nucleotide with phosphorothioate linkage
  modified_base 2: mod_base = OTHER; note = 2'-O-methyl modified nucleotide with phosphorothioate linkage
  modified_base 3: mod_base = OTHER; note = 2'-O-methyl modified nucleotide with phosphorothioate linkage
  modified_base 29: mod_base = OTHER; note = 2'-O-methyl modified nucleotide
  modified_base 30: mod_base = OTHER; note = 2'-O-methyl modified nucleotide
  modified_base 31: mod_base = OTHER; note = 2'-O-methyl modified nucleotide
  modified_base 32: mod_base = OTHER; note = 2'-O-methyl modified nucleotide
  modified_base 33: mod_base = OTHER; note = 2'-O-methyl modified nucleotide
  modified_base 34: mod_base = OTHER; note = 2'-O-methyl modified nucleotide
  modified_base 35: mod_base = OTHER; note = 2'-O-methyl modified nucleotide
  modified_base 36: mod_base = OTHER; note = 2'-O-methyl modified nucleotide
  modified_base 37: mod_base = OTHER; note = 2'-O-methyl modified nucleotide
  modified_base 38: mod_base = OTHER; note = 2'-O-methyl modified nucleotide
  modified_base 39: mod_base = OTHER; note = 2'-O-methyl modified nucleotide
  modified_base 40: mod_base = OTHER; note = 2'-O-methyl modified nucleotide
  modified_base 69: mod_base = OTHER; note = 2'-O-methyl modified nucleotide
  modified_base 70: mod_base = OTHER; note = 2'-O-methyl modified nucleotide
  modified_base 71: mod_base = OTHER; note = 2'-O-methyl modified nucleotide
  modified_base 72: mod_base = OTHER; note = 2'-O-methyl modified nucleotide
  modified_base 73: mod_base = OTHER; note = 2'-O-methyl modified nucleotide
  modified_base 74: mod_base = OTHER; note = 2'-O-methyl modified nucleotide
  modified_base 75: mod_base = OTHER; note = 2'-O-methyl modified nucleotide
  modified_base 76: mod_base = OTHER; note = 2'-O-methyl modified nucleotide
  modified_base 77: mod_base = OTHER; note = 2'-O-methyl modified nucleotide
  modified_base 78: mod_base = OTHER; note = 2'-O-methyl modified nucleotide
  modified_base 79: mod_base = OTHER; note = 2'-O-methyl modified nucleotide
  modified_base 80: mod_base = OTHER; note = 2'-O-methyl modified nucleotide
  modified_base 81: mod_base = OTHER; note = 2'-O-methyl modified nucleotide
  modified_base 82: mod_base = OTHER; note = 2'-O-methyl modified nucleotide
  modified_base 83: mod_base = OTHER; note = 2'-O-methyl modified nucleotide
  modified_base 84: mod_base = OTHER; note = 2'-O-methyl modified nucleotide
  modified_base 85: mod_base = OTHER; note = 2'-O-methyl modified nucleotide
  modified_base 86: mod_base = OTHER; note = 2'-O-methyl modified nucleotide
  modified_base 87: mod_base = OTHER; note = 2'-O-methyl modified nucleotide
  modified_base 88: mod_base = OTHER; note = 2'-O-methyl modified nucleotide
  modified_base 89: mod_base = OTHER; note = 2'-O-methyl modified nucleotide
  modified_base 90: mod_base = OTHER; note = 2'-O-methyl modified nucleotide
  modified_base 91: mod_base = OTHER; note = 2'-O-methyl modified nucleotide
  modified_base 92: mod_base = OTHER; note = 2'-O-methyl modified nucleotide
  modified_base 93: mod_base = OTHER; note = 2'-O-methyl modified nucleotide
  modified_base 94: mod_base = OTHER; note = 2'-O-methyl modified nucleotide
  modified_base 95: mod_base = OTHER; note = 2'-O-methyl modified nucleotide
  modified_base 96: mod_base = OTHER; note = 2'-O-methyl modified nucleotide
  modified_base 125: mod_base = OTHER; note = Nucleotide with phosphorothioate linkage
  modified_base 126: mod_base = OTHER; note = 2'-O-methyl modified nucleotide with phosphorothioate linkage
  modified_base 127: mod_base = OTHER; note = 2'-O-methyl modified nucleotide with phosphorothioate linkage
  modified_base 128: mod_base = OTHER; note = 2'-O-methyl modified nucleotide
gagaatcaaaatcggtgaatgttttagagctagaaatagcaagttaaaataaggctagtccgttatcaacttgaaaaagtggcaccgagtcggtgcgtctgtctgcctatttagttgacaccgatttt

SEQ ID NO: 16077 - RNA, 127 nt, synthetic construct
  source 1..127: mol_type = other RNA
  modified_base 1: mod_base = OTHER; note = 2'-O-methyl modified nucleotide with phosphorothioate linkage
  modified_base 2: mod_base = OTHER; note = 2'-O-methyl modified nucleotide with phosphorothioate linkage
  modified_base 3: mod_base = OTHER; note = 2'-O-methyl modified nucleotide with phosphorothioate linkage
  modified_base 29: mod_base = OTHER; note = 2'-O-methyl modified nucleotide
  modified_base 30: mod_base = OTHER; note = 2'-O-methyl modified nucleotide
  modified_base 31: mod_base = OTHER; note = 2'-O-methyl modified nucleotide
  modified_base 32: mod_base = OTHER; note = 2'-O-methyl modified nucleotide
  modified_base 33: mod_base = OTHER; note = 2'-O-methyl modified nucleotide
  modified_base 34: mod_base = OTHER; note = 2'-O-methyl modified nucleotide
  modified_base 35: mod_base = OTHER; note = 2'-O-methyl modified nucleotide
  modified_base 36: mod_base = OTHER; note = 2'-O-methyl modified nucleotide
  modified_base 37: mod_base = OTHER; note = 2'-O-methyl modified nucleotide
  modified_base 38: mod_base = OTHER; note = 2'-O-methyl modified nucleotide
  modified_base 39: mod_base = OTHER; note = 2'-O-methyl modified nucleotide
  modified_base 40: mod_base = OTHER; note = 2'-O-methyl modified nucleotide
  modified_base 69: mod_base = OTHER; note = 2'-O-methyl modified nucleotide
  modified_base 70: mod_base = OTHER; note = 2'-O-methyl modified nucleotide
  modified_base 71: mod_base = OTHER; note = 2'-O-methyl modified nucleotide
  modified_base 72: mod_base = OTHER; note = 2'-O-methyl modified nucleotide
  modified_base 73: mod_base = OTHER; note = 2'-O-methyl modified nucleotide
  modified_base 74: mod_base = OTHER; note = 2'-O-methyl modified nucleotide
  modified_base 75: mod_base = OTHER; note = 2'-O-methyl modified nucleotide
  modified_base 76: mod_base = OTHER; note = 2'-O-methyl modified nucleotide
  modified_base 77: mod_base = OTHER; note = 2'-O-methyl modified nucleotide
  modified_base 78: mod_base = OTHER; note = 2'-O-methyl modified nucleotide
  modified_base 79: mod_base = OTHER; note = 2'-O-methyl modified nucleotide
  modified_base 80: mod_base = OTHER; note = 2'-O-methyl modified nucleotide
  modified_base 81: mod_base = OTHER; note = 2'-O-methyl modified nucleotide
  modified_base 82: mod_base = OTHER; note = 2'-O-methyl modified nucleotide
  modified_base 83: mod_base = OTHER; note = 2'-O-methyl modified nucleotide
  modified_base 84: mod_base = OTHER; note = 2'-O-methyl modified nucleotide
  modified_base 85: mod_base = OTHER; note = 2'-O-methyl modified nucleotide
  modified_base 86: mod_base = OTHER; note = 2'-O-methyl modified nucleotide
  modified_base 87: mod_base = OTHER; note = 2'-O-methyl modified nucleotide
  modified_base 88: mod_base = OTHER; note = 2'-O-methyl modified nucleotide
  modified_base 89: mod_base = OTHER; note = 2'-O-methyl modified nucleotide
  modified_base 90: mod_base = OTHER; note = 2'-O-methyl modified nucleotide
  modified_base 91: mod_base = OTHER; note = 2'-O-methyl modified nucleotide
  modified_base 92: mod_base = OTHER; note = 2'-O-methyl modified nucleotide
  modified_base 93: mod_base = OTHER; note = 2'-O-methyl modified nucleotide
  modified_base 94: mod_base = OTHER; note = 2'-O-methyl modified nucleotide
  modified_base 95: mod_base = OTHER; note = 2'-O-methyl modified nucleotide
  modified_base 96: mod_base = OTHER; note = 2'-O-methyl modified nucleotide
  modified_base 124: mod_base = OTHER; note = Nucleotide with phosphorothioate linkage
  modified_base 125: mod_base = OTHER; note = 2'-O-methyl modified nucleotide with phosphorothioate linkage
  modified_base 126: mod_base = OTHER; note = 2'-O-methyl modified nucleotide with phosphorothioate linkage
  modified_base 127: mod_base = OTHER; note = 2'-O-methyl modified nucleotide
gagaatcaaaatcggtgaatgttttagagctagaaatagcaagttaaaataaggctagtccgttatcaacttgaaaaagtggcaccgagtcggtgcgtctgtctgcctatttagttgacaccgattt

SEQ ID NO: 16078 - RNA, 126 nt, synthetic construct
  source 1..126: mol_type = other RNA
  modified_base 1: mod_base = OTHER; note = 2'-O-methyl modified nucleotide with phosphorothioate linkage
  modified_base 2: mod_base = OTHER; note = 2'-O-methyl modified nucleotide with phosphorothioate linkage
  modified_base 3: mod_base = OTHER; note = 2'-O-methyl modified nucleotide with phosphorothioate linkage
  modified_base 29: mod_base = OTHER; note = 2'-O-methyl modified nucleotide
  modified_base 30: mod_base = OTHER; note = 2'-O-methyl modified nucleotide
  modified_base 31: mod_base = OTHER; note = 2'-O-methyl modified nucleotide
  modified_base 32: mod_base = OTHER; note = 2'-O-methyl modified nucleotide
  modified_base 33: mod_base = OTHER; note = 2'-O-methyl modified nucleotide
  modified_base 34: mod_base = OTHER; note = 2'-O-methyl modified nucleotide
  modified_base 35: mod_base = OTHER; note = 2'-O-methyl modified nucleotide
  modified_base 36: mod_base = OTHER; note = 2'-O-methyl modified nucleotide
  modified_base 37: mod_base = OTHER; note = 2'-O-methyl modified nucleotide
  modified_base 38: mod_base = OTHER; note = 2'-O-methyl modified nucleotide
  modified_base 39: mod_base = OTHER; note = 2'-O-methyl modified nucleotide
  modified_base 40: mod_base = OTHER; note = 2'-O-methyl modified nucleotide
  modified_base 69: mod_base = OTHER; note = 2'-O-methyl modified nucleotide
  modified_base 70: mod_base = OTHER; note = 2'-O-methyl modified nucleotide
  modified_base 71: mod_base = OTHER; note = 2'-O-methyl modified nucleotide
  modified_base 72: mod_base = OTHER; note = 2'-O-methyl modified nucleotide
  modified_base 73: mod_base = OTHER; note = 2'-O-methyl modified nucleotide
  modified_base 74: mod_base = OTHER; note = 2'-O-methyl modified nucleotide
  modified_base 75: mod_base = OTHER; note = 2'-O-methyl modified nucleotide
  modified_base 76: mod_base = OTHER; note = 2'-O-methyl modified nucleotide
  modified_base 77: mod_base = OTHER; note = 2'-O-methyl modified nucleotide
  modified_base 78: mod_base = OTHER; note = 2'-O-methyl modified nucleotide
  modified_base 79: mod_base = OTHER; note = 2'-O-methyl modified nucleotide
  modified_base 80: mod_base = OTHER; note = 2'-O-methyl modified nucleotide
  modified_base 81: mod_base = OTHER; note = 2'-O-methyl modified nucleotide
  modified_base 82: mod_base = OTHER; note = 2'-O-methyl modified nucleotide
  modified_base 83: mod_base = OTHER; note = 2'-O-methyl modified nucleotide
  modified_base 84: mod_base = OTHER; note = 2'-O-methyl modified nucleotide
  modified_base 85: mod_base = OTHER; note = 2'-O-methyl modified nucleotide
  modified_base 86: mod_base = OTHER; note = 2'-O-methyl modified nucleotide
  modified_base 87: mod_base = OTHER; note = 2'-O-methyl modified nucleotide
  modified_base 88: mod_base = OTHER; note = 2'-O-methyl modified nucleotide
  modified_base 89: mod_base = OTHER; note = 2'-O-methyl modified nucleotide
  modified_base 90: mod_base = OTHER; note = 2'-O-methyl modified nucleotide
  modified_base 91: mod_base = OTHER; note = 2'-O-methyl modified nucleotide
  modified_base 92: mod_base = OTHER; note = 2'-O-methyl modified nucleotide
  modified_base 93: mod_base = OTHER; note = 2'-O-methyl modified nucleotide
  modified_base 94: mod_base = OTHER; note = 2'-O-methyl modified nucleotide
  modified_base 95: mod_base = OTHER; note = 2'-O-methyl modified nucleotide
  modified_base 96: mod_base = OTHER; note = 2'-O-methyl modified nucleotide
  modified_base 123: mod_base = OTHER; note = Nucleotide with phosphorothioate linkage
  modified_base 124: mod_base = OTHER; note = 2'-O-methyl modified nucleotide with phosphorothioate linkage
  modified_base 125: mod_base = OTHER; note = 2'-O-methyl modified nucleotide with phosphorothioate linkage
  modified_base 126: mod_base = OTHER; note = 2'-O-methyl modified nucleotide
gagaatcaaaatcggtgaatgttttagagctagaaatagcaagttaaaataaggctagtccgttatcaacttgaaaaagtggcaccgagtcggtgcgtctgtctgcctatttagttgacaccgatt

SEQ ID NO: 16079 - RNA, 133 nt, synthetic construct
  source 1..133: mol_type = other RNA
  modified_base 1: mod_base = OTHER; note = 2'-O-methyl modified nucleotide with phosphorothioate linkage
  modified_base 2: mod_base = OTHER; note = 2'-O-methyl modified nucleotide with phosphorothioate linkage
  modified_base 3: mod_base = OTHER; note = 2'-O-methyl modified nucleotide with phosphorothioate linkage
  modified_base 29: mod_base = OTHER; note = 2'-O-methyl modified nucleotide
  modified_base 30: mod_base = OTHER; note = 2'-O-methyl modified nucleotide
  modified_base 31: mod_base = OTHER; note = 2'-O-methyl modified nucleotide
  modified_base 32: mod_base = OTHER; note = 2'-O-methyl modified nucleotide
  modified_base 33: mod_base = OTHER; note = 2'-O-methyl modified nucleotide
  modified_base 34: mod_base = OTHER; note = 2'-O-methyl modified nucleotide
  modified_base 35: mod_base = OTHER; note = 2'-O-methyl modified nucleotide
  modified_base 36: mod_base = OTHER; note = 2'-O-methyl modified nucleotide
  modified_base 37: mod_base = OTHER; note = 2'-O-methyl modified nucleotide
  modified_base 38: mod_base = OTHER; note = 2'-O-methyl modified nucleotide
  modified_base 39: mod_base = OTHER; note = 2'-O-methyl modified nucleotide
  modified_base 40: mod_base = OTHER; note = 2'-O-methyl modified nucleotide
  modified_base 69: mod_base = OTHER; note = 2'-O-methyl modified nucleotide
  modified_base 70: mod_base = OTHER; note = 2'-O-methyl modified nucleotide
  modified_base 71: mod_base = OTHER; note = 2'-O-methyl modified nucleotide
  modified_base 72: mod_base = OTHER; note = 2'-O-methyl modified nucleotide
  modified_base 73: mod_base = OTHER; note = 2'-O-methyl modified nucleotide
  modified_base 74: mod_base = OTHER; note = 2'-O-methyl modified nucleotide
  modified_base 75: mod_base = OTHER; note = 2'-O-methyl modified nucleotide
  modified_base 76: mod_base = OTHER; note = 2'-O-methyl modified nucleotide
  modified_base 77: mod_base = OTHER; note = 2'-O-methyl modified nucleotide
  modified_base 78: mod_base = OTHER; note = 2'-O-methyl modified nucleotide
  modified_base 79: mod_base = OTHER; note = 2'-O-methyl modified nucleotide
  modified_base 80: mod_base = OTHER; note = 2'-O-methyl modified nucleotide
  modified_base 81: mod_base = OTHER; note = 2'-O-methyl modified nucleotide
  modified_base 82: mod_base = OTHER; note = 2'-O-methyl modified nucleotide
  modified_base 83: mod_base = OTHER; note = 2'-O-methyl modified nucleotide
  modified_base 84: mod_base = OTHER; note = 2'-O-methyl modified nucleotide
  modified_base 85: mod_base = OTHER; note = 2'-O-methyl modified nucleotide
  modified_base 86: mod_base = OTHER; note = 2'-O-methyl modified nucleotide
  modified_base 87: mod_base = OTHER; note = 2'-O-methyl modified nucleotide
  modified_base 88: mod_base = OTHER; note = 2'-O-methyl modified nucleotide
  modified_base 89: mod_base = OTHER; note = 2'-O-methyl modified nucleotide
  modified_base 90: mod_base = OTHER; note = 2'-O-methyl modified nucleotide
  modified_base 91: mod_base = OTHER; note = 2'-O-methyl modified nucleotide
  modified_base 92: mod_base = OTHER; note = 2'-O-methyl modified nucleotide
  modified_base 93: mod_base = OTHER; note = 2'-O-methyl modified nucleotide
  modified_base 94: mod_base = OTHER; note = 2'-O-methyl modified nucleotide
  modified_base 95: mod_base = OTHER; note = 2'-O-methyl modified nucleotide
  modified_base 96: mod_base = OTHER; note = 2'-O-methyl modified nucleotide
  modified_base 130: mod_base = OTHER; note = Nucleotide with phosphorothioate linkage
  modified_base 131: mod_base = OTHER; note = 2'-O-methyl modified nucleotide with phosphorothioate linkage
  modified_base 132: mod_base = OTHER; note = 2'-O-methyl modified nucleotide with phosphorothioate linkage
  modified_base 133: mod_base = OTHER; note = 2'-O-methyl modified nucleotide
gagaatcaaaatcggtgaatgttttagagctagaaatagcaagttaaaataaggctagtccgttatcaacttgaaaaagtggcaccgagtcggtgcaagtctgtctgcctatttagttgacaccgattttgat

SEQ ID NO: 16080 - RNA, 132 nt, synthetic construct
  source 1..132: mol_type = other RNA
  modified_base 1: mod_base = OTHER; note = 2'-O-methyl modified nucleotide with phosphorothioate linkage
  modified_base 2: mod_base = OTHER; note = 2'-O-methyl modified nucleotide with phosphorothioate linkage
  modified_base 3: mod_base = OTHER; note = 2'-O-methyl modified nucleotide with phosphorothioate linkage
  modified_base 29: mod_base = OTHER; note = 2'-O-methyl modified nucleotide
  modified_base 30: mod_base = OTHER; note = 2'-O-methyl modified nucleotide
  modified_base 31: mod_base = OTHER; note = 2'-O-methyl modified nucleotide
  modified_base 32: mod_base = OTHER; note = 2'-O-methyl modified nucleotide
  modified_base 33: mod_base = OTHER; note = 2'-O-methyl modified nucleotide
  modified_base 34: mod_base = OTHER; note = 2'-O-methyl modified nucleotide
  modified_base 35: mod_base = OTHER; note = 2'-O-methyl modified nucleotide
  modified_base 36: mod_base = OTHER; note = 2'-O-methyl modified nucleotide
  modified_base 37: mod_base = OTHER; note = 2'-O-methyl modified nucleotide
  modified_base 38: mod_base = OTHER; note = 2'-O-methyl modified nucleotide
  modified_base 39: mod_base = OTHER; note = 2'-O-methyl modified nucleotide
  modified_base 40: mod_base = OTHER; note = 2'-O-methyl modified nucleotide
  modified_base 69: mod_base = OTHER; note = 2'-O-methyl modified nucleotide
  modified_base 70: mod_base = OTHER; note = 2'-O-methyl modified nucleotide
  modified_base 71: mod_base = OTHER; note = 2'-O-methyl modified nucleotide
  modified_base 72: mod_base = OTHER; note = 2'-O-methyl modified nucleotide
  modified_base 73: mod_base = OTHER; note = 2'-O-methyl modified nucleotide
  modified_base 74: mod_base = OTHER; note = 2'-O-methyl modified nucleotide
  modified_base 75: mod_base = OTHER; note = 2'-O-methyl modified nucleotide
  modified_base 76: mod_base = OTHER; note = 2'-O-methyl modified nucleotide
  modified_base 77: mod_base = OTHER; note = 2'-O-methyl modified nucleotide
  modified_base 78: mod_base = OTHER; note = 2'-O-methyl modified nucleotide
  modified_base 79: mod_base = OTHER; note = 2'-O-methyl modified nucleotide
  modified_base 80: mod_base = OTHER; note = 2'-O-methyl modified nucleotide
  modified_base 81: mod_base = OTHER; note = 2'-O-methyl modified nucleotide
  modified_base 82: mod_base = OTHER; note = 2'-O-methyl modified nucleotide
  modified_base 83: mod_base = OTHER; note = 2'-O-methyl modified nucleotide
  modified_base 84: mod_base = OTHER; note = 2'-O-methyl modified nucleotide
  modified_base 85: mod_base = OTHER; note = 2'-O-methyl modified nucleotide
  modified_base 86: mod_base = OTHER; note = 2'-O-methyl modified nucleotide
  modified_base 87: mod_base = OTHER; note = 2'-O-methyl modified nucleotide
  modified_base 88: mod_base = OTHER; note = 2'-O-methyl modified nucleotide
  modified_base 89: mod_base = OTHER; note = 2'-O-methyl modified nucleotide
  modified_base 90: mod_base = OTHER; note = 2'-O-methyl modified nucleotide
  modified_base 91: mod_base = OTHER; note = 2'-O-methyl modified nucleotide
  modified_base 92: mod_base = OTHER; note = 2'-O-methyl modified nucleotide
  modified_base 93: mod_base = OTHER; note = 2'-O-methyl modified nucleotide
  modified_base 94: mod_base = OTHER; note = 2'-O-methyl modified nucleotide
  modified_base 95: mod_base = OTHER; note = 2'-O-methyl modified nucleotide
  modified_base 96: mod_base = OTHER; note = 2'-O-methyl modified nucleotide
  modified_base 129: mod_base = OTHER; note = Nucleotide with phosphorothioate linkage
  modified_base 130: mod_base = OTHER; note = 2'-O-methyl modified nucleotide with phosphorothioate linkage
  modified_base 131: mod_base = OTHER; note = 2'-O-methyl modified nucleotide with phosphorothioate linkage
  modified_base 132: mod_base = OTHER; note = 2'-O-methyl modified nucleotide
gagaatcaaaatcggtgaatgttttagagctagaaatagcaagttaaaataaggctagtccgttatcaacttgaaaaagtggcaccgagtcggtgcaagtctgtctgcctatttagttgacaccgattttga

SEQ ID NO: 16081 - RNA, 131 nt, synthetic construct
  source 1..131: mol_type = other RNA
  modified_base 1: mod_base = OTHER; note = 2'-O-methyl modified nucleotide with phosphorothioate linkage
  modified_base 2: mod_base = OTHER; note = 2'-O-methyl modified nucleotide with phosphorothioate linkage
  modified_base 3: mod_base = OTHER; note = 2'-O-methyl modified nucleotide with phosphorothioate linkage
  modified_base 29: mod_base = OTHER; note = 2'-O-methyl modified nucleotide
  modified_base 30: mod_base = OTHER; note = 2'-O-methyl modified nucleotide
  modified_base 31: mod_base = OTHER; note = 2'-O-methyl modified nucleotide
  modified_base 32: mod_base = OTHER; note = 2'-O-methyl modified nucleotide
  modified_base 33: mod_base = OTHER; note = 2'-O-methyl modified nucleotide
  modified_base 34: mod_base = OTHER; note = 2'-O-methyl modified nucleotide
  modified_base 35: mod_base = OTHER; note = 2'-O-methyl modified nucleotide
  modified_base 36: mod_base = OTHER; note = 2'-O-methyl modified nucleotide
  modified_base 37: mod_base = OTHER; note = 2'-O-methyl modified nucleotide
  modified_base 38: mod_base = OTHER; note = 2'-O-methyl modified nucleotide
  modified_base 39: mod_base = OTHER; note = 2'-O-methyl modified nucleotide
  modified_base 40: mod_base = OTHER; note = 2'-O-methyl modified nucleotide
  modified_base 69: mod_base = OTHER; note = 2'-O-methyl modified nucleotide
  modified_base 70: mod_base = OTHER; note = 2'-O-methyl modified nucleotide
  modified_base 71: mod_base = OTHER; note = 2'-O-methyl modified nucleotide
  modified_base 72: mod_base = OTHER; note = 2'-O-methyl modified nucleotide
  modified_base 73: mod_base = OTHER; note = 2'-O-methyl modified nucleotide
  modified_base 74: mod_base = OTHER; note = 2'-O-methyl modified nucleotide
  modified_base 75: mod_base = OTHER; note = 2'-O-methyl modified nucleotide
  modified_base 76: mod_base = OTHER; note = 2'-O-methyl modified nucleotide
  modified_base 77: mod_base = OTHER; note = 2'-O-methyl modified nucleotide
  modified_base 78: mod_base = OTHER; note = 2'-O-methyl modified nucleotide
  modified_base 79: mod_base = OTHER; note = 2'-O-methyl modified nucleotide
  modified_base 80: mod_base = OTHER; note = 2'-O-methyl modified nucleotide
  modified_base 81: mod_base = OTHER; note = 2'-O-methyl modified nucleotide
  modified_base 82: mod_base = OTHER; note = 2'-O-methyl modified nucleotide
  modified_base 83: mod_base = OTHER; note = 2'-O-methyl modified nucleotide
  modified_base 84: mod_base = OTHER; note = 2'-O-methyl modified nucleotide
  modified_base 85: mod_base = OTHER; note = 2'-O-methyl modified nucleotide
  modified_base 86: mod_base = OTHER; note = 2'-O-methyl modified nucleotide
  modified_base 87: mod_base = OTHER; note = 2'-O-methyl modified nucleotide
  modified_base 88: mod_base = OTHER; note = 2'-O-methyl modified nucleotide
  modified_base 89: mod_base = OTHER; note = 2'-O-methyl modified nucleotide
  modified_base 90: mod_base = OTHER; note = 2'-O-methyl modified nucleotide
  modified_base 91: mod_base = OTHER; note = 2'-O-methyl modified nucleotide
  modified_base 92: mod_base = OTHER; note = 2'-O-methyl modified nucleotide
  modified_base 93: mod_base = OTHER; note = 2'-O-methyl modified nucleotide
  modified_base 94: mod_base = OTHER; note = 2'-O-methyl modified nucleotide
  modified_base 95: mod_base = OTHER; note = 2'-O-methyl modified nucleotide
  modified_base 96: mod_base = OTHER; note = 2'-O-methyl modified nucleotide
  modified_base 128: mod_base = OTHER; note = Nucleotide with phosphorothioate linkage
  modified_base 129: mod_base = OTHER; note = 2'-O-methyl modified nucleotide with phosphorothioate linkage
  modified_base 130: mod_base = OTHER; note = 2'-O-methyl modified nucleotide with phosphorothioate linkage
  modified_base 131: mod_base = OTHER; note = 2'-O-methyl modified nucleotide
gagaatcaaaatcggtgaatgttttagagctagaaatagcaagttaaaataaggctagtccgttatcaacttgaaaaagtggcaccgagtcggtgcaagtctgtctgcctatttagttgacaccgattttg

SEQ ID NO: 16082 - RNA, 130 nt, synthetic construct
  source 1..130: mol_type = other RNA
  modified_base 1: mod_base = OTHER; note = 2'-O-methyl modified nucleotide with phosphorothioate linkage
  modified_base 2: mod_base = OTHER; note = 2'-O-methyl modified nucleotide with phosphorothioate linkage
  modified_base 3: mod_base = OTHER; note = 2'-O-methyl modified nucleotide with phosphorothioate linkage
  modified_base 29: mod_base = OTHER; note = 2'-O-methyl modified nucleotide
  modified_base 30: mod_base = OTHER; note = 2'-O-methyl modified nucleotide
  modified_base 31: mod_base = OTHER; note = 2'-O-methyl modified nucleotide
  modified_base 32: mod_base = OTHER; note = 2'-O-methyl modified nucleotide
  modified_base 33: mod_base = OTHER; note = 2'-O-methyl modified nucleotide
  modified_base 34: mod_base = OTHER; note = 2'-O-methyl modified nucleotide
  modified_base 35: mod_base = OTHER; note = 2'-O-methyl modified nucleotide
  modified_base 36: mod_base = OTHER; note = 2'-O-methyl modified nucleotide
  modified_base 37: mod_base = OTHER; note = 2'-O-methyl modified nucleotide
  modified_base 38: mod_base = OTHER; note = 2'-O-methyl modified nucleotide
  modified_base 39: mod_base = OTHER; note = 2'-O-methyl modified nucleotide
  modified_base 40: mod_base = OTHER; note = 2'-O-methyl modified nucleotide
  modified_base 69: mod_base = OTHER; note = 2'-O-methyl modified nucleotide
  modified_base 70: mod_base = OTHER; note = 2'-O-methyl modified nucleotide
  modified_base 71: mod_base = OTHER; note = 2'-O-methyl modified nucleotide
  modified_base 72: mod_base = OTHER; note = 2'-O-methyl modified nucleotide
  modified_base 73: mod_base = OTHER; note = 2'-O-methyl modified nucleotide
  modified_base 74: mod_base = OTHER; note = 2'-O-methyl modified nucleotide
  modified_base 75: mod_base = OTHER; note = 2'-O-methyl modified nucleotide
  modified_base 76: mod_base = OTHER; note = 2'-O-methyl modified nucleotide
  modified_base 77: mod_base = OTHER; note = 2'-O-methyl modified nucleotide
  modified_base 78: mod_base = OTHER; note = 2'-O-methyl modified nucleotide
  modified_base 79: mod_base = OTHER; note = 2'-O-methyl modified nucleotide
  modified_base 80: mod_base = OTHER; note = 2'-O-methyl modified nucleotide
  modified_base 81: mod_base = OTHER; note = 2'-O-methyl modified nucleotide
  modified_base 82: mod_base = OTHER; note = 2'-O-methyl modified nucleotide
  modified_base 83: mod_base = OTHER; note = 2'-O-methyl modified nucleotide
  modified_base 84: mod_base = OTHER; note = 2'-O-methyl modified nucleotide
  modified_base 85: mod_base = OTHER; note = 2'-O-methyl modified nucleotide
  modified_base 86: mod_base = OTHER; note = 2'-O-methyl modified nucleotide
  modified_base 87: mod_base = OTHER; note = 2'-O-methyl modified nucleotide
  modified_base 88: mod_base = OTHER; note = 2'-O-methyl modified nucleotide
  modified_base 89: mod_base = OTHER; note = 2'-O-methyl modified nucleotide
  modified_base 90: mod_base = OTHER; note = 2'-O-methyl modified nucleotide
  modified_base 91: mod_base = OTHER; note = 2'-O-methyl modified nucleotide
  modified_base 92: mod_base = OTHER; note = 2'-O-methyl modified nucleotide
  modified_base 93: mod_base = OTHER; note = 2'-O-methyl modified nucleotide
  modified_base 94: mod_base = OTHER; note = 2'-O-methyl modified nucleotide
  modified_base 95: mod_base = OTHER; note = 2'-O-methyl modified nucleotide
  modified_base 96: mod_base = OTHER; note = 2'-O-methyl modified nucleotide
  modified_base 127: mod_base = OTHER; note = Nucleotide with phosphorothioate linkage
  modified_base 128: mod_base = OTHER; note = 2'-O-methyl modified nucleotide with phosphorothioate linkage
  modified_base 129: mod_base = OTHER; note = 2'-O-methyl modified nucleotide with phosphorothioate linkage
  modified_base 130: mod_base = OTHER; note = 2'-O-methyl modified nucleotide
gagaatcaaaatcggtgaatgttttagagctagaaatagcaagttaaaataaggctagtccgttatcaacttgaaaaagtggcaccgagtcggtgcaagtctgtctgcctatttagttgacaccgatttt

SEQ ID NO: 16083 - RNA, 129 nt, synthetic construct
  source 1..129: mol_type = other RNA
  modified_base 1: mod_base = OTHER; note = 2'-O-methyl modified nucleotide with phosphorothioate linkage
  modified_base 2: mod_base = OTHER; note = 2'-O-methyl modified nucleotide with phosphorothioate linkage
  modified_base 3: mod_base = OTHER; note = 2'-O-methyl modified nucleotide with phosphorothioate linkage
  modified_base 29: mod_base = OTHER; note = 2'-O-methyl modified nucleotide
  modified_base 30: mod_base = OTHER; note = 2'-O-methyl modified nucleotide
  modified_base 31: mod_base = OTHER; note = 2'-O-methyl modified nucleotide
  modified_base 32: mod_base = OTHER; note = 2'-O-methyl modified nucleotide
  modified_base 33: mod_base = OTHER; note = 2'-O-methyl modified nucleotide
  modified_base 34: mod_base = OTHER; note = 2'-O-methyl modified nucleotide
  modified_base 35: mod_base = OTHER; note = 2'-O-methyl modified nucleotide
  modified_base 36: mod_base = OTHER; note = 2'-O-methyl modified nucleotide
  modified_base 37: mod_base = OTHER; note = 2'-O-methyl modified nucleotide
  modified_base 38: mod_base = OTHER; note = 2'-O-methyl modified nucleotide
  modified_base 39: mod_base = OTHER; note = 2'-O-methyl modified nucleotide
  modified_base 40: mod_base = OTHER; note = 2'-O-methyl modified nucleotide
  modified_base 69: mod_base = OTHER; note = 2'-O-methyl modified nucleotide
  modified_base 70: mod_base = OTHER; note = 2'-O-methyl modified nucleotide
  modified_base 71: mod_base = OTHER; note = 2'-O-methyl modified nucleotide
  modified_base 72: mod_base = OTHER; note = 2'-O-methyl modified nucleotide
  modified_base 73: mod_base = OTHER; note = 2'-O-methyl modified nucleotide
  modified_base 74: mod_base = OTHER; note = 2'-O-methyl modified nucleotide
  modified_base 75: mod_base = OTHER; note = 2'-O-methyl modified nucleotide
  modified_base 76: mod_base = OTHER; note = 2'-O-methyl modified nucleotide
  modified_base 77: mod_base = OTHER; note = 2'-O-methyl modified nucleotide
  modified_base 78: mod_base = OTHER; note = 2'-O-methyl modified nucleotide
  modified_base 79: mod_base = OTHER; note = 2'-O-methyl modified nucleotide
  modified_base 80: mod_base = OTHER; note = 2'-O-methyl modified nucleotide
  modified_base 81: mod_base = OTHER; note = 2'-O-methyl modified nucleotide
  modified_base 82: mod_base = OTHER; note = 2'-O-methyl modified nucleotide
  modified_base 83: mod_base = OTHER; note = 2'-O-methyl modified nucleotide
  modified_base 84: mod_base = OTHER; note = 2'-O-methyl modified nucleotide
  modified_base 85: mod_base = OTHER; note = 2'-O-methyl modified nucleotide
  modified_base 86: mod_base = OTHER; note = 2'-O-methyl modified nucleotide
  modified_base 87: mod_base = OTHER; note = 2'-O-methyl modified nucleotide
  modified_base 88: mod_base = OTHER; note = 2'-O-methyl modified nucleotide
  modified_base 89: mod_base = OTHER; note = 2'-O-methyl modified nucleotide
  modified_base 90: mod_base = OTHER; note = 2'-O-methyl modified nucleotide
  modified_base 91: mod_base = OTHER; note = 2'-O-methyl modified nucleotide
  modified_base 92: mod_base = OTHER; note = 2'-O-methyl modified nucleotide
  modified_base 93: mod_base = OTHER; note = 2'-O-methyl modified nucleotide
  modified_base 94: mod_base = OTHER; note = 2'-O-methyl modified nucleotide
  modified_base 95: mod_base = OTHER; note = 2'-O-methyl modified nucleotide
  modified_base 96: mod_base = OTHER; note = 2'-O-methyl modified nucleotide
  modified_base 126: mod_base = OTHER; note = Nucleotide with phosphorothioate linkage
  modified_base 127: mod_base = OTHER; note = 2'-O-methyl modified nucleotide with phosphorothioate linkage
  modified_base 128: mod_base = OTHER; note = 2'-O-methyl modified nucleotide with phosphorothioate linkage
  modified_base 129: mod_base = OTHER; note = 2'-O-methyl modified nucleotide
gagaatcaaaatcggtgaatgttttagagctagaaatagcaagttaaaataaggctagtccgttatcaacttgaaaaagtggcaccgagtcggtgcaagtctgtctgcctatttagttgacaccgattt

SEQ ID NO: 16084 - RNA, 128 nt, synthetic construct
  source 1..128: mol_type = other RNA
  modified_base 1: mod_base = OTHER; note = 2'-O-methyl modified nucleotide with phosphorothioate linkage
  modified_base 2: mod_base = OTHER; note = 2'-O-methyl modified nucleotide with phosphorothioate linkage
  modified_base 3: mod_base = OTHER; note = 2'-O-methyl modified nucleotide with phosphorothioate linkage
  modified_base 29: mod_base = OTHER; note = 2'-O-methyl modified nucleotide
  modified_base 30: mod_base = OTHER; note = 2'-O-methyl modified nucleotide
  modified_base 31: mod_base = OTHER; note = 2'-O-methyl modified nucleotide
  modified_base 32: mod_base = OTHER; note = 2'-O-methyl modified nucleotide
  modified_base 33: mod_base = OTHER; note = 2'-O-methyl modified nucleotide
  modified_base 34: mod_base = OTHER; note = 2'-O-methyl modified nucleotide
  modified_base 35: mod_base = OTHER; note = 2'-O-methyl modified nucleotide
  modified_base 36: mod_base = OTHER; note = 2'-O-methyl modified nucleotide
  modified_base 37: mod_base = OTHER; note = 2'-O-methyl modified nucleotide
  modified_base 38: mod_base = OTHER; note = 2'-O-methyl modified nucleotide
  modified_base 39: mod_base = OTHER; note = 2'-O-methyl modified nucleotide
  modified_base 40: mod_base = OTHER; note = 2'-O-methyl modified nucleotide
  modified_base 69: mod_base = OTHER; note = 2'-O-methyl modified nucleotide
  modified_base 70: mod_base = OTHER; note = 2'-O-methyl modified nucleotide
  modified_base 71: mod_base = OTHER; note = 2'-O-methyl modified nucleotide
  modified_base 72: mod_base = OTHER; note = 2'-O-methyl modified nucleotide
  modified_base 73: mod_base = OTHER; note = 2'-O-methyl modified nucleotide
  modified_base 74: mod_base = OTHER; note = 2'-O-methyl modified nucleotide
  modified_base 75: mod_base = OTHER; note = 2'-O-methyl modified nucleotide
  modified_base 76: mod_base = OTHER; note = 2'-O-methyl modified nucleotide
  modified_base 77: mod_base = OTHER; note = 2'-O-methyl modified nucleotide
  modified_base 78: mod_base = OTHER; note = 2'-O-methyl modified nucleotide
  modified_base 79: mod_base = OTHER; note = 2'-O-methyl modified nucleotide
  modified_base 80: mod_base = OTHER; note = 2'-O-methyl modified nucleotide
  modified_base 81: mod_base = OTHER; note = 2'-O-methyl modified nucleotide
  modified_base 82: mod_base = OTHER; note = 2'-O-methyl modified nucleotide
  modified_base 83: mod_base = OTHER; note = 2'-O-methyl modified nucleotide
  modified_base 84: mod_base = OTHER; note = 2'-O-methyl modified nucleotide
  modified_base 85: mod_base = OTHER; note = 2'-O-methyl modified nucleotide
  modified_base 86: mod_base = OTHER; note = 2'-O-methyl modified nucleotide
  modified_base 87: mod_base = OTHER; note = 2'-O-methyl modified nucleotide
  modified_base 88: mod_base = OTHER; note = 2'-O-methyl modified nucleotide
  modified_base 89: mod_base = OTHER; note = 2'-O-methyl modified nucleotide
  modified_base 90: mod_base = OTHER; note = 2'-O-methyl modified nucleotide
  modified_base 91: mod_base = OTHER; note = 2'-O-methyl modified nucleotide
  modified_base 92: mod_base = OTHER; note = 2'-O-methyl modified nucleotide
  modified_base 93: mod_base = OTHER; note = 2'-O-methyl modified nucleotide
  modified_base 94: mod_base = OTHER; note = 2'-O-methyl modified nucleotide
  modified_base 95: mod_base = OTHER; note = 2'-O-methyl modified nucleotide
  modified_base 96: mod_base = OTHER; note = 2'-O-methyl modified nucleotide
  modified_base 125: mod_base = OTHER; note = Nucleotide with phosphorothioate linkage
  modified_base 126: mod_base = OTHER; note = 2'-O-methyl modified nucleotide with phosphorothioate linkage
  modified_base 127: mod_base = OTHER; note = 2'-O-methyl modified nucleotide with phosphorothioate linkage
  modified_base 128: mod_base = OTHER; note = 2'-O-methyl modified nucleotide
gagaatcaaaatcggtgaatgttttagagctagaaatagcaagttaaaataaggctagtccgttatcaacttgaaaaagtggcaccgagtcggtgcaagtctgtctgcctatttagttgacaccgatt

SEQ ID NO: 16085 - RNA, 114 nt, synthetic construct
  source 1..114: mol_type = other RNA
  modified_base 1: mod_base = OTHER; note = 2'-O-methyl modified nucleotide with phosphorothioate linkage
  modified_base 2: mod_base = OTHER; note = 2'-O-methyl modified nucleotide with phosphorothioate linkage
  modified_base 3: mod_base = OTHER; note = 2'-O-methyl modified nucleotide with phosphorothioate linkage
  modified_base 29: mod_base = OTHER; note = 2'-O-methyl modified nucleotide
  modified_base 30: mod_base = OTHER; note = 2'-O-methyl modified nucleotide
  modified_base 31: mod_base = OTHER; note = 2'-O-methyl modified nucleotide
  modified_base 32: mod_base = OTHER; note = 2'-O-methyl modified nucleotide
  modified_base 33: mod_base = OTHER; note = 2'-O-methyl modified nucleotide
  modified_base 34: mod_base = OTHER; note = 2'-O-methyl modified nucleotide
  modified_base 35: mod_base = OTHER; note = 2'-O-methyl modified nucleotide
  modified_base 36: mod_base = OTHER; note = 2'-O-methyl modified nucleotide
  modified_base 37: mod_base = OTHER; note = 2'-O-methyl modified nucleotide
  modified_base 38: mod_base = OTHER; note = 2'-O-methyl modified nucleotide
  modified_base 39: mod_base = OTHER; note = 2'-O-methyl modified nucleotide
  modified_base 40: mod_base = OTHER; note = 2'-O-methyl modified nucleotide
  modified_base 69: mod_base = OTHER; note = 2'-O-methyl modified nucleotide
  modified_base 70: mod_base = OTHER; note = 2'-O-methyl modified nucleotide
  modified_base 71: mod_base = OTHER; note = 2'-O-methyl modified nucleotide
  modified_base 72: mod_base = OTHER; note = 2'-O-methyl modified nucleotide
  modified_base 73: mod_base = OTHER; note = 2'-O-methyl modified nucleotide
  modified_base 74: mod_base = OTHER; note = 2'-O-methyl modified nucleotide
  modified_base 75: mod_base = OTHER; note = 2'-O-methyl modified nucleotide
  modified_base 76: mod_base = OTHER; note = 2'-O-methyl modified nucleotide
  modified_base 77: mod_base = OTHER; note = 2'-O-methyl modified nucleotide
  modified_base 78: mod_base = OTHER; note = 2'-O-methyl modified nucleotide
  modified_base 79: mod_base = OTHER; note = 2'-O-methyl modified nucleotide
  modified_base 80: mod_base = OTHER; note = 2'-O-methyl modified nucleotide
  modified_base 81: mod_base = OTHER; note = 2'-O-methyl modified nucleotide
  modified_base 82: mod_base = OTHER; note = 2'-O-methyl modified nucleotide
  modified_base 83: mod_base = OTHER; note = 2'-O-methyl modified nucleotide
  modified_base 84: mod_base = OTHER; note = 2'-O-methyl modified nucleotide
  modified_base 85: mod_base = OTHER; note = 2'-O-methyl modified nucleotide
  modified_base 86: mod_base = OTHER; note = 2'-O-methyl modified nucleotide
  modified_base 87: mod_base = OTHER; note = 2'-O-methyl modified nucleotide
  modified_base 88: mod_base = OTHER; note = 2'-O-methyl modified nucleotide
  modified_base 89: mod_base = OTHER; note = 2'-O-methyl modified nucleotide
  modified_base 90: mod_base = OTHER; note = 2'-O-methyl modified nucleotide
  modified_base 91: mod_base = OTHER; note = 2'-O-methyl modified nucleotide
  modified_base 92: mod_base = OTHER; note = 2'-O-methyl modified nucleotide
  modified_base 93: mod_base = OTHER; note = 2'-O-methyl modified nucleotide
  modified_base 94: mod_base = OTHER; note = 2'-O-methyl modified nucleotide
  modified_base 95: mod_base = OTHER; note = 2'-O-methyl modified nucleotide
  modified_base 96: mod_base = OTHER; note = 2'-O-methyl modified nucleotide
  modified_base 111: mod_base = OTHER; note = Nucleotide with phosphorothioate linkage
  modified_base 112: mod_base = OTHER; note = 2'-O-methyl modified nucleotide with phosphorothioate linkage
  modified_base 113: mod_base = OTHER; note = 2'-O-methyl modified nucleotide with phosphorothioate linkage
  modified_base 114: mod_base = OTHER; note = 2'-O-methyl modified nucleotide
gagaatcaaaatcggtgaatgttttagagctagaaatagcaagttaaaataaggctagtccgttatcaacttgaaaaagtggcaccgagtcggtgctctgccaccgattttgat

SEQ ID NO: 16086 - RNA, 113 nt, synthetic construct
  source 1..113: mol_type = other RNA
  modified_base 1: mod_base = OTHER; note = 2'-O-methyl modified nucleotide with phosphorothioate linkage
  modified_base 2: mod_base = OTHER; note = 2'-O-methyl modified nucleotide with phosphorothioate linkage
  modified_base 3: mod_base = OTHER; note = 2'-O-methyl modified nucleotide with phosphorothioate linkage
  modified_base 29: mod_base = OTHER; note = 2'-O-methyl modified nucleotide
  modified_base 30: mod_base = OTHER; note = 2'-O-methyl modified nucleotide
  modified_base 31: mod_base = OTHER; note = 2'-O-methyl modified nucleotide
  modified_base 32: mod_base = OTHER; note = 2'-O-methyl modified nucleotide
  modified_base 33: mod_base = OTHER; note = 2'-O-methyl modified nucleotide
  modified_base 34: mod_base = OTHER; note = 2'-O-methyl modified nucleotide
  modified_base 35: mod_base = OTHER; note = 2'-O-methyl modified nucleotide
  modified_base 36: mod_base = OTHER; note = 2'-O-methyl modified nucleotide
  modified_base 37: mod_base = OTHER; note = 2'-O-methyl modified nucleotide
  modified_base 38: mod_base = OTHER; note = 2'-O-methyl modified nucleotide
  modified_base 39: mod_base = OTHER; note = 2'-O-methyl modified nucleotide
  modified_base 40: mod_base = OTHER; note = 2'-O-methyl modified nucleotide
  modified_base 69: mod_base = OTHER; note = 2'-O-methyl modified nucleotide
  modified_base 70: mod_base = OTHER; note = 2'-O-methyl modified nucleotide
  modified_base 71: mod_base = OTHER; note = 2'-O-methyl modified nucleotide
  modified_base 72: mod_base = OTHER; note = 2'-O-methyl modified nucleotide
  modified_base 73: mod_base = OTHER; note = 2'-O-methyl modified nucleotide
  modified_base 74: mod_base = OTHER; note = 2'-O-methyl modified nucleotide
  modified_base 75: mod_base = OTHER; note = 2'-O-methyl modified nucleotide
  modified_base 76: mod_base = OTHER; note = 2'-O-methyl modified nucleotide
  modified_base 77: mod_base = OTHER; note = 2'-O-methyl modified nucleotide
  modified_base 78: mod_base = OTHER; note = 2'-O-methyl modified nucleotide
  modified_base 79: mod_base = OTHER; note = 2'-O-methyl modified nucleotide
  modified_base 80: mod_base = OTHER; note = 2'-O-methyl modified nucleotide
  modified_base 81: mod_base = OTHER; note = 2'-O-methyl modified nucleotide
  modified_base 82: mod_base = OTHER; note = 2'-O-methyl modified nucleotide
  modified_base 83: mod_base = OTHER; note = 2'-O-methyl modified nucleotide
  modified_base 84: mod_base = OTHER; note = 2'-O-methyl modified nucleotide
  modified_base 85: mod_base = OTHER; note = 2'-O-methyl modified nucleotide
  modified_base 86: mod_base = OTHER; note = 2'-O-methyl modified nucleotide
  modified_base 87: mod_base = OTHER; note = 2'-O-methyl modified nucleotide
  modified_base 88: mod_base = OTHER; note = 2'-O-methyl modified nucleotide
  modified_base 89: mod_base = OTHER; note = 2'-O-methyl modified nucleotide
  modified_base 90: mod_base = OTHER; note = 2'-O-methyl modified nucleotide
  modified_base 91: mod_base = OTHER; note = 2'-O-methyl modified nucleotide
  modified_base 92: mod_base = OTHER; note = 2'-O-methyl modified nucleotide
  modified_base 93: mod_base = OTHER; note = 2'-O-methyl modified nucleotide
  modified_base 94: mod_base = OTHER; note = 2'-O-methyl modified nucleotide
  modified_base 95: mod_base = OTHER; note = 2'-O-methyl modified nucleotide
  modified_base 96: mod_base = OTHER; note = 2'-O-methyl modified nucleotide
  modified_base 110: mod_base = OTHER; note = Nucleotide with phosphorothioate linkage
  modified_base 111: mod_base = OTHER; note = 2'-O-methyl modified nucleotide with phosphorothioate linkage
  modified_base 112: mod_base = OTHER; note = 2'-O-methyl modified nucleotide with phosphorothioate linkage
  modified_base 113: mod_base = OTHER; note = 2'-O-methyl modified nucleotide
gagaatcaaaatcggtgaatgttttagagctagaaatagcaagttaaaataaggctagtccgttatcaacttgaaaaagtggcaccgagtcggtgctctgccaccgattttga

SEQ ID NO: 16087 - RNA, 112 nt, synthetic construct
  source 1..112: mol_type = other RNA
  modified_base 1: mod_base = OTHER; note = 2'-O-methyl modified nucleotide with phosphorothioate linkage
  modified_base 2: mod_base = OTHER; note = 2'-O-methyl modified nucleotide with phosphorothioate linkage
  modified_base 3: mod_base = OTHER; note = 2'-O-methyl modified nucleotide with phosphorothioate linkage
  modified_base 29: mod_base = OTHER; note = 2'-O-methyl modified nucleotide
  modified_base 30: mod_base = OTHER; note = 2'-O-methyl modified nucleotide
  modified_base 31: mod_base = OTHER; note = 2'-O-methyl modified nucleotide
  modified_base 32: mod_base = OTHER; note = 2'-O-methyl modified nucleotide
  modified_base 33: mod_base = OTHER; note = 2'-O-methyl modified nucleotide
  modified_base 34: mod_base = OTHER; note = 2'-O-methyl modified nucleotide
  modified_base 35: mod_base = OTHER; note = 2'-O-methyl modified nucleotide
  modified_base 36: mod_base = OTHER; note = 2'-O-methyl modified nucleotide
  modified_base 37: mod_base = OTHER; note = 2'-O-methyl modified nucleotide
  modified_base 38: mod_base = OTHER; note = 2'-O-methyl modified nucleotide
  modified_base 39: mod_base = OTHER; note = 2'-O-methyl modified nucleotide
  modified_base 40: mod_base = OTHER; note = 2'-O-methyl modified nucleotide
  modified_base 69: mod_base = OTHER; note = 2'-O-methyl modified nucleotide
  modified_base 70: mod_base = OTHER; note = 2'-O-methyl modified nucleotide
  modified_base 71: mod_base = OTHER; note = 2'-O-methyl modified nucleotide
  modified_base 72: mod_base = OTHER; note = 2'-O-methyl modified nucleotide
  modified_base 73: mod_base = OTHER; note = 2'-O-methyl modified nucleotide
  modified_base 74: mod_base = OTHER; note = 2'-O-methyl modified nucleotide
  modified_base 75: mod_base = OTHER; note = 2'-O-methyl modified nucleotide
  modified_base 76: mod_base = OTHER; note = 2'-O-methyl modified nucleotide
  modified_base 77: mod_base = OTHER; note = 2'-O-methyl modified nucleotide
  modified_base 78: mod_base = OTHER; note = 2'-O-methyl modified nucleotide
  modified_base 79: mod_base = OTHER; note = 2'-O-methyl modified nucleotide
  modified_base 80: mod_base = OTHER; note = 2'-O-methyl modified nucleotide
  modified_base 81: mod_base = OTHER; note = 2'-O-methyl modified nucleotide
  modified_base 82: mod_base = OTHER; note = 2'-O-methyl modified nucleotide
  modified_base 83: mod_base = OTHER; note = 2'-O-methyl modified nucleotide
  modified_base 84: mod_base = OTHER; note = 2'-O-methyl modified nucleotide
  modified_base 85: mod_base = OTHER; note = 2'-O-methyl modified nucleotide
  modified_base 86: mod_base = OTHER; note = 2'-O-methyl modified nucleotide
  modified_base 87: mod_base = OTHER; note = 2'-O-methyl modified nucleotide
  modified_base 88: mod_base = OTHER; note = 2'-O-methyl modified nucleotide
  modified_base 89: mod_base = OTHER; note = 2'-O-methyl modified nucleotide
  modified_base 90: mod_base = OTHER; note = 2'-O-methyl modified nucleotide
  modified_base 91: mod_base = OTHER; note = 2'-O-methyl modified nucleotide
  modified_base 92: mod_base = OTHER; note = 2'-O-methyl modified nucleotide
  modified_base 93: mod_base = OTHER; note = 2'-O-methyl modified nucleotide
  modified_base 94: mod_base = OTHER; note = 2'-O-methyl modified nucleotide
  modified_base 95: mod_base = OTHER; note = 2'-O-methyl modified nucleotide
  modified_base 96: mod_base = OTHER; note = 2'-O-methyl modified nucleotide
  modified_base 109: mod_base = OTHER; note = Nucleotide with phosphorothioate linkage
  modified_base 110: mod_base = OTHER; note = 2'-O-methyl modified nucleotide with phosphorothioate linkage
  modified_base 111: mod_base = OTHER; note = 2'-O-methyl modified nucleotide with phosphorothioate linkage
  modified_base 112: mod_base = OTHER; note = 2'-O-methyl modified nucleotide
gagaatcaaaatcggtgaatgttttagagctagaaatagcaagttaaaataaggctagtccgttatcaacttgaaaaagtggcaccgagtcggtgctctgccaccgattttg

SEQ ID NO: 16088 - RNA, 111 nt, synthetic construct
  source 1..111: mol_type = other RNA
  modified_base 1: mod_base = OTHER; note = 2'-O-methyl modified nucleotide with phosphorothioate linkage
  modified_base 2: mod_base = OTHER; note = 2'-O-methyl modified nucleotide with phosphorothioate linkage
  modified_base 3: mod_base = OTHER; note = 2'-O-methyl modified nucleotide with phosphorothioate linkage
  modified_base 29: mod_base = OTHER; note = 2'-O-methyl modified nucleotide
  modified_base 30: mod_base = OTHER; note = 2'-O-methyl modified nucleotide
  modified_base 31: mod_base = OTHER; note = 2'-O-methyl modified nucleotide
  modified_base 32: mod_base = OTHER; note = 2'-O-methyl modified nucleotide
  modified_base 33: mod_base = OTHER; note = 2'-O-methyl modified nucleotide
  modified_base 34: mod_base = OTHER; note = 2'-O-methyl modified nucleotide
  modified_base 35: mod_base = OTHER; note = 2'-O-methyl modified nucleotide
  modified_base 36: mod_base = OTHER; note = 2'-O-methyl modified nucleotide
  modified_base 37: mod_base = OTHER; note = 2'-O-methyl modified nucleotide
  modified_base 38: mod_base = OTHER; note = 2'-O-methyl modified nucleotide
  modified_base 39: mod_base = OTHER; note = 2'-O-methyl modified nucleotide
  modified_base 40: mod_base = OTHER; note = 2'-O-methyl modified nucleotide
  modified_base 69: mod_base = OTHER; note = 2'-O-methyl modified nucleotide
  modified_base 70: mod_base = OTHER; note = 2'-O-methyl modified nucleotide
  modified_base 71: mod_base = OTHER; note = 2'-O-methyl modified nucleotide
  modified_base 72: mod_base = OTHER; note = 2'-O-methyl modified nucleotide
  modified_base 73: mod_base = OTHER; note = 2'-O-methyl modified nucleotide
  modified_base 74: mod_base = OTHER; note = 2'-O-methyl modified nucleotide
  modified_base 75: mod_base = OTHER; note = 2'-O-methyl modified nucleotide
  modified_base 76: mod_base = OTHER; note = 2'-O-methyl modified nucleotide
  modified_base 77: mod_base = OTHER; note = 2'-O-methyl modified nucleotide
  modified_base 78: mod_base = OTHER; note = 2'-O-methyl modified nucleotide
  modified_base 79: mod_base = OTHER; note = 2'-O-methyl modified nucleotide
  modified_base 80: mod_base = OTHER; note = 2'-O-methyl modified nucleotide
  modified_base 81: mod_base = OTHER; note = 2'-O-methyl modified nucleotide
  modified_base 82: mod_base = OTHER; note = 2'-O-methyl modified nucleotide
  modified_base 83: mod_base = OTHER; note = 2'-O-methyl modified nucleotide
  modified_base 84: mod_base = OTHER; note = 2'-O-methyl modified nucleotide
  modified_base 85: mod_base = OTHER; note = 2'-O-methyl modified nucleotide
  modified_base 86: mod_base = OTHER; note = 2'-O-methyl modified nucleotide
  modified_base 87: mod_base = OTHER; note = 2'-O-methyl modified nucleotide
  modified_base 88: mod_base = OTHER; note = 2'-O-methyl modified nucleotide
  modified_base 89: mod_base = OTHER; note = 2'-O-methyl modified nucleotide
  modified_base 90: mod_base = OTHER; note = 2'-O-methyl modified nucleotide
  modified_base 91: mod_base = OTHER; note = 2'-O-methyl modified nucleotide
  modified_base 92: mod_base = OTHER; note = 2'-O-methyl modified nucleotide
  modified_base 93: mod_base = OTHER; note = 2'-O-methyl modified nucleotide
  modified_base 94: mod_base = OTHER; note = 2'-O-methyl modified nucleotide
  modified_base 95: mod_base = OTHER; note = 2'-O-methyl modified nucleotide
  modified_base 96: mod_base = OTHER; note = 2'-O-methyl modified nucleotide
  modified_base 108: mod_base = OTHER; note = Nucleotide with phosphorothioate linkage
  modified_base 109: mod_base = OTHER; note = 2'-O-methyl modified nucleotide with phosphorothioate linkage
  modified_base 110: mod_base = OTHER; note = 2'-O-methyl modified nucleotide with phosphorothioate linkage
  modified_base 111: mod_base = OTHER; note = 2'-O-methyl modified nucleotide
gagaatcaaaatcggtgaatgttttagagctagaaatagcaagttaaaataaggctagtccgttatcaacttgaaaaagtggcaccgagtcggtgctctgccaccgatttt

SEQ ID NO: 16089 - RNA, 110 nt, synthetic construct
  source 1..110: mol_type = other RNA
  modified_base 1: mod_base = OTHER; note = 2'-O-methyl modified nucleotide with phosphorothioate linkage
  modified_base 2: mod_base = OTHER; note = 2'-O-methyl modified nucleotide with phosphorothioate linkage
  modified_base 3: mod_base = OTHER; note = 2'-O-methyl modified nucleotide with phosphorothioate linkage
  modified_base 29: mod_base = OTHER; note = 2'-O-methyl modified nucleotide
  modified_base 30: mod_base = OTHER; note = 2'-O-methyl modified nucleotide
  modified_base 31: mod_base = OTHER; note = 2'-O-methyl modified nucleotide
  modified_base 32: mod_base = OTHER; note = 2'-O-methyl modified nucleotide
  modified_base 33: mod_base = OTHER; note = 2'-O-methyl modified nucleotide
  modified_base 34: mod_base = OTHER; note = 2'-O-methyl modified nucleotide
  modified_base 35: mod_base = OTHER; note = 2'-O-methyl modified nucleotide
  modified_base 36: mod_base = OTHER; note = 2'-O-methyl modified nucleotide
  modified_base 37: mod_base = OTHER; note = 2'-O-methyl modified nucleotide
  modified_base 38: mod_base = OTHER; note = 2'-O-methyl modified nucleotide
  modified_base 39: mod_base = OTHER; note = 2'-O-methyl modified nucleotide
  modified_base 40: mod_base = OTHER; note = 2'-O-methyl modified nucleotide
  modified_base 69: mod_base = OTHER; note = 2'-O-methyl modified nucleotide
  modified_base 70: mod_base = OTHER; note = 2'-O-methyl modified nucleotide
  modified_base 71: mod_base = OTHER; note = 2'-O-methyl modified nucleotide
  modified_base 72: mod_base = OTHER; note = 2'-O-methyl modified nucleotide
  modified_base 73: mod_base = OTHER; note = 2'-O-methyl modified nucleotide
  modified_base 74: mod_base = OTHER; note = 2'-O-methyl modified nucleotide
  modified_base 75: mod_base = OTHER; note = 2'-O-methyl modified nucleotide
  modified_base 76: mod_base = OTHER; note = 2'-O-methyl modified nucleotide
  modified_base 77: mod_base = OTHER; note = 2'-O-methyl modified nucleotide
  modified_base 78: mod_base = OTHER; note = 2'-O-methyl modified nucleotide
  modified_base 79: mod_base = OTHER; note = 2'-O-methyl modified nucleotide
  modified_base 80: mod_base = OTHER; note = 2'-O-methyl modified nucleotide
  modified_base 81: mod_base = OTHER; note = 2'-O-methyl modified nucleotide
  modified_base 82: mod_base = OTHER; note = 2'-O-methyl modified nucleotide
  modified_base 83: mod_base = OTHER; note = 2'-O-methyl modified nucleotide
  modified_base 84: mod_base = OTHER; note = 2'-O-methyl modified nucleotide
  modified_base 85: mod_base = OTHER; note = 2'-O-methyl modified nucleotide
  modified_base 86: mod_base = OTHER; note = 2'-O-methyl modified nucleotide
  modified_base 87: mod_base = OTHER; note = 2'-O-methyl modified nucleotide
  modified_base 88: mod_base = OTHER; note = 2'-O-methyl modified nucleotide
  modified_base 89: mod_base = OTHER; note = 2'-O-methyl modified nucleotide
  modified_base 90: mod_base = OTHER; note = 2'-O-methyl modified nucleotide
  modified_base 91: mod_base = OTHER; note = 2'-O-methyl modified nucleotide
  modified_base 92: mod_base = OTHER; note = 2'-O-methyl modified nucleotide
  modified_base 93: mod_base = OTHER; note = 2'-O-methyl modified nucleotide
  modified_base 94: mod_base = OTHER; note = 2'-O-methyl modified nucleotide
  modified_base 95: mod_base = OTHER; note = 2'-O-methyl modified nucleotide
  modified_base 96: mod_base = OTHER; note = 2'-O-methyl modified nucleotide
  modified_base 107: mod_base = OTHER; note = Nucleotide with phosphorothioate linkage
  modified_base 108: mod_base = OTHER; note = 2'-O-methyl modified nucleotide with phosphorothioate linkage
  modified_base 109: mod_base = OTHER; note = 2'-O-methyl modified nucleotide with phosphorothioate linkage
  modified_base 110: mod_base = OTHER; note = 2'-O-methyl modified nucleotide
gagaatcaaaatcggtgaatgttttagagctagaaatagcaagttaaaataaggctagtccgttatcaacttgaaaaagtggcaccgagtcggtgctctgccaccgattt

SEQ ID NO: 16090 - RNA, 109 nt, synthetic construct
  source 1..109: mol_type = other RNA
  modified_base 1: mod_base = OTHER; note = 2'-O-methyl modified nucleotide with phosphorothioate linkage
  modified_base 2: mod_base = OTHER; note = 2'-O-methyl modified nucleotide with phosphorothioate linkage
  modified_base 3: mod_base = OTHER; note = 2'-O-methyl modified nucleotide with phosphorothioate linkage
  modified_base 29: mod_base = OTHER; note = 2'-O-methyl modified nucleotide
  modified_base 30: mod_base = OTHER; note = 2'-O-methyl modified nucleotide
  modified_base 31: mod_base = OTHER; note = 2'-O-methyl modified nucleotide
  modified_base 32: mod_base = OTHER; note = 2'-O-methyl modified nucleotide
  modified_base 33: mod_base = OTHER; note = 2'-O-methyl modified nucleotide
  modified_base 34: mod_base = OTHER; note = 2'-O-methyl modified nucleotide
  modified_base 35: mod_base = OTHER; note = 2'-O-methyl modified nucleotide
  modified_base 36: mod_base = OTHER; note = 2'-O-methyl modified nucleotide
  modified_base 37: mod_base = OTHER; note = 2'-O-methyl modified nucleotide
  modified_base 38: mod_base = OTHER; note = 2'-O-methyl modified nucleotide
  modified_base 39: mod_base = OTHER; note = 2'-O-methyl modified nucleotide
  modified_base 40: mod_base = OTHER; note = 2'-O-methyl modified nucleotide
  modified_base 69: mod_base = OTHER; note = 2'-O-methyl modified nucleotide
  modified_base 70: mod_base = OTHER; note = 2'-O-methyl modified nucleotide
  modified_base 71: mod_base = OTHER; note = 2'-O-methyl modified nucleotide
  modified_base 72: mod_base = OTHER; note = 2'-O-methyl modified nucleotide
  modified_base 73: mod_base = OTHER; note = 2'-O-methyl modified nucleotide
  modified_base 74: mod_base = OTHER; note = 2'-O-methyl modified nucleotide
  modified_base 75: mod_base = OTHER; note = 2'-O-methyl modified nucleotide
  modified_base 76: mod_base = OTHER; note = 2'-O-methyl modified nucleotide
  modified_base 77: mod_base = OTHER; note = 2'-O-methyl modified nucleotide
  modified_base 78: mod_base = OTHER; note = 2'-O-methyl modified nucleotide
  modified_base 79: mod_base = OTHER; note = 2'-O-methyl modified nucleotide
  modified_base 80: mod_base = OTHER; note = 2'-O-methyl modified nucleotide
  modified_base 81: mod_base = OTHER; note = 2'-O-methyl modified nucleotide
  modified_base 82: mod_base = OTHER; note = 2'-O-methyl modified nucleotide
  modified_base 83: mod_base = OTHER; note = 2'-O-methyl modified nucleotide
  modified_base 84: mod_base = OTHER; note = 2'-O-methyl modified nucleotide
  modified_base 85: mod_base = OTHER; note = 2'-O-methyl modified nucleotide
  modified_base 86: mod_base = OTHER; note = 2'-O-methyl modified nucleotide
  modified_base 87: mod_base = OTHER; note = 2'-O-methyl modified nucleotide
  modified_base 88: mod_base = OTHER; note = 2'-O-methyl modified nucleotide
  modified_base 89: mod_base = OTHER; note = 2'-O-methyl modified nucleotide
  modified_base 90: mod_base = OTHER; note = 2'-O-methyl modified nucleotide
  modified_base 91: mod_base = OTHER; note = 2'-O-methyl modified nucleotide
  modified_base 92: mod_base = OTHER; note = 2'-O-methyl modified nucleotide
  modified_base 93: mod_base = OTHER; note = 2'-O-methyl modified nucleotide
  modified_base 94: mod_base = OTHER; note = 2'-O-methyl modified nucleotide
  modified_base 95: mod_base = OTHER; note = 2'-O-methyl modified nucleotide
  modified_base 96: mod_base = OTHER; note = 2'-O-methyl modified nucleotide
  modified_base 106: mod_base = OTHER; note = Nucleotide with phosphorothioate linkage
  modified_base 107: mod_base = OTHER; note = 2'-O-methyl modified nucleotide with phosphorothioate linkage
  modified_base 108: mod_base = OTHER; note = 2'-O-methyl modified nucleotide with phosphorothioate linkage
  modified_base 109: mod_base = OTHER; note = 2'-O-methyl modified nucleotide
gagaatcaaaatcggtgaatgttttagagctagaaatagcaagttaaaataaggctagtccgttatcaacttgaaaaagtggcaccgagtcggtgctctgccaccgatt

SEQ ID NO: 16091 - RNA, 116 nt, synthetic construct
  source 1..116: mol_type = other RNA
  modified_base 1: mod_base = OTHER; note = 2'-O-methyl modified nucleotide with phosphorothioate linkage
  modified_base 2: mod_base = OTHER; note = 2'-O-methyl modified nucleotide with phosphorothioate linkage
  modified_base 3: mod_base = OTHER; note = 2'-O-methyl modified nucleotide with phosphorothioate linkage
  modified_base 29: mod_base = OTHER; note = 2'-O-methyl modified nucleotide
  modified_base 30: mod_base = OTHER; note = 2'-O-methyl modified nucleotide
  modified_base 31: mod_base = OTHER; note = 2'-O-methyl modified nucleotide
  modified_base 32: mod_base = OTHER; note = 2'-O-methyl modified nucleotide
  modified_base 33: mod_base = OTHER; note = 2'-O-methyl modified nucleotide
  modified_base 34: mod_base = OTHER; note = 2'-O-methyl modified nucleotide
  modified_base 35: mod_base = OTHER; note = 2'-O-methyl modified nucleotide
  modified_base 36: mod_base = OTHER; note = 2'-O-methyl modified nucleotide
  modified_base 37: mod_base = OTHER; note = 2'-O-methyl modified nucleotide
  modified_base 38: mod_base = OTHER; note = 2'-O-methyl modified nucleotide
  modified_base 39: mod_base = OTHER; note = 2'-O-methyl modified nucleotide
  modified_base 40: mod_base = OTHER; note = 2'-O-methyl modified nucleotide
  modified_base 69: mod_base = OTHER; note = 2'-O-methyl modified nucleotide
  modified_base 70: mod_base = OTHER; note = 2'-O-methyl modified nucleotide
  modified_base 71: mod_base = OTHER; note = 2'-O-methyl modified nucleotide
  modified_base 72: mod_base = OTHER; note = 2'-O-methyl modified nucleotide
  modified_base 73: mod_base = OTHER; note = 2'-O-methyl modified nucleotide
  modified_base 74: mod_base = OTHER; note = 2'-O-methyl modified nucleotide
  modified_base 75: mod_base = OTHER; note = 2'-O-methyl modified nucleotide
  modified_base 76: mod_base = OTHER; note = 2'-O-methyl modified nucleotide
  modified_base 77: mod_base = OTHER; note = 2'-O-methyl modified nucleotide
  modified_base 78: mod_base = OTHER; note = 2'-O-methyl modified nucleotide
  modified_base 79: mod_base = OTHER; note = 2'-O-methyl modified nucleotide
  modified_base 80: mod_base = OTHER; note = 2'-O-methyl modified nucleotide
  modified_base 81: mod_base = OTHER; note = 2'-O-methyl modified nucleotide
  modified_base 82: mod_base = OTHER; note = 2'-O-methyl modified nucleotide
  modified_base 83: mod_base = OTHER; note = 2'-O-methyl modified nucleotide
  modified_base 84: mod_base = OTHER; note = 2'-O-methyl modified nucleotide
  modified_base 85: mod_base = OTHER; note = 2'-O-methyl modified nucleotide
  modified_base 86: mod_base = OTHER; note = 2'-O-methyl modified nucleotide
  modified_base 87: mod_base = OTHER; note = 2'-O-methyl modified nucleotide
  modified_base 88: mod_base = OTHER; note = 2'-O-methyl modified nucleotide
  modified_base 89: mod_base = OTHER; note = 2'-O-methyl modified nucleotide
  modified_base 90: mod_base = OTHER; note = 2'-O-methyl modified nucleotide
  modified_base 91: mod_base = OTHER; note = 2'-O-methyl modified nucleotide
  modified_base 92: mod_base = OTHER; note = 2'-O-methyl modified nucleotide
  modified_base 93: mod_base = OTHER; note = 2'-O-methyl modified nucleotide
  modified_base 94: mod_base = OTHER; note = 2'-O-methyl modified nucleotide
  modified_base 95: mod_base = OTHER; note = 2'-O-methyl modified nucleotide
  modified_base 96: mod_base = OTHER; note = 2'-O-methyl modified nucleotide
  modified_base 113: mod_base = OTHER; note = Nucleotide with phosphorothioate linkage
  modified_base 114: mod_base = OTHER; note = 2'-O-methyl modified nucleotide with phosphorothioate linkage
  modified_base 115: mod_base = OTHER; note = 2'-O-methyl modified nucleotide with phosphorothioate linkage
  modified_base 116: mod_base = OTHER; note = 2'-O-methyl modified nucleotide
gagaatcaaaatcggtgaatgttttagagctagaaatagcaagttaaaataaggctagtccgttatcaacttgaaaaagtggcaccgagtcggtgctgtctgccaccgattttgat

SEQ ID NO: 16092 - RNA, 115 nt, synthetic construct
  source 1..115: mol_type = other RNA
  modified_base 1: mod_base = OTHER; note = 2'-O-methyl modified nucleotide with phosphorothioate linkage
  modified_base 2: mod_base = OTHER; note = 2'-O-methyl modified nucleotide with phosphorothioate linkage
  modified_base 3: mod_base = OTHER; note = 2'-O-methyl modified nucleotide with phosphorothioate linkage
  modified_base 29: mod_base = OTHER; note = 2'-O-methyl modified nucleotide
  modified_base 30: mod_base = OTHER; note = 2'-O-methyl modified nucleotide
  modified_base 31: mod_base = OTHER; note = 2'-O-methyl modified nucleotide
  modified_base 32: mod_base = OTHER; note = 2'-O-methyl modified nucleotide
  modified_base 33: mod_base = OTHER; note = 2'-O-methyl modified nucleotide
  modified_base 34: mod_base = OTHER; note = 2'-O-methyl modified nucleotide
  modified_base 35: mod_base = OTHER; note = 2'-O-methyl modified nucleotide
  modified_base 36: mod_base = OTHER; note = 2'-O-methyl modified nucleotide
  modified_base 37: mod_base = OTHER; note = 2'-O-methyl modified nucleotide
  modified_base 38: mod_base = OTHER; note = 2'-O-methyl modified nucleotide
  modified_base 39: mod_base = OTHER; note = 2'-O-methyl modified nucleotide
  modified_base 40: mod_base = OTHER; note = 2'-O-methyl modified nucleotide
  modified_base 69: mod_base = OTHER; note = 2'-O-methyl modified nucleotide
  modified_base 70: mod_base = OTHER; note = 2'-O-methyl modified nucleotide
  modified_base 71: mod_base = OTHER; note = 2'-O-methyl modified nucleotide
  modified_base 72: mod_base = OTHER; note = 2'-O-methyl modified nucleotide
  modified_base 73: mod_base = OTHER; note = 2'-O-methyl modified nucleotide
  modified_base 74: mod_base = OTHER; note = 2'-O-methyl modified nucleotide
  modified_base 75: mod_base = OTHER; note = 2'-O-methyl modified nucleotide
  modified_base 76: mod_base = OTHER; note = 2'-O-methyl modified nucleotide
  modified_base 77: mod_base = OTHER; note = 2'-O-methyl modified nucleotide
  modified_base 78: mod_base = OTHER; note = 2'-O-methyl modified nucleotide
  modified_base 79: mod_base = OTHER; note = 2'-O-methyl modified nucleotide
  modified_base 80: mod_base = OTHER; note = 2'-O-methyl modified nucleotide
  modified_base 81: mod_base = OTHER; note = 2'-O-methyl modified nucleotide
  modified_base 82: mod_base = OTHER; note = 2'-O-methyl modified nucleotide
  modified_base 83: mod_base = OTHER; note = 2'-O-methyl modified nucleotide
  modified_base 84: mod_base = OTHER; note = 2'-O-methyl modified nucleotide
  modified_base 85: mod_base = OTHER; note = 2'-O-methyl modified nucleotide
  modified_base 86: mod_base = OTHER; note = 2'-O-methyl modified nucleotide
  modified_base 87: mod_base = OTHER; note = 2'-O-methyl modified nucleotide
  modified_base 88: mod_base = OTHER; note = 2'-O-methyl modified nucleotide
  modified_base 89: mod_base = OTHER; note = 2'-O-methyl modified nucleotide
  modified_base 90: mod_base = OTHER; note = 2'-O-methyl modified nucleotide
  modified_base 91: mod_base = OTHER; note = 2'-O-methyl modified nucleotide
  modified_base 92: mod_base = OTHER; note = 2'-O-methyl modified nucleotide
  modified_base 93: mod_base = OTHER; note = 2'-O-methyl modified nucleotide
  modified_base 94: mod_base = OTHER; note = 2'-O-methyl modified nucleotide
  modified_base 95: mod_base = OTHER; note = 2'-O-methyl modified nucleotide
  modified_base 96: mod_base = OTHER; note = 2'-O-methyl modified nucleotide
  modified_base 112: mod_base = OTHER; note = Nucleotide with phosphorothioate linkage
  modified_base 113: mod_base = OTHER; note = 2'-O-methyl modified nucleotide with phosphorothioate linkage
  modified_base 114: mod_base = OTHER; note = 2'-O-methyl modified nucleotide with phosphorothioate linkage
  modified_base 115: mod_base = OTHER; note = 2'-O-methyl modified nucleotide
gagaatcaaaatcggtgaatgttttagagctagaaatagcaagttaaaataaggctagtccgttatcaacttgaaaaagtggcaccgagtcggtgctgtctgccaccgattttga

SEQ ID NO: 16093 - RNA, 114 nt, synthetic construct
  source 1..114: mol_type = other RNA
  modified_base 1: mod_base = OTHER; note = 2'-O-methyl modified nucleotide with phosphorothioate linkage
  modified_base 2: mod_base = OTHER; note = 2'-O-methyl modified nucleotide with phosphorothioate linkage
  modified_base 3: mod_base = OTHER; note = 2'-O-methyl modified nucleotide with phosphorothioate linkage
  modified_base 29: mod_base = OTHER; note = 2'-O-methyl modified nucleotide
  modified_base 30: mod_base = OTHER; note = 2'-O-methyl modified nucleotide
  modified_base 31: mod_base = OTHER; note = 2'-O-methyl modified nucleotide
  modified_base 32: mod_base = OTHER; note = 2'-O-methyl modified nucleotide
  modified_base 33: mod_base = OTHER; note = 2'-O-methyl modified nucleotide
  modified_base 34: mod_base = OTHER; note = 2'-O-methyl modified nucleotide
  modified_base 35: mod_base = OTHER; note = 2'-O-methyl modified nucleotide
  modified_base 36: mod_base = OTHER; note = 2'-O-methyl modified nucleotide
  modified_base 37: mod_base = OTHER; note = 2'-O-methyl modified nucleotide
  modified_base 38: mod_base = OTHER; note = 2'-O-methyl modified nucleotide
  modified_base 39: mod_base = OTHER; note = 2'-O-methyl modified nucleotide
  modified_base 40: mod_base = OTHER; note = 2'-O-methyl modified nucleotide
  modified_base 69: mod_base = OTHER; note = 2'-O-methyl modified nucleotide
  modified_base 70: mod_base = OTHER; note = 2'-O-methyl modified nucleotide
  modified_base 71: mod_base = OTHER; note = 2'-O-methyl modified nucleotide
  modified_base 72: mod_base = OTHER; note = 2'-O-methyl modified nucleotide
  modified_base 73: mod_base = OTHER; note = 2'-O-methyl modified nucleotide
  modified_base 74: mod_base = OTHER; note = 2'-O-methyl modified nucleotide
  modified_base 75: mod_base = OTHER; note = 2'-O-methyl modified nucleotide
  modified_base 76: mod_base = OTHER; note = 2'-O-methyl modified nucleotide
  modified_base 77: mod_base = OTHER; note = 2'-O-methyl modified nucleotide
  modified_base 78: mod_base = OTHER; note = 2'-O-methyl modified nucleotide
  modified_base 79: mod_base = OTHER; note = 2'-O-methyl modified nucleotide
  modified_base 80: mod_base = OTHER; note = 2'-O-methyl modified nucleotide
  modified_base 81: mod_base = OTHER; note = 2'-O-methyl modified nucleotide
  modified_base 82: mod_base = OTHER; note = 2'-O-methyl modified nucleotide
  modified_base 83: mod_base = OTHER; note = 2'-O-methyl modified nucleotide
  modified_base 84: mod_base = OTHER; note = 2'-O-methyl modified nucleotide
  modified_base 85: mod_base = OTHER; note = 2'-O-methyl modified nucleotide
  modified_base 86: mod_base = OTHER; note = 2'-O-methyl modified nucleotide
  modified_base 87: mod_base = OTHER; note = 2'-O-methyl modified nucleotide
  modified_base 88: mod_base = OTHER; note = 2'-O-methyl modified nucleotide
  modified_base 89: mod_base = OTHER; note = 2'-O-methyl modified nucleotide
  modified_base 90: mod_base = OTHER; note = 2'-O-methyl modified nucleotide
  modified_base 91: mod_base = OTHER; note = 2'-O-methyl modified nucleotide
  modified_base 92: mod_base = OTHER; note = 2'-O-methyl modified nucleotide
  modified_base 93: mod_base = OTHER; note = 2'-O-methyl modified nucleotide
  modified_base 94: mod_base = OTHER; note = 2'-O-methyl modified nucleotide
  modified_base 95: mod_base = OTHER; note = 2'-O-methyl modified nucleotide
  modified_base 96: mod_base = OTHER; note = 2'-O-methyl modified nucleotide
  modified_base 111: mod_base = OTHER; note = Nucleotide with phosphorothioate linkage
  modified_base 112: mod_base = OTHER; note = 2'-O-methyl modified nucleotide with phosphorothioate linkage
  modified_base 113: mod_base = OTHER; note = 2'-O-methyl modified nucleotide with phosphorothioate linkage
  modified_base 114: mod_base = OTHER; note = 2'-O-methyl modified nucleotide
gagaatcaaaatcggtgaatgttttagagctagaaatagcaagttaaaataaggctagtccgttatcaacttgaaaaagtggcaccgagtcggtgctgtctgccaccgattttg

SEQ ID NO: 16094 - RNA, 113 nt, synthetic construct
  source 1..113: mol_type = other RNA
  modified_base 1: mod_base = OTHER; note = 2'-O-methyl modified nucleotide with phosphorothioate linkage
  modified_base 2: mod_base = OTHER; note = 2'-O-methyl modified nucleotide with phosphorothioate linkage
  modified_base 3: mod_base = OTHER; note = 2'-O-methyl modified nucleotide with phosphorothioate linkage
  modified_base 29: mod_base = OTHER; note = 2'-O-methyl modified nucleotide
  modified_base 30: mod_base = OTHER; note = 2'-O-methyl modified nucleotide
  modified_base 31: mod_base = OTHER; note = 2'-O-methyl modified nucleotide
  modified_base 32: mod_base = OTHER; note = 2'-O-methyl modified nucleotide
  modified_base 33: mod_base = OTHER; note = 2'-O-methyl modified nucleotide
  modified_base 34: mod_base = OTHER; note = 2'-O-methyl modified nucleotide
  modified_base 35: mod_base = OTHER; note = 2'-O-methyl modified nucleotide
  modified_base 36: mod_base = OTHER; note = 2'-O-methyl modified nucleotide
  modified_base 37: mod_base = OTHER; note = 2'-O-methyl modified nucleotide
  modified_base 38: mod_base = OTHER; note = 2'-O-methyl modified nucleotide
  modified_base 39: mod_base = OTHER; note = 2'-O-methyl modified nucleotide
  modified_base 40: mod_base = OTHER; note = 2'-O-methyl modified nucleotide
  modified_base 69: mod_base = OTHER; note = 2'-O-methyl modified nucleotide
  modified_base 70: mod_base = OTHER; note = 2'-O-methyl modified nucleotide
  modified_base 71: mod_base = OTHER; note = 2'-O-methyl modified nucleotide
  modified_base 72: mod_base = OTHER; note = 2'-O-methyl modified nucleotide
  modified_base 73: mod_base = OTHER; note = 2'-O-methyl modified nucleotide
  modified_base 74: mod_base = OTHER; note = 2'-O-methyl modified nucleotide
  modified_base 75: mod_base = OTHER; note = 2'-O-methyl modified nucleotide
  modified_base 76: mod_base = OTHER; note = 2'-O-methyl modified nucleotide
  modified_base 77: mod_base = OTHER; note = 2'-O-methyl modified nucleotide
  modified_base 78: mod_base = OTHER; note = 2'-O-methyl modified nucleotide
  modified_base 79: mod_base = OTHER; note = 2'-O-methyl modified nucleotide
  modified_base 80: mod_base = OTHER; note = 2'-O-methyl modified nucleotide
  modified_base 81: mod_base = OTHER; note = 2'-O-methyl modified nucleotide
  modified_base 82: mod_base = OTHER; note = 2'-O-methyl modified nucleotide
  modified_base 83: mod_base = OTHER; note = 2'-O-methyl modified nucleotide
  modified_base 84: mod_base = OTHER; note = 2'-O-methyl modified nucleotide
  modified_base 85: mod_base = OTHER; note = 2'-O-methyl modified nucleotide
  modified_base 86: mod_base = OTHER; note = 2'-O-methyl modified nucleotide
  modified_base 87: mod_base = OTHER; note = 2'-O-methyl modified nucleotide
  modified_base 88: mod_base = OTHER; note = 2'-O-methyl modified nucleotide
  modified_base 89: mod_base = OTHER; note = 2'-O-methyl modified nucleotide
  modified_base 90: mod_base = OTHER; note = 2'-O-methyl modified nucleotide
  modified_base 91: mod_base = OTHER; note = 2'-O-methyl modified nucleotide
  modified_base 92: mod_base = OTHER; note = 2'-O-methyl modified nucleotide
  modified_base 93: mod_base = OTHER; note = 2'-O-methyl modified nucleotide
  modified_base 94: mod_base = OTHER; note = 2'-O-methyl modified nucleotide
  modified_base 95: mod_base = OTHER; note = 2'-O-methyl modified nucleotide
  modified_base 96: mod_base = OTHER; note = 2'-O-methyl modified nucleotide
  modified_base 110: mod_base = OTHER; note = Nucleotide with phosphorothioate linkage
  modified_base 111: mod_base = OTHER; note = 2'-O-methyl modified nucleotide with phosphorothioate linkage
  modified_base 112: mod_base = OTHER; note = 2'-O-methyl modified nucleotide with phosphorothioate linkage
  modified_base 113: mod_base = OTHER; note = 2'-O-methyl modified nucleotide
gagaatcaaaatcggtgaatgttttagagctagaaatagcaagttaaaataaggctagtccgttatcaacttgaaaaagtggcaccgagtcggtgctgtctgccaccgatttt

SEQ ID NO: 16095 - RNA, 112 nt, synthetic construct
  source 1..112: mol_type = other RNA
  modified_base 1: mod_base = OTHER; note = 2'-O-methyl modified nucleotide with phosphorothioate linkage
  modified_base 2: mod_base = OTHER; note = 2'-O-methyl modified nucleotide with phosphorothioate linkage
  modified_base 3: mod_base = OTHER; note = 2'-O-methyl modified nucleotide with phosphorothioate linkage
  modified_base 29: mod_base = OTHER; note = 2'-O-methyl modified nucleotide
  modified_base 30: mod_base = OTHER; note = 2'-O-methyl modified nucleotide
  modified_base 31: mod_base = OTHER; note = 2'-O-methyl modified nucleotide
  modified_base 32: mod_base = OTHER; note = 2'-O-methyl modified nucleotide
  modified_base 33: mod_base = OTHER; note = 2'-O-methyl modified nucleotide
  modified_base 34: mod_base = OTHER; note = 2'-O-methyl modified nucleotide
  modified_base 35: mod_base = OTHER; note = 2'-O-methyl modified nucleotide
  modified_base 36: mod_base = OTHER; note = 2'-O-methyl modified nucleotide
  modified_base 37: mod_base = OTHER; note = 2'-O-methyl modified nucleotide
  modified_base 38: mod_base = OTHER; note = 2'-O-methyl modified nucleotide
  modified_base 39: mod_base = OTHER; note = 2'-O-methyl modified nucleotide
  modified_base 40: mod_base = OTHER; note = 2'-O-methyl modified nucleotide
  modified_base 69: mod_base = OTHER; note = 2'-O-methyl modified nucleotide
  modified_base 70: mod_base = OTHER; note = 2'-O-methyl modified nucleotide
  modified_base 71: mod_base = OTHER; note = 2'-O-methyl modified nucleotide
  modified_base 72: mod_base = OTHER; note = 2'-O-methyl modified nucleotide
  modified_base 73: mod_base = OTHER; note = 2'-O-methyl modified nucleotide
  modified_base 74: mod_base = OTHER; note = 2'-O-methyl modified nucleotide
  modified_base 75: mod_base = OTHER; note = 2'-O-methyl modified nucleotide
  modified_base 76: mod_base = OTHER; note = 2'-O-methyl modified nucleotide
  modified_base 77: mod_base = OTHER; note = 2'-O-methyl modified nucleotide
  modified_base 78: mod_base = OTHER; note = 2'-O-methyl modified nucleotide
  modified_base 79: mod_base = OTHER; note = 2'-O-methyl modified nucleotide
  modified_base 80: mod_base = OTHER; note = 2'-O-methyl modified nucleotide
  modified_base 81: mod_base = OTHER; note = 2'-O-methyl modified nucleotide
  modified_base 82: mod_base = OTHER; note = 2'-O-methyl modified nucleotide
  modified_base 83: mod_base = OTHER; note = 2'-O-methyl modified nucleotide
  modified_base 84: mod_base = OTHER; note = 2'-O-methyl modified nucleotide
  modified_base 85: mod_base = OTHER; note = 2'-O-methyl modified nucleotide
  modified_base 86: mod_base = OTHER; note = 2'-O-methyl modified nucleotide
  modified_base 87: mod_base = OTHER; note = 2'-O-methyl modified nucleotide
  modified_base 88: mod_base = OTHER; note = 2'-O-methyl modified nucleotide
  modified_base 89: mod_base = OTHER; note = 2'-O-methyl modified nucleotide
  modified_base 90: mod_base = OTHER; note = 2'-O-methyl modified nucleotide
  modified_base 91: mod_base = OTHER; note = 2'-O-methyl modified nucleotide
  modified_base 92: mod_base = OTHER; note = 2'-O-methyl modified nucleotide
  modified_base 93: mod_base = OTHER; note = 2'-O-methyl modified nucleotide
  modified_base 94: mod_base = OTHER; note = 2'-O-methyl modified nucleotide
  modified_base 95: mod_base = OTHER; note = 2'-O-methyl modified nucleotide
  modified_base 96: mod_base = OTHER; note = 2'-O-methyl modified nucleotide
  modified_base 109: mod_base = OTHER; note = Nucleotide with phosphorothioate linkage
  modified_base 110: mod_base = OTHER; note = 2'-O-methyl modified nucleotide with phosphorothioate linkage
  modified_base 111: mod_base = OTHER; note = 2'-O-methyl modified nucleotide with phosphorothioate linkage
  modified_base 112: mod_base = OTHER; note = 2'-O-methyl modified nucleotide
gagaatcaaaatcggtgaatgttttagagctagaaatagcaagttaaaataaggctagtccgttatcaacttgaaaaagtggcaccgagtcggtgctgtctgccaccgattt

SEQ ID NO: 16096 - RNA, 111 nt, synthetic construct
  source 1..111: mol_type = other RNA
  modified_base 1: mod_base = OTHER; note = 2'-O-methyl modified nucleotide with phosphorothioate linkage
  modified_base 2: mod_base = OTHER; note = 2'-O-methyl modified nucleotide with phosphorothioate linkage
  modified_base 3: mod_base = OTHER; note = 2'-O-methyl modified nucleotide with phosphorothioate linkage
  modified_base 29: mod_base = OTHER; note = 2'-O-methyl modified nucleotide
  modified_base 30: mod_base = OTHER; note = 2'-O-methyl modified nucleotide
  modified_base 31: mod_base = OTHER; note = 2'-O-methyl modified nucleotide
  modified_base 32: mod_base = OTHER; note = 2'-O-methyl modified nucleotide
  modified_base 33: mod_base = OTHER; note = 2'-O-methyl modified nucleotide
  modified_base 34: mod_base = OTHER; note = 2'-O-methyl modified nucleotide
  modified_base 35: mod_base = OTHER; note = 2'-O-methyl modified nucleotide
  modified_base 36: mod_base = OTHER; note = 2'-O-methyl modified nucleotide
  modified_base 37: mod_base = OTHER; note = 2'-O-methyl modified nucleotide
  modified_base 38: mod_base = OTHER; note = 2'-O-methyl modified nucleotide
  modified_base 39: mod_base = OTHER; note = 2'-O-methyl modified nucleotide
  modified_base 40: mod_base = OTHER; note = 2'-O-methyl modified nucleotide
  modified_base 69: mod_base = OTHER; note = 2'-O-methyl modified nucleotide
  modified_base 70: mod_base = OTHER; note = 2'-O-methyl modified nucleotide
  modified_base 71: mod_base = OTHER; note = 2'-O-methyl modified nucleotide
  modified_base 72: mod_base = OTHER; note = 2'-O-methyl modified nucleotide
  modified_base 73: mod_base = OTHER; note = 2'-O-methyl modified nucleotide
  modified_base 74: mod_base = OTHER; note = 2'-O-methyl modified nucleotide
  modified_base 75: mod_base = OTHER; note = 2'-O-methyl modified nucleotide
  modified_base 76: mod_base = OTHER; note = 2'-O-methyl modified nucleotide
  modified_base 77: mod_base = OTHER; note = 2'-O-methyl modified nucleotide
  modified_base 78: mod_base = OTHER; note = 2'-O-methyl modified nucleotide
  modified_base 79: mod_base = OTHER; note = 2'-O-methyl modified nucleotide
  modified_base 80: mod_base = OTHER; note = 2'-O-methyl modified nucleotide
  modified_base 81: mod_base = OTHER; note = 2'-O-methyl modified nucleotide
  modified_base 82: mod_base = OTHER; note = 2'-O-methyl modified nucleotide
  modified_base 83: mod_base = OTHER; note = 2'-O-methyl modified nucleotide
  modified_base 84: mod_base = OTHER; note = 2'-O-methyl modified nucleotide
  modified_base 85: mod_base = OTHER; note = 2'-O-methyl modified nucleotide
  modified_base 86: mod_base = OTHER; note = 2'-O-methyl modified nucleotide
  modified_base 87: mod_base = OTHER; note = 2'-O-methyl modified nucleotide
  modified_base 88: mod_base = OTHER; note = 2'-O-methyl modified nucleotide
  modified_base 89: mod_base = OTHER; note = 2'-O-methyl modified nucleotide
  modified_base 90: mod_base = OTHER; note = 2'-O-methyl modified nucleotide
  modified_base 91: mod_base = OTHER; note = 2'-O-methyl modified nucleotide
  modified_base 92: mod_base = OTHER; note = 2'-O-methyl modified nucleotide
  modified_base 93: mod_base = OTHER; note = 2'-O-methyl modified nucleotide
  modified_base 94: mod_base = OTHER; note = 2'-O-methyl modified nucleotide
  modified_base 95: mod_base = OTHER; note = 2'-O-methyl modified nucleotide
  modified_base 96: mod_base = OTHER; note = 2'-O-methyl modified nucleotide
  modified_base 108: mod_base = OTHER; note = Nucleotide with phosphorothioate linkage
  modified_base 109: mod_base = OTHER; note = 2'-O-methyl modified nucleotide with phosphorothioate linkage
  modified_base 110: mod_base = OTHER; note = 2'-O-methyl modified nucleotide with phosphorothioate linkage
  modified_base 111: mod_base = OTHER; note = 2'-O-methyl modified nucleotide
gagaatcaaaatcggtgaatgttttagagctagaaatagcaagttaaaataaggctagtccgttatcaacttgaaaaagtggcaccgagtcggtgctgtctgccaccgatt

SEQ ID NO: 16097 - RNA, 118 nt, synthetic construct
  source 1..118: mol_type = other RNA
  modified_base 1: mod_base = OTHER; note = 2'-O-methyl modified nucleotide with phosphorothioate linkage
  modified_base 2: mod_base = OTHER; note = 2'-O-methyl modified nucleotide with phosphorothioate linkage
  modified_base 3: mod_base = OTHER; note = 2'-O-methyl modified nucleotide with phosphorothioate linkage
  modified_base 29: mod_base = OTHER; note = 2'-O-methyl modified nucleotide
  modified_base 30: mod_base = OTHER; note = 2'-O-methyl modified nucleotide
  modified_base 31: mod_base = OTHER; note = 2'-O-methyl modified nucleotide
  modified_base 32: mod_base = OTHER; note = 2'-O-methyl modified nucleotide
  modified_base 33: mod_base = OTHER; note = 2'-O-methyl modified nucleotide
  modified_base 34: mod_base = OTHER; note = 2'-O-methyl modified nucleotide
  modified_base 35: mod_base = OTHER; note = 2'-O-methyl modified nucleotide
  modified_base 36: mod_base = OTHER; note = 2'-O-methyl modified nucleotide
  modified_base 37: mod_base = OTHER; note = 2'-O-methyl modified nucleotide
  modified_base 38: mod_base = OTHER; note = 2'-O-methyl modified nucleotide
  modified_base 39: mod_base = OTHER; note = 2'-O-methyl modified nucleotide
  modified_base 40: mod_base = OTHER; note = 2'-O-methyl modified nucleotide
  modified_base 69: mod_base = OTHER; note = 2'-O-methyl modified nucleotide
  modified_base 70: mod_base = OTHER; note = 2'-O-methyl modified nucleotide
  modified_base 71: mod_base = OTHER; note = 2'-O-methyl modified nucleotide
  modified_base 72: mod_base = OTHER; note = 2'-O-methyl modified nucleotide
  modified_base 73: mod_base = OTHER; note = 2'-O-methyl modified nucleotide
  modified_base 74: mod_base = OTHER; note = 2'-O-methyl modified nucleotide
  modified_base 75: mod_base = OTHER; note = 2'-O-methyl modified nucleotide
  modified_base 76: mod_base = OTHER; note = 2'-O-methyl modified nucleotide
  modified_base 77: mod_base = OTHER; note = 2'-O-methyl modified nucleotide
  modified_base 78: mod_base = OTHER; note = 2'-O-methyl modified nucleotide
  modified_base 79: mod_base = OTHER; note = 2'-O-methyl modified nucleotide
  modified_base 80: mod_base = OTHER; note = 2'-O-methyl modified nucleotide
  modified_base 81: mod_base = OTHER; note = 2'-O-methyl modified nucleotide
  modified_base 82: mod_base = OTHER; note = 2'-O-methyl modified nucleotide
  modified_base 83: mod_base = OTHER; note = 2'-O-methyl modified nucleotide
  modified_base 84: mod_base = OTHER; note = 2'-O-methyl modified nucleotide
  modified_base 85: mod_base = OTHER; note = 2'-O-methyl modified nucleotide
  modified_base 86: mod_base = OTHER; note = 2'-O-methyl modified nucleotide
  modified_base 87: mod_base = OTHER; note = 2'-O-methyl modified nucleotide
  modified_base 88: mod_base = OTHER; note = 2'-O-methyl modified nucleotide
  modified_base 89: mod_base = OTHER; note = 2'-O-methyl modified nucleotide
  modified_base 90: mod_base = OTHER; note = 2'-O-methyl modified nucleotide
  modified_base 91: mod_base = OTHER; note = 2'-O-methyl modified nucleotide
  modified_base 92: mod_base = OTHER; note = 2'-O-methyl modified nucleotide
  modified_base 93: mod_base = OTHER; note = 2'-O-methyl modified nucleotide
  modified_base 94: mod_base = OTHER; note = 2'-O-methyl modified nucleotide
  modified_base 95: mod_base = OTHER; note = 2'-O-methyl modified nucleotide
  modified_base 96: mod_base = OTHER; note = 2'-O-methyl modified nucleotide
  modified_base 115: mod_base = OTHER; note = Nucleotide with phosphorothioate linkage
  modified_base 116: mod_base = OTHER; note = 2'-O-methyl modified nucleotide with phosphorothioate linkage
  modified_base 117: mod_base = OTHER; note = 2'-O-methyl modified nucleotide with phosphorothioate linkage
  modified_base 118: mod_base = OTHER; note = 2'-O-methyl modified nucleotide
gagaatcaaaatcggtgaatgttttagagctagaaatagcaagttaaaataaggctagtccgttatcaacttgaaaaagtggcaccgagtcggtgctctgtctgccaccgattttgat

SEQ ID NO: 16098 - RNA, 117 nt, synthetic construct
  source 1..117: mol_type = other RNA
  modified_base 1: mod_base = OTHER; note = 2'-O-methyl modified nucleotide with phosphorothioate linkage
  modified_base 2: mod_base = OTHER; note = 2'-O-methyl modified nucleotide with phosphorothioate linkage
  modified_base 3: mod_base = OTHER; note = 2'-O-methyl modified nucleotide with phosphorothioate linkage
  modified_base 29: mod_base = OTHER; note = 2'-O-methyl modified nucleotide
  modified_base 30: mod_base = OTHER; note = 2'-O-methyl modified nucleotide
  modified_base 31: mod_base = OTHER; note = 2'-O-methyl modified nucleotide
  modified_base 32: mod_base = OTHER; note = 2'-O-methyl modified nucleotide
  modified_base 33: mod_base = OTHER; note = 2'-O-methyl modified nucleotide
  modified_base 34: mod_base = OTHER; note = 2'-O-methyl modified nucleotide
  modified_base 35: mod_base = OTHER; note = 2'-O-methyl modified nucleotide
  modified_base 36: mod_base = OTHER; note = 2'-O-methyl modified nucleotide
  modified_base 37: mod_base = OTHER; note = 2'-O-methyl modified nucleotide
  modified_base 38: mod_base = OTHER; note = 2'-O-methyl modified nucleotide
  modified_base 39: mod_base = OTHER; note = 2'-O-methyl modified nucleotide
  modified_base 40: mod_base = OTHER; note = 2'-O-methyl modified nucleotide
  modified_base 69: mod_base = OTHER; note = 2'-O-methyl modified nucleotide
  modified_base 70: mod_base = OTHER; note = 2'-O-methyl modified nucleotide
  modified_base 71: mod_base = OTHER; note = 2'-O-methyl modified nucleotide
  modified_base 72: mod_base = OTHER; note = 2'-O-methyl modified nucleotide
  modified_base 73: mod_base = OTHER; note = 2'-O-methyl modified nucleotide
  modified_base 74: mod_base = OTHER; note = 2'-O-methyl modified nucleotide
  modified_base 75: mod_base = OTHER; note = 2'-O-methyl modified nucleotide
  modified_base 76: mod_base = OTHER; note = 2'-O-methyl modified nucleotide
  modified_base 77: mod_base = OTHER; note = 2'-O-methyl modified nucleotide
  modified_base 78: mod_base = OTHER; note = 2'-O-methyl modified nucleotide
  modified_base 79: mod_base = OTHER; note = 2'-O-methyl modified nucleotide
  modified_base 80: mod_base = OTHER; note = 2'-O-methyl modified nucleotide
  modified_base 81: mod_base = OTHER; note = 2'-O-methyl modified nucleotide
  modified_base 82: mod_base = OTHER; note = 2'-O-methyl modified nucleotide
  modified_base 83: mod_base = OTHER; note = 2'-O-methyl modified nucleotide
  modified_base 84: mod_base = OTHER; note = 2'-O-methyl modified nucleotide
  modified_base 85: mod_base = OTHER; note = 2'-O-methyl modified nucleotide
  modified_base 86: mod_base = OTHER; note = 2'-O-methyl modified nucleotide
  modified_base 87: mod_base = OTHER; note = 2'-O-methyl modified nucleotide
  modified_base 88: mod_base = OTHER; note = 2'-O-methyl modified nucleotide
  modified_base 89: mod_base = OTHER; note = 2'-O-methyl modified nucleotide
  modified_base 90: mod_base = OTHER; note = 2'-O-methyl modified nucleotide
  modified_base 91: mod_base = OTHER; note = 2'-O-methyl modified nucleotide
  modified_base 92: mod_base = OTHER; note = 2'-O-methyl modified nucleotide
  modified_base 93: mod_base = OTHER; note = 2'-O-methyl modified nucleotide
  modified_base 94: mod_base = OTHER; note = 2'-O-methyl modified nucleotide
  modified_base 95: mod_base = OTHER; note = 2'-O-methyl modified nucleotide
  modified_base 96: mod_base = OTHER; note = 2'-O-methyl modified nucleotide
  modified_base 114: mod_base = OTHER; note = Nucleotide with phosphorothioate linkage
  modified_base 115: mod_base = OTHER; note = 2'-O-methyl modified nucleotide with phosphorothioate linkage
  modified_base 116: mod_base = OTHER; note = 2'-O-methyl modified nucleotide with phosphorothioate linkage
  modified_base 117: mod_base = OTHER; note = 2'-O-methyl modified nucleotide
gagaatcaaaatcggtgaatgttttagagctagaaatagcaagttaaaataaggctagtccgttatcaacttgaaaaagtggcaccgagtcggtgctctgtctgccaccgattttga

SEQ ID NO: 16099 - RNA, 116 nt, synthetic construct
  source 1..116: mol_type = other RNA
  modified_base 1: mod_base = OTHER; note = 2'-O-methyl modified nucleotide with phosphorothioate linkage
  modified_base 2: mod_base = OTHER; note = 2'-O-methyl modified nucleotide with phosphorothioate linkage
  modified_base 3: mod_base = OTHER; note = 2'-O-methyl modified nucleotide with phosphorothioate linkage
  modified_base 29: mod_base = OTHER; note = 2'-O-methyl modified nucleotide
  modified_base 30: mod_base = OTHER; note = 2'-O-methyl modified nucleotide
  modified_base 31: mod_base = OTHER; note = 2'-O-methyl modified nucleotide
  modified_base 32: mod_base = OTHER; note = 2'-O-methyl modified nucleotide
  modified_base 33: mod_base = OTHER; note = 2'-O-methyl modified nucleotide
  modified_base 34: mod_base = OTHER; note = 2'-O-methyl modified nucleotide
  modified_base 35: mod_base = OTHER; note = 2'-O-methyl modified nucleotide
  modified_base 36: mod_base = OTHER; note = 2'-O-methyl modified nucleotide
  modified_base 37: mod_base = OTHER; note = 2'-O-methyl modified nucleotide
  modified_base 38: mod_base = OTHER; note = 2'-O-methyl modified nucleotide
  modified_base 39: mod_base = OTHER; note = 2'-O-methyl modified nucleotide
  modified_base 40: mod_base = OTHER; note = 2'-O-methyl modified nucleotide
  modified_base 69: mod_base = OTHER; note = 2'-O-methyl modified nucleotide
  modified_base 70: mod_base = OTHER; note = 2'-O-methyl modified nucleotide
  modified_base 71: mod_base = OTHER; note = 2'-O-methyl modified nucleotide
  modified_base 72: mod_base = OTHER; note = 2'-O-methyl modified nucleotide
  modified_base 73: mod_base = OTHER; note = 2'-O-methyl modified nucleotide
  modified_base 74: mod_base = OTHER; note = 2'-O-methyl modified nucleotide
  modified_base 75: mod_base = OTHER; note = 2'-O-methyl modified nucleotide
  modified_base 76: mod_base = OTHER; note = 2'-O-methyl modified nucleotide
  modified_base 77: mod_base = OTHER; note = 2'-O-methyl modified nucleotide
  modified_base 78: mod_base = OTHER; note = 2'-O-methyl modified nucleotide
  modified_base 79: mod_base = OTHER; note = 2'-O-methyl modified nucleotide
  modified_base 80: mod_base = OTHER; note = 2'-O-methyl modified nucleotide
  modified_base 81: mod_base = OTHER; note = 2'-O-methyl modified nucleotide
  modified_base 82: mod_base = OTHER; note = 2'-O-methyl modified nucleotide
  modified_base 83: mod_base = OTHER; note = 2'-O-methyl modified nucleotide
  modified_base 84: mod_base = OTHER; note = 2'-O-methyl modified nucleotide
  modified_base 85: mod_base = OTHER; note = 2'-O-methyl modified nucleotide
  modified_base 86: mod_base = OTHER; note = 2'-O-methyl modified nucleotide
  modified_base 87: mod_base = OTHER; note = 2'-O-methyl modified nucleotide
  modified_base 88: mod_base = OTHER; note = 2'-O-methyl modified nucleotide
  modified_base 89: mod_base = OTHER; note = 2'-O-methyl modified nucleotide
  modified_base 90: mod_base = OTHER; note = 2'-O-methyl modified nucleotide
  modified_base 91: mod_base = OTHER; note = 2'-O-methyl modified nucleotide
  modified_base 92: mod_base = OTHER; note = 2'-O-methyl modified nucleotide
  modified_base 93: mod_base = OTHER; note = 2'-O-methyl modified nucleotide
  modified_base 94: mod_base = OTHER; note = 2'-O-methyl modified nucleotide
  modified_base 95: mod_base = OTHER; note = 2'-O-methyl modified nucleotide
  modified_base 96: mod_base = OTHER; note = 2'-O-methyl modified nucleotide
  modified_base 113: mod_base = OTHER; note = Nucleotide with phosphorothioate linkage
  modified_base 114: mod_base = OTHER; note = 2'-O-methyl modified nucleotide with phosphorothioate linkage
  modified_base 115: mod_base = OTHER; note = 2'-O-methyl modified nucleotide with phosphorothioate linkage
  modified_base 116: mod_base = OTHER; note = 2'-O-methyl modified nucleotide
gagaatcaaaatcggtgaatgttttagagctagaaatagcaagttaaaataaggctagtccgttatcaacttgaaaaagtggcaccgagtcggtgctctgtctgccaccgattttg

SEQ ID NO: 16100 - RNA, 115 nt, synthetic construct
  source 1..115: mol_type = other RNA
  modified_base 1: mod_base = OTHER; note = 2'-O-methyl modified nucleotide with phosphorothioate linkage
  modified_base 2: mod_base = OTHER; note = 2'-O-methyl modified nucleotide with phosphorothioate linkage
  modified_base 3: mod_base = OTHER; note = 2'-O-methyl modified nucleotide with phosphorothioate linkage
  modified_base 29: mod_base = OTHER; note = 2'-O-methyl modified nucleotide
  modified_base 30: mod_base = OTHER; note = 2'-O-methyl modified nucleotide
  modified_base 31: mod_base = OTHER; note = 2'-O-methyl modified nucleotide
  modified_base 32: mod_base = OTHER; note = 2'-O-methyl modified nucleotide
  modified_base 33: mod_base = OTHER; note = 2'-O-methyl modified nucleotide
  modified_base 34: mod_base = OTHER; note = 2'-O-methyl modified nucleotide
  modified_base 35: mod_base = OTHER; note = 2'-O-methyl modified nucleotide
  modified_base 36: mod_base = OTHER; note = 2'-O-methyl modified nucleotide
  modified_base 37: mod_base = OTHER; note = 2'-O-methyl modified nucleotide
  modified_base 38: mod_base = OTHER; note = 2'-O-methyl modified nucleotide
  modified_base 39: mod_base = OTHER; note = 2'-O-methyl modified nucleotide
  modified_base 40: mod_base = OTHER; note = 2'-O-methyl modified nucleotide
  modified_base 69: mod_base = OTHER; note = 2'-O-methyl modified nucleotide
  modified_base 70: mod_base = OTHER; note = 2'-O-methyl modified nucleotide
  modified_base 71: mod_base = OTHER; note = 2'-O-methyl modified nucleotide
  modified_base 72: mod_base = OTHER; note = 2'-O-methyl modified nucleotide
  modified_base 73: mod_base = OTHER; note = 2'-O-methyl modified nucleotide
  modified_base 74: mod_base = OTHER; note = 2'-O-methyl modified nucleotide
  modified_base 75: mod_base = OTHER; note = 2'-O-methyl modified nucleotide
  modified_base 76: mod_base = OTHER; note = 2'-O-methyl modified nucleotide
  modified_base 77: mod_base = OTHER; note = 2'-O-methyl modified nucleotide
  modified_base 78: mod_base = OTHER; note = 2'-O-methyl modified nucleotide
  modified_base 79: mod_base = OTHER; note = 2'-O-methyl modified nucleotide
  modified_base 80: mod_base = OTHER; note = 2'-O-methyl modified nucleotide
  modified_base 81: mod_base = OTHER; note = 2'-O-methyl modified nucleotide
  modified_base 82: mod_base = OTHER; note = 2'-O-methyl modified nucleotide
  modified_base 83: mod_base = OTHER; note = 2'-O-methyl modified nucleotide
  modified_base 84: mod_base = OTHER; note = 2'-O-methyl modified nucleotide
  modified_base 85: mod_base = OTHER; note = 2'-O-methyl modified nucleotide
  modified_base 86: mod_base = OTHER; note = 2'-O-methyl modified nucleotide
  modified_base 87: mod_base = OTHER; note = 2'-O-methyl modified nucleotide
  modified_base 88: mod_base = OTHER; note = 2'-O-methyl modified nucleotide
  modified_base 89: mod_base = OTHER; note = 2'-O-methyl modified nucleotide
  modified_base 90: mod_base = OTHER; note = 2'-O-methyl modified nucleotide
  modified_base 91: mod_base = OTHER; note = 2'-O-methyl modified nucleotide
  modified_base 92: mod_base = OTHER; note = 2'-O-methyl modified nucleotide
  modified_base 93: mod_base = OTHER; note = 2'-O-methyl modified nucleotide
  modified_base 94: mod_base = OTHER; note = 2'-O-methyl modified nucleotide
  modified_base 95: mod_base = OTHER; note = 2'-O-methyl modified nucleotide
  modified_base 96: mod_base = OTHER; note = 2'-O-methyl modified nucleotide
  modified_base 112: mod_base = OTHER; note = Nucleotide with phosphorothioate linkage
  modified_base 113: mod_base = OTHER; note = 2'-O-methyl modified nucleotide with phosphorothioate linkage
  modified_base 114: mod_base = OTHER; note = 2'-O-methyl modified nucleotide with phosphorothioate linkage
  modified_base 115: mod_base = OTHER; note = 2'-O-methyl modified nucleotide
gagaatcaaaatcggtgaatgttttagagctagaaatagcaagttaaaataaggctagtccgttatcaacttgaaaaagtggcaccgagtcggtgctctgtctgccaccgatttt

SEQ ID NO: 16101 - RNA, 114 nt, synthetic construct
  source 1..114: mol_type = other RNA
  modified_base 1: mod_base = OTHER; note = 2'-O-methyl modified nucleotide with phosphorothioate linkage
  modified_base 2: mod_base = OTHER; note = 2'-O-methyl modified nucleotide with phosphorothioate linkage
  modified_base 3: mod_base = OTHER; note = 2'-O-methyl modified nucleotide with phosphorothioate linkage
  modified_base 29: mod_base = OTHER; note = 2'-O-methyl modified nucleotide
  modified_base 30: mod_base = OTHER; note = 2'-O-methyl modified nucleotide
  modified_base 31: mod_base = OTHER; note = 2'-O-methyl modified nucleotide
  modified_base 32: mod_base = OTHER; note = 2'-O-methyl modified nucleotide
  modified_base 33: mod_base = OTHER; note = 2'-O-methyl modified nucleotide
  modified_base 34: mod_base = OTHER; note = 2'-O-methyl modified nucleotide
  modified_base 35: mod_base = OTHER; note = 2'-O-methyl modified nucleotide
  modified_base 36: mod_base = OTHER; note = 2'-O-methyl modified nucleotide
  modified_base 37: mod_base = OTHER; note = 2'-O-methyl modified nucleotide
  modified_base 38: mod_base = OTHER; note = 2'-O-methyl modified nucleotide
  modified_base 39: mod_base = OTHER; note = 2'-O-methyl modified nucleotide
  modified_base 40: mod_base = OTHER; note = 2'-O-methyl modified nucleotide
  modified_base 69: mod_base = OTHER; note = 2'-O-methyl modified nucleotide
  modified_base 70: mod_base = OTHER; note = 2'-O-methyl modified nucleotide
  modified_base 71: mod_base = OTHER; note = 2'-O-methyl modified nucleotide
  modified_base 72: mod_base = OTHER; note = 2'-O-methyl modified nucleotide
  modified_base 73: mod_base = OTHER; note = 2'-O-methyl modified nucleotide
  modified_base 74: mod_base = OTHER; note = 2'-O-methyl modified nucleotide
  modified_base 75: mod_base = OTHER; note = 2'-O-methyl modified nucleotide
  modified_base 76: mod_base = OTHER; note = 2'-O-methyl modified nucleotide
  modified_base 77: mod_base = OTHER; note = 2'-O-methyl modified nucleotide
  modified_base 78: mod_base = OTHER; note = 2'-O-methyl modified nucleotide
  modified_base 79: mod_base = OTHER; note = 2'-O-methyl modified nucleotide
  modified_base 80: mod_base = OTHER; note = 2'-O-methyl modified nucleotide
  modified_base 81: mod_base = OTHER; note = 2'-O-methyl modified nucleotide
  modified_base 82: mod_base = OTHER; note = 2'-O-methyl modified nucleotide
  modified_base 83: mod_base = OTHER; note = 2'-O-methyl modified nucleotide
  modified_base 84: mod_base = OTHER; note = 2'-O-methyl modified nucleotide
  modified_base 85: mod_base = OTHER; note = 2'-O-methyl modified nucleotide
  modified_base 86: mod_base = OTHER; note = 2'-O-methyl modified nucleotide
  modified_base 87: mod_base = OTHER; note = 2'-O-methyl modified nucleotide
  modified_base 88: mod_base = OTHER; note = 2'-O-methyl modified nucleotide
  modified_base 89: mod_base = OTHER; note = 2'-O-methyl modified nucleotide
  modified_base 90: mod_base = OTHER; note = 2'-O-methyl modified nucleotide
  modified_base 91: mod_base = OTHER; note = 2'-O-methyl modified nucleotide
  modified_base 92: mod_base = OTHER; note = 2'-O-methyl modified nucleotide
  modified_base 93: mod_base = OTHER; note = 2'-O-methyl modified nucleotide
  modified_base 94: mod_base = OTHER; note = 2'-O-methyl modified nucleotide
  modified_base 95: mod_base = OTHER; note = 2'-O-methyl modified nucleotide
  modified_base 96: mod_base = OTHER; note = 2'-O-methyl modified nucleotide
  modified_base 111: mod_base = OTHER; note = Nucleotide with phosphorothioate linkage
  modified_base 112: mod_base = OTHER; note = 2'-O-methyl modified nucleotide with phosphorothioate linkage
  modified_base 113: mod_base = OTHER; note = 2'-O-methyl modified nucleotide with phosphorothioate linkage
  modified_base 114: mod_base = OTHER; note = 2'-O-methyl modified nucleotide
gagaatcaaaatcggtgaatgttttagagctagaaatagcaagttaaaataaggctagtccgttatcaacttgaaaaagtggcaccgagtcggtgctctgtctgccaccgattt

SEQ ID NO: 16102 - RNA, 113 nt, synthetic construct
  source 1..113: mol_type = other RNA
  modified_base 1: mod_base = OTHER; note = 2'-O-methyl modified nucleotide with phosphorothioate linkage
  modified_base 2: mod_base = OTHER; note = 2'-O-methyl modified nucleotide with phosphorothioate linkage
  modified_base 3: mod_base = OTHER; note = 2'-O-methyl modified nucleotide with phosphorothioate linkage
  modified_base 29: mod_base = OTHER; note = 2'-O-methyl modified nucleotide
  modified_base 30: mod_base = OTHER; note = 2'-O-methyl modified nucleotide
  modified_base 31: mod_base = OTHER; note = 2'-O-methyl modified nucleotide
  modified_base 32: mod_base = OTHER; note = 2'-O-methyl modified nucleotide
  modified_base 33: mod_base = OTHER; note = 2'-O-methyl modified nucleotide
  modified_base 34: mod_base = OTHER; note = 2'-O-methyl modified nucleotide
  modified_base 35: mod_base = OTHER; note = 2'-O-methyl modified nucleotide
  modified_base 36: mod_base = OTHER; note = 2'-O-methyl modified nucleotide
  modified_base 37: mod_base = OTHER; note = 2'-O-methyl modified nucleotide
  modified_base 38: mod_base = OTHER; note = 2'-O-methyl modified nucleotide
  modified_base 39: mod_base = OTHER; note = 2'-O-methyl modified nucleotide
  modified_base 40: mod_base = OTHER; note = 2'-O-methyl modified nucleotide
  modified_base 69: mod_base = OTHER; note = 2'-O-methyl modified nucleotide
  modified_base 70: mod_base = OTHER; note = 2'-O-methyl modified nucleotide
  modified_base 71: mod_base = OTHER; note = 2'-O-methyl modified nucleotide
  modified_base 72: mod_base = OTHER; note = 2'-O-methyl modified nucleotide
  modified_base 73: mod_base = OTHER; note = 2'-O-methyl modified nucleotide
  modified_base 74: mod_base = OTHER; note = 2'-O-methyl modified nucleotide
  modified_base 75: mod_base = OTHER; note = 2'-O-methyl modified nucleotide
  modified_base 76: mod_base = OTHER; note = 2'-O-methyl modified nucleotide
  modified_base 77: mod_base = OTHER; note = 2'-O-methyl modified nucleotide
  modified_base 78: mod_base = OTHER; note = 2'-O-methyl modified nucleotide
  modified_base 79: mod_base = OTHER; note = 2'-O-methyl modified nucleotide
  modified_base 80: mod_base = OTHER; note = 2'-O-methyl modified nucleotide
  modified_base 81: mod_base = OTHER; note = 2'-O-methyl modified nucleotide
  modified_base 82: mod_base = OTHER; note = 2'-O-methyl modified nucleotide
  modified_base 83: mod_base = OTHER; note = 2'-O-methyl modified nucleotide
  modified_base 84: mod_base = OTHER; note = 2'-O-methyl modified nucleotide
  modified_base 85: mod_base = OTHER; note = 2'-O-methyl modified nucleotide
  modified_base 86: mod_base = OTHER; note = 2'-O-methyl modified nucleotide
  modified_base 87: mod_base = OTHER; note = 2'-O-methyl modified nucleotide
  modified_base 88: mod_base = OTHER; note = 2'-O-methyl modified nucleotide
  modified_base 89: mod_base = OTHER; note = 2'-O-methyl modified nucleotide
  modified_base 90: mod_base = OTHER; note = 2'-O-methyl modified nucleotide
  modified_base 91: mod_base = OTHER; note = 2'-O-methyl modified nucleotide
  modified_base 92: mod_base = OTHER; note = 2'-O-methyl modified nucleotide
  modified_base 93: mod_base = OTHER; note = 2'-O-methyl modified nucleotide
  modified_base 94: mod_base = OTHER; note = 2'-O-methyl modified nucleotide
  modified_base 95: mod_base = OTHER; note = 2'-O-methyl modified nucleotide
  modified_base 96: mod_base = OTHER; note = 2'-O-methyl modified nucleotide
  modified_base 110: mod_base = OTHER; note = Nucleotide with phosphorothioate linkage
  modified_base 111: mod_base = OTHER; note = 2'-O-methyl modified nucleotide with phosphorothioate linkage
  modified_base 112: mod_base = OTHER; note = 2'-O-methyl modified nucleotide with phosphorothioate linkage
  modified_base 113: mod_base = OTHER; note = 2'-O-methyl modified nucleotide
gagaatcaaaatcggtgaatgttttagagctagaaatagcaagttaaaataaggctagtccgttatcaacttgaaaaagtggcaccgagtcggtgctctgtctgccaccgatt

SEQ ID NO: 16103 - RNA, 120 nt, synthetic construct
  source 1..120: mol_type = other RNA
  modified_base 1: mod_base = OTHER; note = 2'-O-methyl modified nucleotide with phosphorothioate linkage
  modified_base 2: mod_base = OTHER; note = 2'-O-methyl modified nucleotide with phosphorothioate linkage
  modified_base 3: mod_base = OTHER; note = 2'-O-methyl modified nucleotide with phosphorothioate linkage
  modified_base 29: mod_base = OTHER; note = 2'-O-methyl modified nucleotide
  modified_base 30: mod_base = OTHER; note = 2'-O-methyl modified nucleotide
  modified_base 31: mod_base = OTHER; note = 2'-O-methyl modified nucleotide
  modified_base 32: mod_base = OTHER; note = 2'-O-methyl modified nucleotide
  modified_base 33: mod_base = OTHER; note = 2'-O-methyl modified nucleotide
  modified_base 34: mod_base = OTHER; note = 2'-O-methyl modified nucleotide
  modified_base 35: mod_base = OTHER; note = 2'-O-methyl modified nucleotide
  modified_base 36: mod_base = OTHER; note = 2'-O-methyl modified nucleotide
  modified_base 37: mod_base = OTHER; note = 2'-O-methyl modified nucleotide
  modified_base 38: mod_base = OTHER; note = 2'-O-methyl modified nucleotide
  modified_base 39: mod_base = OTHER; note = 2'-O-methyl modified nucleotide
  modified_base 40: mod_base = OTHER; note = 2'-O-methyl modified nucleotide
  modified_base 69: mod_base = OTHER; note = 2'-O-methyl modified nucleotide
  modified_base 70: mod_base = OTHER; note = 2'-O-methyl modified nucleotide
  modified_base 71: mod_base = OTHER; note = 2'-O-methyl modified nucleotide
  modified_base 72: mod_base = OTHER; note = 2'-O-methyl modified nucleotide
  modified_base 73: mod_base = OTHER; note = 2'-O-methyl modified nucleotide
  modified_base 74: mod_base = OTHER; note = 2'-O-methyl modified nucleotide
  modified_base 75: mod_base = OTHER; note = 2'-O-methyl modified nucleotide
  modified_base 76: mod_base = OTHER; note = 2'-O-methyl modified nucleotide
  modified_base 77: mod_base = OTHER; note = 2'-O-methyl modified nucleotide
  modified_base 78: mod_base = OTHER; note = 2'-O-methyl modified nucleotide
  modified_base 79: mod_base = OTHER; note = 2'-O-methyl modified nucleotide
  modified_base 80: mod_base = OTHER; note = 2'-O-methyl modified nucleotide
  modified_base 81: mod_base = OTHER; note = 2'-O-methyl modified nucleotide
  modified_base 82: mod_base = OTHER; note = 2'-O-methyl modified nucleotide
  modified_base 83: mod_base = OTHER; note = 2'-O-methyl modified nucleotide
  modified_base 84: mod_base = OTHER; note = 2'-O-methyl modified nucleotide
  modified_base 85: mod_base = OTHER; note = 2'-O-methyl modified nucleotide
  modified_base 86: mod_base = OTHER; note = 2'-O-methyl modified nucleotide
  modified_base 87: mod_base = OTHER; note = 2'-O-methyl modified nucleotide
  modified_base 88: mod_base = OTHER; note = 2'-O-methyl modified nucleotide
  modified_base 89: mod_base = OTHER; note = 2'-O-methyl modified nucleotide
  modified_base 90: mod_base = OTHER; note = 2'-O-methyl modified nucleotide
  modified_base 91: mod_base = OTHER; note = 2'-O-methyl modified nucleotide
  modified_base 92: mod_base = OTHER; note = 2'-O-methyl modified nucleotide
  modified_base 93: mod_base = OTHER; note = 2'-O-methyl modified nucleotide
  modified_base 94: mod_base = OTHER; note = 2'-O-methyl modified nucleotide
  modified_base 95: mod_base = OTHER; note = 2'-O-methyl modified nucleotide
  modified_base 96: mod_base = OTHER; note = 2'-O-methyl modified nucleotide
  modified_base 117: mod_base = OTHER; note = Nucleotide with phosphorothioate linkage
  modified_base 118: mod_base = OTHER; note = 2'-O-methyl modified nucleotide with phosphorothioate linkage
  modified_base 119: mod_base = OTHER; note = 2'-O-methyl modified nucleotide with phosphorothioate linkage
  modified_base 120: mod_base = OTHER; note = 2'-O-methyl modified nucleotide
gagaatcaaaatcggtgaatgttttagagctagaaatagcaagttaaaataaggctagtccgttatcaacttgaaaaagtggcaccgagtcggtgcagtctgtctgccaccgattttgat

SEQ ID NO: 16104 - RNA, 119 nt, synthetic construct
  source 1..119: mol_type = other RNA
  modified_base 1: mod_base = OTHER; note = 2'-O-methyl modified nucleotide with phosphorothioate linkage
  modified_base 2: mod_base = OTHER; note = 2'-O-methyl modified nucleotide with phosphorothioate linkage
  modified_base 3: mod_base = OTHER; note = 2'-O-methyl modified nucleotide with phosphorothioate linkage
  modified_base 29: mod_base = OTHER; note = 2'-O-methyl modified nucleotide
  modified_base 30: mod_base = OTHER; note = 2'-O-methyl modified nucleotide
  modified_base 31: mod_base = OTHER; note = 2'-O-methyl modified nucleotide
  modified_base 32: mod_base = OTHER; note = 2'-O-methyl modified nucleotide
  modified_base 33: mod_base = OTHER; note = 2'-O-methyl modified nucleotide
  modified_base 34: mod_base = OTHER; note = 2'-O-methyl modified nucleotide
  modified_base 35: mod_base = OTHER; note = 2'-O-methyl modified nucleotide
  modified_base 36: mod_base = OTHER; note = 2'-O-methyl modified nucleotide
  modified_base 37: mod_base = OTHER; note = 2'-O-methyl modified nucleotide
  modified_base 38: mod_base = OTHER; note = 2'-O-methyl modified nucleotide
  modified_base 39: mod_base = OTHER; note = 2'-O-methyl modified nucleotide
  modified_base 40: mod_base = OTHER; note = 2'-O-methyl modified nucleotide
  modified_base 69: mod_base = OTHER; note = 2'-O-methyl modified nucleotide
  modified_base 70: mod_base = OTHER; note = 2'-O-methyl modified nucleotide
  modified_base 71: mod_base = OTHER; note = 2'-O-methyl modified nucleotide
  modified_base 72: mod_base = OTHER; note = 2'-O-methyl modified nucleotide
  modified_base 73: mod_base = OTHER; note = 2'-O-methyl modified nucleotide
  modified_base 74: mod_base = OTHER; note = 2'-O-methyl modified nucleotide
  modified_base 75: mod_base = OTHER; note = 2'-O-methyl modified nucleotide
  modified_base 76: mod_base = OTHER; note = 2'-O-methyl modified nucleotide
  modified_base 77: mod_base = OTHER; note = 2'-O-methyl modified nucleotide
  modified_base 78: mod_base = OTHER; note = 2'-O-methyl modified nucleotide
  modified_base 79: mod_base = OTHER; note = 2'-O-methyl modified nucleotide
  modified_base 80: mod_base = OTHER; note = 2'-O-methyl modified nucleotide
  modified_base 81: mod_base = OTHER; note = 2'-O-methyl modified nucleotide
  modified_base 82: mod_base = OTHER; note = 2'-O-methyl modified nucleotide
  modified_base 83: mod_base = OTHER; note = 2'-O-methyl modified nucleotide
  modified_base 84: mod_base = OTHER; note = 2'-O-methyl modified nucleotide
  modified_base 85: mod_base = OTHER; note = 2'-O-methyl modified nucleotide
  modified_base 86: mod_base = OTHER; note = 2'-O-methyl modified nucleotide
  modified_base 87: mod_base = OTHER; note = 2'-O-methyl modified nucleotide
  modified_base 88: mod_base = OTHER; note = 2'-O-methyl modified nucleotide
  modified_base 89: mod_base = OTHER; note = 2'-O-methyl modified nucleotide
  modified_base 90: mod_base = OTHER; note = 2'-O-methyl modified nucleotide
  modified_base 91: mod_base = OTHER; note = 2'-O-methyl modified nucleotide
  modified_base 92: mod_base = OTHER; note = 2'-O-methyl modified nucleotide
  modified_base 93: mod_base = OTHER; note = 2'-O-methyl modified nucleotide
  modified_base 94: mod_base = OTHER; note = 2'-O-methyl modified nucleotide
  modified_base 95: mod_base = OTHER; note = 2'-O-methyl modified nucleotide
  modified_base 96: mod_base = OTHER; note = 2'-O-methyl modified nucleotide
  modified_base 116: mod_base = OTHER; note = Nucleotide with phosphorothioate linkage
  modified_base 117: mod_base = OTHER; note = 2'-O-methyl modified nucleotide with phosphorothioate linkage
  modified_base 118: mod_base = OTHER; note = 2'-O-methyl modified nucleotide with phosphorothioate linkage
  modified_base 119: mod_base = OTHER; note = 2'-O-methyl modified nucleotide
gagaatcaaaatcggtgaatgttttagagctagaaatagcaagttaaaataaggctagtccgttatcaacttgaaaaagtggcaccgagtcggtgcagtctgtctgccaccgattttga

SEQ ID NO: 16105 - RNA, 118 nt, synthetic construct
  source 1..118: mol_type = other RNA
  modified_base 1: mod_base = OTHER; note = 2'-O-methyl modified nucleotide with phosphorothioate linkage
  modified_base 2: mod_base = OTHER; note = 2'-O-methyl modified nucleotide with phosphorothioate linkage
  modified_base 3: mod_base = OTHER; note = 2'-O-methyl modified nucleotide with phosphorothioate linkage
  modified_base 29: mod_base = OTHER; note = 2'-O-methyl modified nucleotide
  modified_base 30: mod_base = OTHER; note = 2'-O-methyl modified nucleotide
  modified_base 31: mod_base = OTHER; note = 2'-O-methyl modified nucleotide
  modified_base 32: mod_base = OTHER; note = 2'-O-methyl modified nucleotide
  modified_base 33: mod_base = OTHER; note = 2'-O-methyl modified nucleotide
  modified_base 34: mod_base = OTHER; note = 2'-O-methyl modified nucleotide
  modified_base 35: mod_base = OTHER; note = 2'-O-methyl modified nucleotide
  modified_base 36: mod_base = OTHER; note = 2'-O-methyl modified nucleotide
  modified_base 37: mod_base = OTHER; note = 2'-O-methyl modified nucleotide
  modified_base 38: mod_base = OTHER; note = 2'-O-methyl modified nucleotide
  modified_base 39: mod_base = OTHER; note = 2'-O-methyl modified nucleotide
  modified_base 40: mod_base = OTHER; note = 2'-O-methyl modified nucleotide
  modified_base 69: mod_base = OTHER; note = 2'-O-methyl modified nucleotide
  modified_base 70: mod_base = OTHER; note = 2'-O-methyl modified nucleotide
  modified_base 71: mod_base = OTHER; note = 2'-O-methyl modified nucleotide
  modified_base 72: mod_base = OTHER; note = 2'-O-methyl modified nucleotide
  modified_base 73: mod_base = OTHER; note = 2'-O-methyl modified nucleotide
  modified_base 74: mod_base = OTHER; note = 2'-O-methyl modified nucleotide
  modified_base 75: mod_base = OTHER; note = 2'-O-methyl modified nucleotide
  modified_base 76: mod_base = OTHER; note = 2'-O-methyl modified nucleotide
  modified_base 77: mod_base = OTHER; note = 2'-O-methyl modified nucleotide
  modified_base 78: mod_base = OTHER; note = 2'-O-methyl modified nucleotide
  modified_base 79: mod_base = OTHER; note = 2'-O-methyl modified nucleotide
  modified_base 80: mod_base = OTHER; note = 2'-O-methyl modified nucleotide
  modified_base 81: mod_base = OTHER; note = 2'-O-methyl modified nucleotide
  modified_base 82: mod_base = OTHER; note = 2'-O-methyl modified nucleotide
  modified_base 83: mod_base = OTHER; note = 2'-O-methyl modified nucleotide
  modified_base 84: mod_base = OTHER; note = 2'-O-methyl modified nucleotide
  modified_base 85: mod_base = OTHER; note = 2'-O-methyl modified nucleotide
  modified_base 86: mod_base = OTHER; note = 2'-O-methyl modified nucleotide
  modified_base 87: mod_base = OTHER; note = 2'-O-methyl modified nucleotide
  modified_base 88: mod_base = OTHER; note = 2'-O-methyl modified nucleotide
  modified_base 89: mod_base = OTHER; note = 2'-O-methyl modified nucleotide
  modified_base 90: mod_base = OTHER; note = 2'-O-methyl modified nucleotide
  modified_base 91: mod_base = OTHER; note = 2'-O-methyl modified nucleotide
  modified_base 92: mod_base = OTHER; note = 2'-O-methyl modified nucleotide
  modified_base 93: mod_base = OTHER; note = 2'-O-methyl modified nucleotide
  modified_base 94: mod_base = OTHER; note = 2'-O-methyl modified nucleotide
  modified_base 95: mod_base = OTHER; note = 2'-O-methyl modified nucleotide
  modified_base 96: mod_base = OTHER; note = 2'-O-methyl modified nucleotide
  modified_base 115: mod_base = OTHER; note = Nucleotide with phosphorothioate linkage
  modified_base 116: mod_base = OTHER; note = 2'-O-methyl modified nucleotide with phosphorothioate linkage
  modified_base 117: mod_base = OTHER; note = 2'-O-methyl modified nucleotide with phosphorothioate linkage
  modified_base 118: mod_base = OTHER; note = 2'-O-methyl modified nucleotide
gagaatcaaaatcggtgaatgttttagagctagaaatagcaagttaaaataaggctagtccgttatcaacttgaaaaagtggcaccgagtcggtgcagtctgtctgccaccgattttg

SEQ ID NO: 16106 - RNA, 117 nt, synthetic construct
  source 1..117: mol_type = other RNA
  modified_base 1: mod_base = OTHER; note = 2'-O-methyl modified nucleotide with phosphorothioate linkage
  modified_base 2: mod_base = OTHER; note = 2'-O-methyl modified nucleotide with phosphorothioate linkage
  modified_base 3: mod_base = OTHER; note = 2'-O-methyl modified nucleotide with phosphorothioate linkage
  modified_base 29: mod_base = OTHER; note = 2'-O-methyl modified nucleotide
  modified_base 30: mod_base = OTHER; note = 2'-O-methyl modified nucleotide
  modified_base 31: mod_base = OTHER; note = 2'-O-methyl modified nucleotide
  modified_base 32: mod_base = OTHER; note = 2'-O-methyl modified nucleotide
  modified_base 33: mod_base = OTHER; note = 2'-O-methyl modified nucleotide
  modified_base 34: mod_base = OTHER; note = 2'-O-methyl modified nucleotide
  modified_base 35: mod_base = OTHER; note = 2'-O-methyl modified nucleotide
  modified_base 36: mod_base = OTHER; note = 2'-O-methyl modified nucleotide
  modified_base 37: mod_base = OTHER; note = 2'-O-methyl modified nucleotide
  modified_base 38: mod_base = OTHER; note = 2'-O-methyl modified nucleotide
  modified_base 39: mod_base = OTHER; note = 2'-O-methyl modified nucleotide
  modified_base 40: mod_base = OTHER; note = 2'-O-methyl modified nucleotide
  modified_base 69: mod_base = OTHER; note = 2'-O-methyl modified nucleotide
  modified_base 70: mod_base = OTHER; note = 2'-O-methyl modified nucleotide
  modified_base 71: mod_base = OTHER; note = 2'-O-methyl modified nucleotide
  modified_base 72: mod_base = OTHER; note = 2'-O-methyl modified nucleotide
  modified_base 73: mod_base = OTHER; note = 2'-O-methyl modified nucleotide
  modified_base 74: mod_base = OTHER; note = 2'-O-methyl modified nucleotide
  modified_base 75: mod_base = OTHER; note = 2'-O-methyl modified nucleotide
  modified_base 76: mod_base = OTHER; note = 2'-O-methyl modified nucleotide
  modified_base 77: mod_base = OTHER; note = 2'-O-methyl modified nucleotide
  modified_base 78: mod_base = OTHER; note = 2'-O-methyl modified nucleotide
  modified_base 79: mod_base = OTHER; note = 2'-O-methyl modified nucleotide
  modified_base 80: mod_base = OTHER; note = 2'-O-methyl modified nucleotide
  modified_base 81: mod_base = OTHER; note = 2'-O-methyl modified nucleotide
  modified_base 82: mod_base = OTHER; note = 2'-O-methyl modified nucleotide
  modified_base 83: mod_base = OTHER; note = 2'-O-methyl modified nucleotide
  modified_base 84: mod_base = OTHER; note = 2'-O-methyl modified nucleotide
  modified_base 85: mod_base = OTHER; note = 2'-O-methyl modified nucleotide
  modified_base 86: mod_base = OTHER; note = 2'-O-methyl modified nucleotide
  modified_base 87: mod_base = OTHER; note = 2'-O-methyl modified nucleotide
  modified_base 88: mod_base = OTHER; note = 2'-O-methyl modified nucleotide
  modified_base 89: mod_base = OTHER; note = 2'-O-methyl modified nucleotide
  modified_base 90: mod_base = OTHER; note = 2'-O-methyl modified nucleotide
  modified_base 91: mod_base = OTHER; note = 2'-O-methyl modified nucleotide
  modified_base 92: mod_base = OTHER; note = 2'-O-methyl modified nucleotide
  modified_base 93: mod_base = OTHER; note = 2'-O-methyl modified nucleotide
  modified_base 94: mod_base = OTHER; note = 2'-O-methyl modified nucleotide
  modified_base 95: mod_base = OTHER; note = 2'-O-methyl modified nucleotide
  modified_base 96: mod_base = OTHER; note = 2'-O-methyl modified nucleotide
  modified_base 114: mod_base = OTHER; note = Nucleotide with phosphorothioate linkage
  modified_base 115: mod_base = OTHER; note = 2'-O-methyl modified nucleotide with phosphorothioate linkage
  modified_base 116: mod_base = OTHER; note = 2'-O-methyl modified nucleotide with phosphorothioate linkage
  modified_base 117: mod_base = OTHER; note = 2'-O-methyl modified nucleotide
gagaatcaaaatcggtgaatgttttagagctagaaatagcaagttaaaataaggctagtccgttatcaacttgaaaaagtggcaccgagtcggtgcagtctgtctgccaccgatttt

SEQ ID NO: 16107 - RNA, 116 nt, synthetic construct
  source 1..116: mol_type = other RNA
  modified_base 1: mod_base = OTHER; note = 2'-O-methyl modified nucleotide with phosphorothioate linkage
  modified_base 2: mod_base = OTHER; note = 2'-O-methyl modified nucleotide with phosphorothioate linkage
  modified_base 3: mod_base = OTHER; note = 2'-O-methyl modified nucleotide with phosphorothioate linkage
  modified_base 29: mod_base = OTHER; note = 2'-O-methyl modified nucleotide
  modified_base 30: mod_base = OTHER; note = 2'-O-methyl modified nucleotide
  modified_base 31: mod_base = OTHER; note = 2'-O-methyl modified nucleotide
  modified_base 32: mod_base = OTHER; note = 2'-O-methyl modified nucleotide
  modified_base 33: mod_base = OTHER; note = 2'-O-methyl modified nucleotide
  modified_base 34: mod_base = OTHER; note = 2'-O-methyl modified nucleotide
  modified_base 35: mod_base = OTHER; note = 2'-O-methyl modified nucleotide
  modified_base 36: mod_base = OTHER; note = 2'-O-methyl modified nucleotide
  modified_base 37: mod_base = OTHER; note = 2'-O-methyl modified nucleotide
  modified_base 38: mod_base = OTHER; note = 2'-O-methyl modified nucleotide
  modified_base 39: mod_base = OTHER; note = 2'-O-methyl modified nucleotide
  modified_base 40: mod_base = OTHER; note = 2'-O-methyl modified nucleotide
  modified_base 69: mod_base = OTHER; note = 2'-O-methyl modified nucleotide
  modified_base 70: mod_base = OTHER; note = 2'-O-methyl modified nucleotide
  modified_base 71: mod_base = OTHER; note = 2'-O-methyl modified nucleotide
  modified_base 72: mod_base = OTHER; note = 2'-O-methyl modified nucleotide
  modified_base 73: mod_base = OTHER; note = 2'-O-methyl modified nucleotide
  modified_base 74: mod_base = OTHER; note = 2'-O-methyl modified nucleotide
  modified_base 75: mod_base = OTHER; note = 2'-O-methyl modified nucleotide
  modified_base 76: mod_base = OTHER; note = 2'-O-methyl modified nucleotide
  modified_base 77: mod_base = OTHER; note = 2'-O-methyl modified nucleotide
  modified_base 78: mod_base = OTHER; note = 2'-O-methyl modified nucleotide
  modified_base 79: mod_base = OTHER; note = 2'-O-methyl modified nucleotide
  modified_base 80: mod_base = OTHER; note = 2'-O-methyl modified nucleotide
  modified_base 81: mod_base = OTHER; note = 2'-O-methyl modified nucleotide
  modified_base 82: mod_base = OTHER; note = 2'-O-methyl modified nucleotide
  modified_base 83: mod_base = OTHER; note = 2'-O-methyl modified nucleotide
  modified_base 84: mod_base = OTHER; note = 2'-O-methyl modified nucleotide
  modified_base 85: mod_base = OTHER; note = 2'-O-methyl modified nucleotide
  modified_base 86: mod_base = OTHER; note = 2'-O-methyl modified nucleotide
  modified_base 87: mod_base = OTHER; note = 2'-O-methyl modified nucleotide
  modified_base 88: mod_base = OTHER; note = 2'-O-methyl modified nucleotide
  modified_base 89: mod_base = OTHER; note = 2'-O-methyl modified nucleotide
  modified_base 90: mod_base = OTHER; note = 2'-O-methyl modified nucleotide
  modified_base 91: mod_base = OTHER; note = 2'-O-methyl modified nucleotide
  modified_base 92: mod_base = OTHER; note = 2'-O-methyl modified nucleotide
  modified_base 93: mod_base = OTHER; note = 2'-O-methyl modified nucleotide
  modified_base 94: mod_base = OTHER; note = 2'-O-methyl modified nucleotide
  modified_base 95: mod_base = OTHER; note = 2'-O-methyl modified nucleotide
  modified_base 96: mod_base = OTHER; note = 2'-O-methyl modified nucleotide
  modified_base 113: mod_base = OTHER; note = Nucleotide with phosphorothioate linkage
  modified_base 114: mod_base = OTHER; note = 2'-O-methyl modified nucleotide with phosphorothioate linkage
  modified_base 115: mod_base = OTHER; note = 2'-O-methyl modified nucleotide with phosphorothioate linkage
  modified_base 116: mod_base = OTHER; note = 2'-O-methyl modified nucleotide
gagaatcaaaatcggtgaatgttttagagctagaaatagcaagttaaaataaggctagtccgttatcaacttgaaaaagtggcaccgagtcggtgcagtctgtctgccaccgattt

SEQ ID NO: 16108 - RNA, 115 nt, synthetic construct
  source 1..115: mol_type = other RNA
  modified_base 1: mod_base = OTHER; note = 2'-O-methyl modified nucleotide with phosphorothioate linkage
  modified_base 2: mod_base = OTHER; note = 2'-O-methyl modified nucleotide with phosphorothioate linkage
  modified_base 3: mod_base = OTHER; note = 2'-O-methyl modified nucleotide with phosphorothioate linkage
  modified_base 29: mod_base = OTHER; note = 2'-O-methyl modified nucleotide
  modified_base 30: mod_base = OTHER; note = 2'-O-methyl modified nucleotide
  modified_base 31: mod_base = OTHER; note = 2'-O-methyl modified nucleotide
  modified_base 32: mod_base = OTHER; note = 2'-O-methyl modified nucleotide
  modified_base 33: mod_base = OTHER; note = 2'-O-methyl modified nucleotide
  modified_base 34: mod_base = OTHER; note = 2'-O-methyl modified nucleotide
  modified_base 35: mod_base = OTHER; note = 2'-O-methyl modified nucleotide
  modified_base 36: mod_base = OTHER; note = 2'-O-methyl modified nucleotide
  modified_base 37: mod_base = OTHER; note = 2'-O-methyl modified nucleotide
  modified_base 38: mod_base = OTHER; note = 2'-O-methyl modified nucleotide
  modified_base 39: mod_base = OTHER; note = 2'-O-methyl modified nucleotide
  modified_base 40: mod_base = OTHER; note = 2'-O-methyl modified nucleotide
  modified_base 69: mod_base = OTHER; note = 2'-O-methyl modified nucleotide
  modified_base 70: mod_base = OTHER; note = 2'-O-methyl modified nucleotide
  modified_base 71: mod_base = OTHER; note = 2'-O-methyl modified nucleotide
  modified_base 72: mod_base = OTHER; note = 2'-O-methyl modified nucleotide
  modified_base 73: mod_base = OTHER; note = 2'-O-methyl modified nucleotide
  modified_base 74: mod_base = OTHER; note = 2'-O-methyl modified nucleotide
  modified_base 75: mod_base = OTHER; note = 2'-O-methyl modified nucleotide
  modified_base 76: mod_base = OTHER; note = 2'-O-methyl modified nucleotide
  modified_base 77: mod_base = OTHER; note = 2'-O-methyl modified nucleotide
  modified_base 78: mod_base = OTHER; note = 2'-O-methyl modified nucleotide
  modified_base 79: mod_base = OTHER; note = 2'-O-methyl modified nucleotide
  modified_base 80: mod_base = OTHER; note = 2'-O-methyl modified nucleotide
  modified_base 81: mod_base = OTHER; note = 2'-O-methyl modified nucleotide
  modified_base 82: mod_base = OTHER; note = 2'-O-methyl modified nucleotide
  modified_base 83: mod_base = OTHER; note = 2'-O-methyl modified nucleotide
  modified_base 84: mod_base = OTHER; note = 2'-O-methyl modified nucleotide
  modified_base 85: mod_base = OTHER; note = 2'-O-methyl modified nucleotide
  modified_base 86: mod_base = OTHER; note = 2'-O-methyl modified nucleotide
  modified_base 87: mod_base = OTHER; note = 2'-O-methyl modified nucleotide
  modified_base 88: mod_base = OTHER; note = 2'-O-methyl modified nucleotide
  modified_base 89: mod_base = OTHER; note = 2'-O-methyl modified nucleotide
  modified_base 90: mod_base = OTHER; note = 2'-O-methyl modified nucleotide
  modified_base 91: mod_base = OTHER; note = 2'-O-methyl modified nucleotide
  modified_base 92: mod_base = OTHER; note = 2'-O-methyl modified nucleotide
  modified_base 93: mod_base = OTHER; note = 2'-O-methyl modified nucleotide
  modified_base 94: mod_base = OTHER; note = 2'-O-methyl modified nucleotide
  modified_base 95: mod_base = OTHER; note = 2'-O-methyl modified nucleotide
  modified_base 96: mod_base = OTHER; note = 2'-O-methyl modified nucleotide
  modified_base 112: mod_base = OTHER; note = Nucleotide with phosphorothioate linkage
  modified_base 113: mod_base = OTHER; note = 2'-O-methyl modified nucleotide with phosphorothioate linkage
  modified_base 114: mod_base = OTHER; note = 2'-O-methyl modified nucleotide with phosphorothioate linkage
  modified_base 115: mod_base = OTHER; note = 2'-O-methyl modified nucleotide
gagaatcaaaatcggtgaatgttttagagctagaaatagcaagttaaaataaggctagtccgttatcaacttgaaaaagtggcaccgagtcggtgcagtctgtctgccaccgatt

SEQ ID NO: 16109 - RNA, 122 nt, synthetic construct
  source 1..122: mol_type = other RNA
  modified_base 1: mod_base = OTHER; note = 2'-O-methyl modified nucleotide with phosphorothioate linkage
  modified_base 2: mod_base = OTHER; note = 2'-O-methyl modified nucleotide with phosphorothioate linkage
  modified_base 3: mod_base = OTHER; note = 2'-O-methyl modified nucleotide with phosphorothioate linkage
  modified_base 29: mod_base = OTHER; note = 2'-O-methyl modified nucleotide
  modified_base 30: mod_base = OTHER; note = 2'-O-methyl modified nucleotide
  modified_base 31: mod_base = OTHER; note = 2'-O-methyl modified nucleotide
  modified_base 32: mod_base = OTHER; note = 2'-O-methyl modified nucleotide
  modified_base 33: mod_base = OTHER; note = 2'-O-methyl modified nucleotide
  modified_base 34: mod_base = OTHER; note = 2'-O-methyl modified nucleotide
  modified_base 35: mod_base = OTHER; note = 2'-O-methyl modified nucleotide
  modified_base 36: mod_base = OTHER; note = 2'-O-methyl modified nucleotide
  modified_base 37: mod_base = OTHER; note = 2'-O-methyl modified nucleotide
  modified_base 38: mod_base = OTHER; note = 2'-O-methyl modified nucleotide
  modified_base 39: mod_base = OTHER; note = 2'-O-methyl modified nucleotide
  modified_base 40: mod_base = OTHER; note = 2'-O-methyl modified nucleotide
  modified_base 69: mod_base = OTHER; note = 2'-O-methyl modified nucleotide
  modified_base 70: mod_base = OTHER; note = 2'-O-methyl modified nucleotide
  modified_base 71: mod_base = OTHER; note = 2'-O-methyl modified nucleotide
  modified_base 72: mod_base = OTHER; note = 2'-O-methyl modified nucleotide
  modified_base 73: mod_base = OTHER; note = 2'-O-methyl modified nucleotide
  modified_base 74: mod_base = OTHER; note = 2'-O-methyl modified nucleotide
  modified_base 75: mod_base = OTHER; note = 2'-O-methyl modified nucleotide
  modified_base 76: mod_base = OTHER; note = 2'-O-methyl modified nucleotide
  modified_base 77: mod_base = OTHER; note = 2'-O-methyl modified nucleotide
  modified_base 78: mod_base = OTHER; note = 2'-O-methyl modified nucleotide
  modified_base 79: mod_base = OTHER; note = 2'-O-methyl modified nucleotide
  modified_base 80: mod_base = OTHER; note = 2'-O-methyl modified nucleotide
  modified_base 81: mod_base = OTHER; note = 2'-O-methyl modified nucleotide
  modified_base 82: mod_base = OTHER; note = 2'-O-methyl modified nucleotide
  modified_base 83: mod_base = OTHER; note = 2'-O-methyl modified nucleotide
  modified_base 84: mod_base = OTHER; note = 2'-O-methyl modified nucleotide
  modified_base 85: mod_base = OTHER; note = 2'-O-methyl modified nucleotide
  modified_base 86: mod_base = OTHER; note = 2'-O-methyl modified nucleotide
  modified_base 87: mod_base = OTHER; note = 2'-O-methyl modified nucleotide
  modified_base 88: mod_base = OTHER; note = 2'-O-methyl modified nucleotide
  modified_base 89: mod_base = OTHER; note = 2'-O-methyl modified nucleotide
  modified_base 90: mod_base = OTHER; note = 2'-O-methyl modified nucleotide
  modified_base 91: mod_base = OTHER; note = 2'-O-methyl modified nucleotide
  modified_base 92: mod_base = OTHER; note = 2'-O-methyl modified nucleotide
  modified_base 93: mod_base = OTHER; note = 2'-O-methyl modified nucleotide
  modified_base 94: mod_base = OTHER; note = 2'-O-methyl modified nucleotide
  modified_base 95: mod_base = OTHER; note = 2'-O-methyl modified nucleotide
  modified_base 96: mod_base = OTHER; note = 2'-O-methyl modified nucleotide
  modified_base 119: mod_base = OTHER; note = Nucleotide with phosphorothioate linkage
  modified_base 120: mod_base = OTHER; note = 2'-O-methyl modified nucleotide with phosphorothioate linkage
  modified_base 121: mod_base = OTHER; note = 2'-O-methyl modified nucleotide with phosphorothioate linkage
  modified_base 122: mod_base = OTHER; note = 2'-O-methyl modified nucleotide
gagaatcaaaatcggtgaatgttttagagctagaaatagcaagttaaaataaggctagtccgttatcaacttgaaaaagtggcaccgagtcggtgccaagtctgtctgccaccgattttgat

SEQ ID NO: 16110 - RNA, 121 nt, synthetic construct
  source 1..121: mol_type = other RNA
  modified_base 1: mod_base = OTHER; note = 2'-O-methyl modified nucleotide with phosphorothioate linkage
  modified_base 2: mod_base = OTHER; note = 2'-O-methyl modified nucleotide with phosphorothioate linkage
  modified_base 3: mod_base = OTHER; note = 2'-O-methyl modified nucleotide with phosphorothioate linkage
  modified_base 29: mod_base = OTHER; note = 2'-O-methyl modified nucleotide
  modified_base 30: mod_base = OTHER; note = 2'-O-methyl modified nucleotide
  modified_base 31: mod_base = OTHER; note = 2'-O-methyl modified nucleotide
  modified_base 32: mod_base = OTHER; note = 2'-O-methyl modified nucleotide
  modified_base 33: mod_base = OTHER; note = 2'-O-methyl modified nucleotide
  modified_base 34: mod_base = OTHER; note = 2'-O-methyl modified nucleotide
  modified_base 35: mod_base = OTHER; note = 2'-O-methyl modified nucleotide
  modified_base 36: mod_base = OTHER; note = 2'-O-methyl modified nucleotide
  modified_base 37: mod_base = OTHER; note = 2'-O-methyl modified nucleotide
  modified_base 38: mod_base = OTHER; note = 2'-O-methyl modified nucleotide
  modified_base 39: mod_base = OTHER; note = 2'-O-methyl modified nucleotide
  modified_base 40: mod_base = OTHER; note = 2'-O-methyl modified nucleotide
  modified_base 69: mod_base = OTHER; note = 2'-O-methyl modified nucleotide
  modified_base 70: mod_base = OTHER; note = 2'-O-methyl modified nucleotide
  modified_base 71: mod_base = OTHER; note = 2'-O-methyl modified nucleotide
  modified_base 72: mod_base = OTHER; note = 2'-O-methyl modified nucleotide
  modified_base 73: mod_base = OTHER; note = 2'-O-methyl modified nucleotide
  modified_base 74: mod_base = OTHER; note = 2'-O-methyl modified nucleotide
  modified_base 75: mod_base = OTHER; note = 2'-O-methyl modified nucleotide
  modified_base 76: mod_base = OTHER; note = 2'-O-methyl modified nucleotide
  modified_base 77: mod_base = OTHER; note = 2'-O-methyl modified nucleotide
  modified_base 78: mod_base = OTHER; note = 2'-O-methyl modified nucleotide
  modified_base 79: mod_base = OTHER; note = 2'-O-methyl modified nucleotide
  modified_base 80: mod_base = OTHER; note = 2'-O-methyl modified nucleotide
  modified_base 81: mod_base = OTHER; note = 2'-O-methyl modified nucleotide
  modified_base 82: mod_base = OTHER; note = 2'-O-methyl modified nucleotide
  modified_base 83: mod_base = OTHER; note = 2'-O-methyl modified nucleotide
  modified_base 84: mod_base = OTHER; note = 2'-O-methyl modified nucleotide
  modified_base 85: mod_base = OTHER; note = 2'-O-methyl modified nucleotide
  modified_base 86: mod_base = OTHER; note = 2'-O-methyl modified nucleotide
  modified_base 87: mod_base = OTHER; note = 2'-O-methyl modified nucleotide
  modified_base 88: mod_base = OTHER; note = 2'-O-methyl modified nucleotide
  modified_base 89: mod_base = OTHER; note = 2'-O-methyl modified nucleotide
  modified_base 90: mod_base = OTHER; note = 2'-O-methyl modified nucleotide
  modified_base 91: mod_base = OTHER; note = 2'-O-methyl modified nucleotide
  modified_base 92: mod_base = OTHER; note = 2'-O-methyl modified nucleotide
  modified_base 93: mod_base = OTHER; note = 2'-O-methyl modified nucleotide
  modified_base 94: mod_base = OTHER; note = 2'-O-methyl modified nucleotide
  modified_base 95: mod_base = OTHER; note = 2'-O-methyl modified nucleotide
  modified_base 96: mod_base = OTHER; note = 2'-O-methyl modified nucleotide
  modified_base 118: mod_base = OTHER; note = Nucleotide with phosphorothioate linkage
  modified_base 119: mod_base = OTHER; note = 2'-O-methyl modified nucleotide with phosphorothioate linkage
  modified_base 120: mod_base = OTHER; note = 2'-O-methyl modified nucleotide with phosphorothioate linkage
  modified_base 121: mod_base = OTHER; note = 2'-O-methyl modified nucleotide
gagaatcaaaatcggtgaatgttttagagctagaaatagcaagttaaaataaggctagtccgttatcaacttgaaaaagtggcaccgagtcggtgccaagtctgtctgccaccgattttga

SEQ ID NO: 16111 - RNA, 120 nt, synthetic construct
  source 1..120: mol_type = other RNA
  modified_base 1: mod_base = OTHER; note = 2'-O-methyl modified nucleotide with phosphorothioate linkage
  modified_base 2: mod_base = OTHER; note = 2'-O-methyl modified nucleotide with phosphorothioate linkage
  modified_base 3: mod_base = OTHER; note = 2'-O-methyl modified nucleotide with phosphorothioate linkage
  modified_base 29: mod_base = OTHER; note = 2'-O-methyl modified nucleotide
  modified_base 30: mod_base = OTHER; note = 2'-O-methyl modified nucleotide
  modified_base 31: mod_base = OTHER; note = 2'-O-methyl modified nucleotide
  modified_base 32: mod_base = OTHER; note = 2'-O-methyl modified nucleotide
  modified_base 33: mod_base = OTHER; note = 2'-O-methyl modified nucleotide
  modified_base 34: mod_base = OTHER; note = 2'-O-methyl modified nucleotide
  modified_base 35: mod_base = OTHER; note = 2'-O-methyl modified nucleotide
  modified_base 36: mod_base = OTHER; note = 2'-O-methyl modified nucleotide
  modified_base 37: mod_base = OTHER; note = 2'-O-methyl modified nucleotide
  modified_base 38: mod_base = OTHER; note = 2'-O-methyl modified nucleotide
  modified_base 39: mod_base = OTHER; note = 2'-O-methyl modified nucleotide
  modified_base 40: mod_base = OTHER; note = 2'-O-methyl modified nucleotide
  modified_base 69: mod_base = OTHER; note = 2'-O-methyl modified nucleotide
  modified_base 70: mod_base = OTHER; note = 2'-O-methyl modified nucleotide
  modified_base 71: mod_base = OTHER; note = 2'-O-methyl modified nucleotide
  modified_base 72: mod_base = OTHER; note = 2'-O-methyl modified nucleotide
  modified_base 73: mod_base = OTHER; note = 2'-O-methyl modified nucleotide
  modified_base 74: mod_base = OTHER; note = 2'-O-methyl modified nucleotide
  modified_base 75: mod_base = OTHER; note = 2'-O-methyl modified nucleotide
  modified_base 76: mod_base = OTHER; note = 2'-O-methyl modified nucleotide
  modified_base 77: mod_base = OTHER; note = 2'-O-methyl modified nucleotide
  modified_base 78: mod_base = OTHER; note = 2'-O-methyl modified nucleotide
  modified_base 79: mod_base = OTHER; note = 2'-O-methyl modified nucleotide
  modified_base 80: mod_base = OTHER; note = 2'-O-methyl modified nucleotide
  modified_base 81: mod_base = OTHER; note = 2'-O-methyl modified nucleotide
  modified_base 82: mod_base = OTHER; note = 2'-O-methyl modified nucleotide
  modified_base 83: mod_base = OTHER; note = 2'-O-methyl modified nucleotide
  modified_base 84: mod_base = OTHER; note = 2'-O-methyl modified nucleotide
  modified_base 85: mod_base = OTHER; note = 2'-O-methyl modified nucleotide
  modified_base 86: mod_base = OTHER; note = 2'-O-methyl modified nucleotide
  modified_base 87: mod_base = OTHER; note = 2'-O-methyl modified nucleotide
  modified_base 88: mod_base = OTHER; note = 2'-O-methyl modified nucleotide
  modified_base 89: mod_base = OTHER; note = 2'-O-methyl modified nucleotide
  modified_base 90: mod_base = OTHER; note = 2'-O-methyl modified nucleotide
  modified_base 91: mod_base = OTHER; note = 2'-O-methyl modified nucleotide
  modified_base 92: mod_base = OTHER; note = 2'-O-methyl modified nucleotide
  modified_base 93: mod_base = OTHER; note = 2'-O-methyl modified nucleotide
  modified_base 94: mod_base = OTHER; note = 2'-O-methyl modified nucleotide
  modified_base 95: mod_base = OTHER; note = 2'-O-methyl modified nucleotide
  modified_base 96: mod_base = OTHER; note = 2'-O-methyl modified nucleotide
  modified_base 117: mod_base = OTHER; note = Nucleotide with phosphorothioate linkage
  modified_base 118: mod_base = OTHER; note = 2'-O-methyl modified nucleotide with phosphorothioate linkage
  modified_base 119: mod_base = OTHER; note = 2'-O-methyl modified nucleotide with phosphorothioate linkage
  modified_base 120: mod_base = OTHER; note = 2'-O-methyl modified nucleotide
gagaatcaaaatcggtgaatgttttagagctagaaatagcaagttaaaataaggctagtccgttatcaacttgaaaaagtggcaccgagtcggtgccaagtctgtctgccaccgattttg

SEQ ID NO: 16112 - RNA, 119 nt, synthetic construct
  source 1..119: mol_type = other RNA
  modified_base 1: mod_base = OTHER; note = 2'-O-methyl modified nucleotide with phosphorothioate linkage
  modified_base 2: mod_base = OTHER; note = 2'-O-methyl modified nucleotide with phosphorothioate linkage
  modified_base 3: mod_base = OTHER; note = 2'-O-methyl modified nucleotide with phosphorothioate linkage
  modified_base 29: mod_base = OTHER; note = 2'-O-methyl modified nucleotide
  modified_base 30: mod_base = OTHER; note = 2'-O-methyl modified nucleotide
  modified_base 31: mod_base = OTHER; note = 2'-O-methyl modified nucleotide
  modified_base 32: mod_base = OTHER; note = 2'-O-methyl modified nucleotide
  modified_base 33: mod_base = OTHER; note = 2'-O-methyl modified nucleotide
  modified_base 34: mod_base = OTHER; note = 2'-O-methyl modified nucleotide
  modified_base 35: mod_base = OTHER; note = 2'-O-methyl modified nucleotide
  modified_base 36: mod_base = OTHER; note = 2'-O-methyl modified nucleotide
  modified_base 37: mod_base = OTHER; note = 2'-O-methyl modified nucleotide
  modified_base 38: mod_base = OTHER; note = 2'-O-methyl modified nucleotide
  modified_base 39: mod_base = OTHER; note = 2'-O-methyl modified nucleotide
  modified_base 40: mod_base = OTHER; note = 2'-O-methyl modified nucleotide
  modified_base 69: mod_base = OTHER; note = 2'-O-methyl modified nucleotide
  modified_base 70: mod_base = OTHER; note = 2'-O-methyl modified nucleotide
  modified_base 71: mod_base = OTHER; note = 2'-O-methyl modified nucleotide
  modified_base 72: mod_base = OTHER; note = 2'-O-methyl modified nucleotide
  modified_base 73: mod_base = OTHER; note = 2'-O-methyl modified nucleotide
  modified_base 74: mod_base = OTHER; note = 2'-O-methyl modified nucleotide
  modified_base 75: mod_base = OTHER; note = 2'-O-methyl modified nucleotide
  modified_base 76: mod_base = OTHER; note = 2'-O-methyl modified nucleotide
  modified_base 77: mod_base = OTHER; note = 2'-O-methyl modified nucleotide
  modified_base 78: mod_base = OTHER; note = 2'-O-methyl modified nucleotide
  modified_base 79: mod_base = OTHER; note = 2'-O-methyl modified nucleotide
  modified_base 80: mod_base = OTHER; note = 2'-O-methyl modified nucleotide
  modified_base 81: mod_base = OTHER; note = 2'-O-methyl modified nucleotide
  modified_base 82: mod_base = OTHER; note = 2'-O-methyl modified nucleotide
  modified_base 83: mod_base = OTHER; note = 2'-O-methyl modified nucleotide
  modified_base 84: mod_base = OTHER; note = 2'-O-methyl modified nucleotide
  modified_base 85: mod_base = OTHER; note = 2'-O-methyl modified nucleotide
  modified_base 86: mod_base = OTHER; note = 2'-O-methyl modified nucleotide
  modified_base 87: mod_base = OTHER; note = 2'-O-methyl modified nucleotide
  modified_base 88: mod_base = OTHER; note = 2'-O-methyl modified nucleotide
  modified_base 89: mod_base = OTHER; note = 2'-O-methyl modified nucleotide
  modified_base 90: mod_base = OTHER; note = 2'-O-methyl modified nucleotide
  modified_base 91: mod_base = OTHER; note = 2'-O-methyl modified nucleotide
  modified_base 92: mod_base = OTHER; note = 2'-O-methyl modified nucleotide
  modified_base 93: mod_base = OTHER; note = 2'-O-methyl modified nucleotide
  modified_base 94: mod_base = OTHER; note = 2'-O-methyl modified nucleotide
  modified_base 95: mod_base = OTHER; note = 2'-O-methyl modified nucleotide
  modified_base 96: mod_base = OTHER; note = 2'-O-methyl modified nucleotide
  modified_base 116: mod_base = OTHER; note = Nucleotide with phosphorothioate linkage
  modified_base 117: mod_base = OTHER; note = 2'-O-methyl modified nucleotide with phosphorothioate linkage
  modified_base 118: mod_base = OTHER; note = 2'-O-methyl modified nucleotide with phosphorothioate linkage
  modified_base 119: mod_base = OTHER; note = 2'-O-methyl modified nucleotide
gagaatcaaaatcggtgaatgttttagagctagaaatagcaagttaaaataaggctagtccgttatcaacttgaaaaagtggcaccgagtcggtgccaagtctgtctgccaccgatttt

SEQ ID NO: 16113 - RNA, 118 nt, synthetic construct
  source 1..118: mol_type = other RNA
  modified_base 1: mod_base = OTHER; note = 2'-O-methyl modified nucleotide with phosphorothioate linkage
  modified_base 2: mod_base = OTHER; note = 2'-O-methyl modified nucleotide with phosphorothioate linkage
  modified_base 3: mod_base = OTHER; note = 2'-O-methyl modified nucleotide with phosphorothioate linkage
  modified_base 29: mod_base = OTHER; note = 2'-O-methyl modified nucleotide
  modified_base 30: mod_base = OTHER; note = 2'-O-methyl modified nucleotide
  modified_base 31: mod_base = OTHER; note = 2'-O-methyl modified nucleotide
  modified_base 32: mod_base = OTHER; note = 2'-O-methyl modified nucleotide
  modified_base 33: mod_base = OTHER; note = 2'-O-methyl modified nucleotide
  modified_base 34: mod_base = OTHER; note = 2'-O-methyl modified nucleotide
  modified_base 35: mod_base = OTHER; note = 2'-O-methyl modified nucleotide
  modified_base 36: mod_base = OTHER; note = 2'-O-methyl modified nucleotide
  modified_base 37: mod_base = OTHER; note = 2'-O-methyl modified nucleotide
  modified_base 38: mod_base = OTHER; note = 2'-O-methyl modified nucleotide
  modified_base 39: mod_base = OTHER; note = 2'-O-methyl modified nucleotide
  modified_base 40: mod_base = OTHER; note = 2'-O-methyl modified nucleotide
  modified_base 69: mod_base = OTHER; note = 2'-O-methyl modified nucleotide
  modified_base 70: mod_base = OTHER; note = 2'-O-methyl modified nucleotide
  modified_base 71: mod_base = OTHER; note = 2'-O-methyl modified nucleotide
  modified_base 72: mod_base = OTHER; note = 2'-O-methyl modified nucleotide
  modified_base 73: mod_base = OTHER; note = 2'-O-methyl modified nucleotide
  modified_base 74: mod_base = OTHER; note = 2'-O-methyl modified nucleotide
  modified_base 75: mod_base = OTHER; note = 2'-O-methyl modified nucleotide
  modified_base 76: mod_base = OTHER; note = 2'-O-methyl modified nucleotide
  modified_base 77: mod_base = OTHER; note = 2'-O-methyl modified nucleotide
  modified_base 78: mod_base = OTHER; note = 2'-O-methyl modified nucleotide
  modified_base 79: mod_base = OTHER; note = 2'-O-methyl modified nucleotide
  modified_base 80: mod_base = OTHER; note = 2'-O-methyl modified nucleotide
  modified_base 81: mod_base = OTHER; note = 2'-O-methyl modified nucleotide
  modified_base 82: mod_base = OTHER; note = 2'-O-methyl modified nucleotide
  modified_base 83: mod_base = OTHER; note = 2'-O-methyl modified nucleotide
  modified_base 84: mod_base = OTHER; note = 2'-O-methyl modified nucleotide
  modified_base 85: mod_base = OTHER; note = 2'-O-methyl modified nucleotide
  modified_base 86: mod_base = OTHER; note = 2'-O-methyl modified nucleotide
  modified_base 87: mod_base = OTHER; note = 2'-O-methyl modified nucleotide
  modified_base 88: mod_base = OTHER; note = 2'-O-methyl modified nucleotide
  modified_base 89: mod_base = OTHER; note = 2'-O-methyl modified nucleotide
  modified_base 90: mod_base = OTHER; note = 2'-O-methyl modified nucleotide
  modified_base 91: mod_base = OTHER; note = 2'-O-methyl modified nucleotide
  modified_base 92: mod_base = OTHER; note = 2'-O-methyl modified nucleotide
  modified_base 93: mod_base = OTHER; note = 2'-O-methyl modified nucleotide
  modified_base 94: mod_base = OTHER; note = 2'-O-methyl modified nucleotide
  modified_base 95: mod_base = OTHER; note = 2'-O-methyl modified nucleotide
  modified_base 96: mod_base = OTHER; note = 2'-O-methyl modified nucleotide
  modified_base 115: mod_base = OTHER; note = Nucleotide with phosphorothioate linkage
  modified_base 116: mod_base = OTHER; note = 2'-O-methyl modified nucleotide with phosphorothioate linkage
  modified_base 117: mod_base = OTHER; note = 2'-O-methyl modified nucleotide with phosphorothioate linkage
  modified_base 118: mod_base = OTHER; note = 2'-O-methyl modified nucleotide
gagaatcaaaatcggtgaatgttttagagctagaaatagcaagttaaaataaggctagtccgttatcaacttgaaaaagtggcaccgagtcggtgccaagtctgtctgccaccgattt

SEQ ID NO: 16114 - RNA, 117 nt, synthetic construct
  source 1..117: mol_type = other RNA
  modified_base 1: mod_base = OTHER; note = 2'-O-methyl modified nucleotide with phosphorothioate linkage
  modified_base 2: mod_base = OTHER; note = 2'-O-methyl modified nucleotide with phosphorothioate linkage
  modified_base 3: mod_base = OTHER; note = 2'-O-methyl modified nucleotide with phosphorothioate linkage
  modified_base 29: mod_base = OTHER; note = 2'-O-methyl modified nucleotide
  modified_base 30: mod_base = OTHER; note = 2'-O-methyl modified nucleotide
  modified_base 31: mod_base = OTHER; note = 2'-O-methyl modified nucleotide
  modified_base 32: mod_base = OTHER; note = 2'-O-methyl modified nucleotide
  modified_base 33: mod_base = OTHER; note = 2'-O-methyl modified nucleotide
  modified_base 34: mod_base = OTHER; note = 2'-O-methyl modified nucleotide
  modified_base 35: mod_base = OTHER; note = 2'-O-methyl modified nucleotide
  modified_base 36: mod_base = OTHER; note = 2'-O-methyl modified nucleotide
  modified_base 37: mod_base = OTHER; note = 2'-O-methyl modified nucleotide
  modified_base 38: mod_base = OTHER; note = 2'-O-methyl modified nucleotide
  modified_base 39: mod_base = OTHER; note = 2'-O-methyl modified nucleotide
  modified_base 40: mod_base = OTHER; note = 2'-O-methyl modified nucleotide
  modified_base 69: mod_base = OTHER; note = 2'-O-methyl modified nucleotide
  modified_base 70: mod_base = OTHER; note = 2'-O-methyl modified nucleotide
  modified_base 71: mod_base = OTHER; note = 2'-O-methyl modified nucleotide
  modified_base 72: mod_base = OTHER; note = 2'-O-methyl modified nucleotide
  modified_base 73: mod_base = OTHER; note = 2'-O-methyl modified nucleotide
  modified_base 74: mod_base = OTHER; note = 2'-O-methyl modified nucleotide
  modified_base 75: mod_base = OTHER; note = 2'-O-methyl modified nucleotide
  modified_base 76: mod_base = OTHER; note = 2'-O-methyl modified nucleotide
  modified_base 77: mod_base = OTHER; note = 2'-O-methyl modified nucleotide
  modified_base 78: mod_base = OTHER; note = 2'-O-methyl modified nucleotide
  modified_base 79: mod_base = OTHER; note = 2'-O-methyl modified nucleotide
  modified_base 80: mod_base = OTHER; note = 2'-O-methyl modified nucleotide
  modified_base 81: mod_base = OTHER; note = 2'-O-methyl modified nucleotide
  modified_base 82: mod_base = OTHER; note = 2'-O-methyl modified nucleotide
  modified_base 83: mod_base = OTHER; note = 2'-O-methyl modified nucleotide
  modified_base 84: mod_base = OTHER; note = 2'-O-methyl modified nucleotide
  modified_base 85: mod_base = OTHER; note = 2'-O-methyl modified nucleotide
  modified_base 86: mod_base = OTHER; note = 2'-O-methyl modified nucleotide
  modified_base 87: mod_base = OTHER; note = 2'-O-methyl modified nucleotide
  modified_base 88: mod_base = OTHER; note = 2'-O-methyl modified nucleotide
  modified_base 89: mod_base = OTHER; note = 2'-O-methyl modified nucleotide
  modified_base 90: mod_base = OTHER; note = 2'-O-methyl modified nucleotide
  modified_base 91: mod_base = OTHER; note = 2'-O-methyl modified nucleotide
  modified_base 92: mod_base = OTHER; note = 2'-O-methyl modified nucleotide
  modified_base 93: mod_base = OTHER; note = 2'-O-methyl modified nucleotide
  modified_base 94: mod_base = OTHER; note = 2'-O-methyl modified nucleotide
  modified_base 95: mod_base = OTHER; note = 2'-O-methyl modified nucleotide
  modified_base 96: mod_base = OTHER; note = 2'-O-methyl modified nucleotide
  modified_base 114: mod_base = OTHER; note = Nucleotide with phosphorothioate linkage
  modified_base 115: mod_base = OTHER; note = 2'-O-methyl modified nucleotide with phosphorothioate linkage
  modified_base 116: mod_base = OTHER; note = 2'-O-methyl modified nucleotide with phosphorothioate linkage
  modified_base 117: mod_base = OTHER; note = 2'-O-methyl modified nucleotide
gagaatcaaaatcggtgaatgttttagagctagaaatagcaagttaaaataaggctagtccgttatcaacttgaaaaagtggcaccgagtcggtgccaagtctgtctgccaccgatt

SEQ ID NO: 16115 - RNA, 124 nt, synthetic construct
  source 1..124: mol_type = other RNA
  modified_base 1: mod_base = OTHER; note = 2'-O-methyl modified nucleotide with phosphorothioate linkage
  modified_base 2: mod_base = OTHER; note = 2'-O-methyl modified nucleotide with phosphorothioate linkage
  modified_base 3: mod_base = OTHER; note = 2'-O-methyl modified nucleotide with phosphorothioate linkage
  modified_base 29: mod_base = OTHER; note = 2'-O-methyl modified nucleotide
  modified_base 30: mod_base = OTHER; note = 2'-O-methyl modified nucleotide
  modified_base 31: mod_base = OTHER; note = 2'-O-methyl modified nucleotide
  modified_base 32: mod_base = OTHER; note = 2'-O-methyl modified nucleotide
  modified_base 33: mod_base = OTHER; note = 2'-O-methyl modified nucleotide
  modified_base 34: mod_base = OTHER; note = 2'-O-methyl modified nucleotide
  modified_base 35: mod_base = OTHER; note = 2'-O-methyl modified nucleotide
  modified_base 36: mod_base = OTHER; note = 2'-O-methyl modified nucleotide
  modified_base 37: mod_base = OTHER; note = 2'-O-methyl modified nucleotide
  modified_base 38: mod_base = OTHER; note = 2'-O-methyl modified nucleotide
  modified_base 39: mod_base = OTHER; note = 2'-O-methyl modified nucleotide
  modified_base 40: mod_base = OTHER; note = 2'-O-methyl modified nucleotide
  modified_base 69: mod_base = OTHER; note = 2'-O-methyl modified nucleotide
  modified_base 70: mod_base = OTHER; note = 2'-O-methyl modified nucleotide
  modified_base 71: mod_base = OTHER; note = 2'-O-methyl modified nucleotide
  modified_base 72: mod_base = OTHER; note = 2'-O-methyl modified nucleotide
  modified_base 73: mod_base = OTHER; note = 2'-O-methyl modified nucleotide
  modified_base 74: mod_base = OTHER; note = 2'-O-methyl modified nucleotide
  modified_base 75: mod_base = OTHER; note = 2'-O-methyl modified nucleotide
  modified_base 76: mod_base = OTHER; note = 2'-O-methyl modified nucleotide
  modified_base 77: mod_base = OTHER; note = 2'-O-methyl modified nucleotide
  modified_base 78: mod_base = OTHER; note = 2'-O-methyl modified nucleotide
  modified_base 79: mod_base = OTHER; note = 2'-O-methyl modified nucleotide
  modified_base 80: mod_base = OTHER; note = 2'-O-methyl modified nucleotide
  modified_base 81: mod_base = OTHER; note = 2'-O-methyl modified nucleotide
  modified_base 82: mod_base = OTHER; note = 2'-O-methyl modified nucleotide
  modified_base 83: mod_base = OTHER; note = 2'-O-methyl modified nucleotide
  modified_base 84: mod_base = OTHER; note = 2'-O-methyl modified nucleotide
  modified_base 85: mod_base = OTHER; note = 2'-O-methyl modified nucleotide
  modified_base 86: mod_base = OTHER; note = 2'-O-methyl modified nucleotide
  modified_base 87: mod_base = OTHER; note = 2'-O-methyl modified nucleotide
  modified_base 88: mod_base = OTHER; note = 2'-O-methyl modified nucleotide
  modified_base 89: mod_base = OTHER; note = 2'-O-methyl modified nucleotide
  modified_base 90: mod_base = OTHER; note = 2'-O-methyl modified nucleotide
  modified_base 91: mod_base = OTHER; note = 2'-O-methyl modified nucleotide
  modified_base 92: mod_base = OTHER; note = 2'-O-methyl modified nucleotide
  modified_base 93: mod_base = OTHER; note = 2'-O-methyl modified nucleotide
  modified_base 94: mod_base = OTHER; note = 2'-O-methyl modified nucleotide
  modified_base 95: mod_base = OTHER; note = 2'-O-methyl modified nucleotide
  modified_base 96: mod_base = OTHER; note = 2'-O-methyl modified nucleotide
  modified_base 121: mod_base = OTHER; note = Nucleotide with phosphorothioate linkage
  modified_base 122: mod_base = OTHER; note = 2'-O-methyl modified nucleotide with phosphorothioate linkage
  modified_base 123: mod_base = OTHER; note = 2'-O-methyl modified nucleotide with phosphorothioate linkage
  modified_base 124: mod_base = OTHER; note = 2'-O-methyl modified nucleotide
gagaatcaaaatcggtgaatgttttagagctagaaatagcaagttaaaataaggctagtccgttatcaacttgaaaaagtggcaccgagtcggtgcgacaagtctgtctgccaccgattttgat

SEQ ID NO: 16116 - RNA, 123 nt, synthetic construct
  source 1..123: mol_type = other RNA
  modified_base 1: mod_base = OTHER; note = 2'-O-methyl modified nucleotide with phosphorothioate linkage
  modified_base 2: mod_base = OTHER; note = 2'-O-methyl modified nucleotide with phosphorothioate linkage
  modified_base 3: mod_base = OTHER; note = 2'-O-methyl modified nucleotide with phosphorothioate linkage
  modified_base 29: mod_base = OTHER; note = 2'-O-methyl modified nucleotide
  modified_base 30: mod_base = OTHER; note = 2'-O-methyl modified nucleotide
  modified_base 31: mod_base = OTHER; note = 2'-O-methyl modified nucleotide
  modified_base 32: mod_base = OTHER; note = 2'-O-methyl modified nucleotide
  modified_base 33: mod_base = OTHER; note = 2'-O-methyl modified nucleotide
  modified_base 34: mod_base = OTHER; note = 2'-O-methyl modified nucleotide
  modified_base 35: mod_base = OTHER; note = 2'-O-methyl modified nucleotide
  modified_base 36: mod_base = OTHER; note = 2'-O-methyl modified nucleotide
  modified_base 37: mod_base = OTHER; note = 2'-O-methyl modified nucleotide
  modified_base 38: mod_base = OTHER; note = 2'-O-methyl modified nucleotide
  modified_base 39: mod_base = OTHER; note = 2'-O-methyl modified nucleotide
  modified_base 40: mod_base = OTHER; note = 2'-O-methyl modified nucleotide
  modified_base 69: mod_base = OTHER; note = 2'-O-methyl modified nucleotide
  modified_base 70: mod_base = OTHER; note = 2'-O-methyl modified nucleotide
  modified_base 71: mod_base = OTHER; note = 2'-O-methyl modified nucleotide
  modified_base 72: mod_base = OTHER; note = 2'-O-methyl modified nucleotide
  modified_base 73: mod_base = OTHER; note = 2'-O-methyl modified nucleotide
  modified_base 74: mod_base = OTHER; note = 2'-O-methyl modified nucleotide
  modified_base 75: mod_base = OTHER; note = 2'-O-methyl modified nucleotide
  modified_base 76: mod_base = OTHER; note = 2'-O-methyl modified nucleotide
  modified_base 77: mod_base = OTHER; note = 2'-O-methyl modified nucleotide
  modified_base 78: mod_base = OTHER; note = 2'-O-methyl modified nucleotide
  modified_base 79: mod_base = OTHER; note = 2'-O-methyl modified nucleotide
  modified_base 80: mod_base = OTHER; note = 2'-O-methyl modified nucleotide
  modified_base 81: mod_base = OTHER; note = 2'-O-methyl modified nucleotide
  modified_base 82: mod_base = OTHER; note = 2'-O-methyl modified nucleotide
  modified_base 83: mod_base = OTHER; note = 2'-O-methyl modified nucleotide
  modified_base 84: mod_base = OTHER; note = 2'-O-methyl modified nucleotide
  modified_base 85: mod_base = OTHER; note = 2'-O-methyl modified nucleotide
  modified_base 86: mod_base = OTHER; note = 2'-O-methyl modified nucleotide
  modified_base 87: mod_base = OTHER; note = 2'-O-methyl modified nucleotide
  modified_base 88: mod_base = OTHER; note = 2'-O-methyl modified nucleotide
  modified_base 89: mod_base = OTHER; note = 2'-O-methyl modified nucleotide
  modified_base 90: mod_base = OTHER; note = 2'-O-methyl modified nucleotide
  modified_base 91: mod_base = OTHER; note = 2'-O-methyl modified nucleotide
  modified_base 92: mod_base = OTHER; note = 2'-O-methyl modified nucleotide
  modified_base 93: mod_base = OTHER; note = 2'-O-methyl modified nucleotide
  modified_base 94: mod_base = OTHER; note = 2'-O-methyl modified nucleotide
  modified_base 95: mod_base = OTHER; note = 2'-O-methyl modified nucleotide
  modified_base 96: mod_base = OTHER; note = 2'-O-methyl modified nucleotide
  modified_base 120: mod_base = OTHER; note = Nucleotide with phosphorothioate linkage
  modified_base 121: mod_base = OTHER; note = 2'-O-methyl modified nucleotide with phosphorothioate linkage
  modified_base 122: mod_base = OTHER; note = 2'-O-methyl modified nucleotide with phosphorothioate linkage
  modified_base 123: mod_base = OTHER; note = 2'-O-methyl modified nucleotide
gagaatcaaaatcggtgaatgttttagagctagaaatagcaagttaaaataaggctagtccgttatcaacttgaaaaagtggcaccgagtcggtgcgacaagtctgtctgccaccgattttga

SEQ ID NO: 16117 - RNA, 122 nt, synthetic construct
  source 1..122: mol_type = other RNA
  modified_base 1: mod_base = OTHER; note = 2'-O-methyl modified nucleotide with phosphorothioate linkage
  modified_base 2: mod_base = OTHER; note = 2'-O-methyl modified nucleotide with phosphorothioate linkage
  modified_base 3: mod_base = OTHER; note = 2'-O-methyl modified nucleotide with phosphorothioate linkage
  modified_base 29: mod_base = OTHER; note = 2'-O-methyl modified nucleotide
  modified_base 30: mod_base = OTHER; note = 2'-O-methyl modified nucleotide
  modified_base 31: mod_base = OTHER; note = 2'-O-methyl modified nucleotide
  modified_base 32: mod_base = OTHER; note = 2'-O-methyl modified nucleotide
  modified_base 33: mod_base = OTHER; note = 2'-O-methyl modified nucleotide
  modified_base 34: mod_base = OTHER; note = 2'-O-methyl modified nucleotide
  modified_base 35: mod_base = OTHER; note = 2'-O-methyl modified nucleotide
  modified_base 36: mod_base = OTHER; note = 2'-O-methyl modified nucleotide
  modified_base 37: mod_base = OTHER; note = 2'-O-methyl modified nucleotide
  modified_base 38: mod_base = OTHER; note = 2'-O-methyl modified nucleotide
  modified_base 39: mod_base = OTHER; note = 2'-O-methyl modified nucleotide
  modified_base 40: mod_base = OTHER; note = 2'-O-methyl modified nucleotide
  modified_base 69: mod_base = OTHER; note = 2'-O-methyl modified nucleotide
  modified_base 70: mod_base = OTHER; note = 2'-O-methyl modified nucleotide
  modified_base 71: mod_base = OTHER; note = 2'-O-methyl modified nucleotide
  modified_base 72: mod_base = OTHER; note = 2'-O-methyl modified nucleotide
  modified_base 73: mod_base = OTHER; note = 2'-O-methyl modified nucleotide
  modified_base 74: mod_base = OTHER; note = 2'-O-methyl modified nucleotide
  modified_base 75: mod_base = OTHER; note = 2'-O-methyl modified nucleotide
  modified_base 76: mod_base = OTHER; note = 2'-O-methyl modified nucleotide
  modified_base 77: mod_base = OTHER; note = 2'-O-methyl modified nucleotide
  modified_base 78: mod_base = OTHER; note = 2'-O-methyl modified nucleotide
  modified_base 79: mod_base = OTHER; note = 2'-O-methyl modified nucleotide
  modified_base 80: mod_base = OTHER; note = 2'-O-methyl modified nucleotide
  modified_base 81: mod_base = OTHER; note = 2'-O-methyl modified nucleotide
  modified_base 82: mod_base = OTHER; note = 2'-O-methyl modified nucleotide
  modified_base 83: mod_base = OTHER; note = 2'-O-methyl modified nucleotide
  modified_base 84: mod_base = OTHER; note = 2'-O-methyl modified nucleotide
  modified_base 85: mod_base = OTHER; note = 2'-O-methyl modified nucleotide
  modified_base 86: mod_base = OTHER; note = 2'-O-methyl modified nucleotide
  modified_base 87: mod_base = OTHER; note = 2'-O-methyl modified nucleotide
  modified_base 88: mod_base = OTHER; note = 2'-O-methyl modified nucleotide
  modified_base 89: mod_base = OTHER; note = 2'-O-methyl modified nucleotide
  modified_base 90: mod_base = OTHER; note = 2'-O-methyl modified nucleotide
  modified_base 91: mod_base = OTHER; note = 2'-O-methyl modified nucleotide
  modified_base 92: mod_base = OTHER; note = 2'-O-methyl modified nucleotide
  modified_base 93: mod_base = OTHER; note = 2'-O-methyl modified nucleotide
  modified_base 94: mod_base = OTHER; note = 2'-O-methyl modified nucleotide
  modified_base 95: mod_base = OTHER; note = 2'-O-methyl modified nucleotide
  modified_base 96: mod_base = OTHER; note = 2'-O-methyl modified nucleotide
  modified_base 119: mod_base = OTHER; note = Nucleotide with phosphorothioate linkage
  modified_base 120: mod_base = OTHER; note = 2'-O-methyl modified nucleotide with phosphorothioate linkage
  modified_base 121: mod_base = OTHER; note = 2'-O-methyl modified nucleotide with phosphorothioate linkage
  modified_base 122: mod_base = OTHER; note = 2'-O-methyl modified nucleotide
gagaatcaaaatcggtgaatgttttagagctagaaatagcaagttaaaataaggctagtccgttatcaacttgaaaaagtggcaccgagtcggtgcgacaagtctgtctgccaccgattttg

SEQ ID NO: 16118 - RNA, 121 nt, synthetic construct
  source 1..121: mol_type = other RNA
  modified_base 1: mod_base = OTHER; note = 2'-O-methyl modified nucleotide with phosphorothioate linkage
  modified_base 2: mod_base = OTHER; note = 2'-O-methyl modified nucleotide with phosphorothioate linkage
  modified_base 3: mod_base = OTHER; note = 2'-O-methyl modified nucleotide with phosphorothioate linkage
  modified_base 29: mod_base = OTHER; note = 2'-O-methyl modified nucleotide
  modified_base 30: mod_base = OTHER; note = 2'-O-methyl modified nucleotide
  modified_base 31: mod_base = OTHER; note = 2'-O-methyl modified nucleotide
  modified_base 32: mod_base = OTHER; note = 2'-O-methyl modified nucleotide
  modified_base 33: mod_base = OTHER; note = 2'-O-methyl modified nucleotide
  modified_base 34: mod_base = OTHER; note = 2'-O-methyl modified nucleotide
  modified_base 35: mod_base = OTHER; note = 2'-O-methyl modified nucleotide
  modified_base 36: mod_base = OTHER; note = 2'-O-methyl modified nucleotide
  modified_base 37: mod_base = OTHER; note = 2'-O-methyl modified nucleotide
  modified_base 38: mod_base = OTHER; note = 2'-O-methyl modified nucleotide
  modified_base 39: mod_base = OTHER; note = 2'-O-methyl modified nucleotide
  modified_base 40: mod_base = OTHER; note = 2'-O-methyl modified nucleotide
  modified_base 69: mod_base = OTHER; note = 2'-O-methyl modified nucleotide
  modified_base 70: mod_base = OTHER; note = 2'-O-methyl modified nucleotide
  modified_base 71: mod_base = OTHER; note = 2'-O-methyl modified nucleotide
  modified_base 72: mod_base = OTHER; note = 2'-O-methyl modified nucleotide
  modified_base 73: mod_base = OTHER; note = 2'-O-methyl modified nucleotide
  modified_base 74: mod_base = OTHER; note = 2'-O-methyl modified nucleotide
  modified_base 75: mod_base = OTHER; note = 2'-O-methyl modified nucleotide
  modified_base 76: mod_base = OTHER; note = 2'-O-methyl modified nucleotide
  modified_base 77: mod_base = OTHER; note = 2'-O-methyl modified nucleotide
  modified_base 78: mod_base = OTHER; note = 2'-O-methyl modified nucleotide
  modified_base 79: mod_base = OTHER; note = 2'-O-methyl modified nucleotide
  modified_base 80: mod_base = OTHER; note = 2'-O-methyl modified nucleotide
  modified_base 81: mod_base = OTHER; note = 2'-O-methyl modified nucleotide
  modified_base 82: mod_base = OTHER; note = 2'-O-methyl modified nucleotide
  modified_base 83: mod_base = OTHER; note = 2'-O-methyl modified nucleotide
  modified_base 84: mod_base = OTHER; note = 2'-O-methyl modified nucleotide
  modified_base 85: mod_base = OTHER; note = 2'-O-methyl modified nucleotide
  modified_base 86: mod_base = OTHER; note = 2'-O-methyl modified nucleotide
  modified_base 87: mod_base = OTHER; note = 2'-O-methyl modified nucleotide
  modified_base 88: mod_base = OTHER; note = 2'-O-methyl modified nucleotide
  modified_base 89: mod_base = OTHER; note = 2'-O-methyl modified nucleotide
  modified_base 90: mod_base = OTHER; note = 2'-O-methyl modified nucleotide
  modified_base 91: mod_base = OTHER; note = 2'-O-methyl modified nucleotide
  modified_base 92: mod_base = OTHER; note = 2'-O-methyl modified nucleotide
  modified_base 93: mod_base = OTHER; note = 2'-O-methyl modified nucleotide
  modified_base 94: mod_base = OTHER; note = 2'-O-methyl modified nucleotide
  modified_base 95: mod_base = OTHER; note = 2'-O-methyl modified nucleotide
  modified_base 96: mod_base = OTHER; note = 2'-O-methyl modified nucleotide
  modified_base 118: mod_base = OTHER; note = Nucleotide with phosphorothioate linkage
  modified_base 119: mod_base = OTHER; note = 2'-O-methyl modified nucleotide with phosphorothioate linkage
  modified_base 120: mod_base = OTHER; note = 2'-O-methyl modified nucleotide with phosphorothioate linkage
  modified_base 121: mod_base = OTHER; note = 2'-O-methyl modified nucleotide
gagaatcaaaatcggtgaatgttttagagctagaaatagcaagttaaaataaggctagtccgttatcaacttgaaaaagtggcaccgagtcggtgcgacaagtctgtctgccaccgatttt

SEQ ID NO: 16119 - RNA, 120 nt, synthetic construct
  source 1..120: mol_type = other RNA
  modified_base 1: mod_base = OTHER; note = 2'-O-methyl modified nucleotide with phosphorothioate linkage
  modified_base 2: mod_base = OTHER; note = 2'-O-methyl modified nucleotide with phosphorothioate linkage
  modified_base 3: mod_base = OTHER; note = 2'-O-methyl modified nucleotide with phosphorothioate linkage
  modified_base 29: mod_base = OTHER; note = 2'-O-methyl modified nucleotide
  modified_base 30: mod_base = OTHER; note = 2'-O-methyl modified nucleotide
  modified_base 31: mod_base = OTHER; note = 2'-O-methyl modified nucleotide
  modified_base 32: mod_base = OTHER; note = 2'-O-methyl modified nucleotide
  modified_base 33: mod_base = OTHER; note = 2'-O-methyl modified nucleotide
  modified_base 34: mod_base = OTHER; note = 2'-O-methyl modified nucleotide
  modified_base 35: mod_base = OTHER; note = 2'-O-methyl modified nucleotide
  modified_base 36: mod_base = OTHER; note = 2'-O-methyl modified nucleotide
  modified_base 37: mod_base = OTHER; note = 2'-O-methyl modified nucleotide
  modified_base 38: mod_base = OTHER; note = 2'-O-methyl modified nucleotide
  modified_base 39: mod_base = OTHER; note = 2'-O-methyl modified nucleotide
  modified_base 40: mod_base = OTHER; note = 2'-O-methyl modified nucleotide
  modified_base 69: mod_base = OTHER; note = 2'-O-methyl modified nucleotide
  modified_base 70: mod_base = OTHER; note = 2'-O-methyl modified nucleotide
  modified_base 71: mod_base = OTHER; note = 2'-O-methyl modified nucleotide
  modified_base 72: mod_base = OTHER; note = 2'-O-methyl modified nucleotide
  modified_base 73: mod_base = OTHER; note = 2'-O-methyl modified nucleotide
  modified_base 74: mod_base = OTHER; note = 2'-O-methyl modified nucleotide
  modified_base 75: mod_base = OTHER; note = 2'-O-methyl modified nucleotide
  modified_base 76: mod_base = OTHER; note = 2'-O-methyl modified nucleotide
  modified_base 77: mod_base = OTHER; note = 2'-O-methyl modified nucleotide
  modified_base 78: mod_base = OTHER; note = 2'-O-methyl modified nucleotide
  modified_base 79: mod_base = OTHER; note = 2'-O-methyl modified nucleotide
  modified_base 80: mod_base = OTHER; note = 2'-O-methyl modified nucleotide
  modified_base 81: mod_base = OTHER; note = 2'-O-methyl modified nucleotide
  modified_base 82: mod_base = OTHER; note = 2'-O-methyl modified nucleotide
  modified_base 83: mod_base = OTHER; note = 2'-O-methyl modified nucleotide
  modified_base 84: mod_base = OTHER; note = 2'-O-methyl modified nucleotide
  modified_base 85: mod_base = OTHER; note = 2'-O-methyl modified nucleotide
  modified_base 86: mod_base = OTHER; note = 2'-O-methyl modified nucleotide
  modified_base 87: mod_base = OTHER; note = 2'-O-methyl modified nucleotide
  modified_base 88: mod_base = OTHER; note = 2'-O-methyl modified nucleotide
  modified_base 89: mod_base = OTHER; note = 2'-O-methyl modified nucleotide
  modified_base 90: mod_base = OTHER; note = 2'-O-methyl modified nucleotide
  modified_base 91: mod_base = OTHER; note = 2'-O-methyl modified nucleotide
  modified_base 92: mod_base = OTHER; note = 2'-O-methyl modified nucleotide
  modified_base 93: mod_base = OTHER; note = 2'-O-methyl modified nucleotide
  modified_base 94: mod_base = OTHER; note = 2'-O-methyl modified nucleotide
  modified_base 95: mod_base = OTHER; note = 2'-O-methyl modified nucleotide
  modified_base 96: mod_base = OTHER; note = 2'-O-methyl modified nucleotide
  modified_base 117: mod_base = OTHER; note = Nucleotide with phosphorothioate linkage
  modified_base 118: mod_base = OTHER; note = 2'-O-methyl modified nucleotide with phosphorothioate linkage
  modified_base 119: mod_base = OTHER; note = 2'-O-methyl modified nucleotide with phosphorothioate linkage
  modified_base 120: mod_base = OTHER; note = 2'-O-methyl modified nucleotide
gagaatcaaaatcggtgaatgttttagagctagaaatagcaagttaaaataaggctagtccgttatcaacttgaaaaagtggcaccgagtcggtgcgacaagtctgtctgccaccgattt

SEQ ID NO: 16120 - RNA, 119 nt, synthetic construct
  source 1..119: mol_type = other RNA
  modified_base 1: mod_base = OTHER; note = 2'-O-methyl modified nucleotide with phosphorothioate linkage
  modified_base 2: mod_base = OTHER; note = 2'-O-methyl modified nucleotide with phosphorothioate linkage
  modified_base 3: mod_base = OTHER; note = 2'-O-methyl modified nucleotide with phosphorothioate linkage
  modified_base 29: mod_base = OTHER; note = 2'-O-methyl modified nucleotide
  modified_base 30: mod_base = OTHER; note = 2'-O-methyl modified nucleotide
  modified_base 31: mod_base = OTHER; note = 2'-O-methyl modified nucleotide
  modified_base 32: mod_base = OTHER; note = 2'-O-methyl modified nucleotide
  modified_base 33: mod_base = OTHER; note = 2'-O-methyl modified nucleotide
  modified_base 34: mod_base = OTHER; note = 2'-O-methyl modified nucleotide
  modified_base 35: mod_base = OTHER; note = 2'-O-methyl modified nucleotide
  modified_base 36: mod_base = OTHER; note = 2'-O-methyl modified nucleotide
  modified_base 37: mod_base = OTHER; note = 2'-O-methyl modified nucleotide
  modified_base 38: mod_base = OTHER; note = 2'-O-methyl modified nucleotide
  modified_base 39: mod_base = OTHER; note = 2'-O-methyl modified nucleotide
  modified_base 40: mod_base = OTHER; note = 2'-O-methyl modified nucleotide
  modified_base 69: mod_base = OTHER; note = 2'-O-methyl modified nucleotide
  modified_base 70: mod_base = OTHER; note = 2'-O-methyl modified nucleotide
  modified_base 71: mod_base = OTHER; note = 2'-O-methyl modified nucleotide
  modified_base 72: mod_base = OTHER; note = 2'-O-methyl modified nucleotide
  modified_base 73: mod_base = OTHER; note = 2'-O-methyl modified nucleotide
  modified_base 74: mod_base = OTHER; note = 2'-O-methyl modified nucleotide
  modified_base 75: mod_base = OTHER; note = 2'-O-methyl modified nucleotide
  modified_base 76: mod_base = OTHER; note = 2'-O-methyl modified nucleotide
  modified_base 77: mod_base = OTHER; note = 2'-O-methyl modified nucleotide
  modified_base 78: mod_base = OTHER; note = 2'-O-methyl modified nucleotide
  modified_base 79: mod_base = OTHER; note = 2'-O-methyl modified nucleotide
  modified_base 80: mod_base = OTHER; note = 2'-O-methyl modified nucleotide
  modified_base 81: mod_base = OTHER; note = 2'-O-methyl modified nucleotide
  modified_base 82: mod_base = OTHER; note = 2'-O-methyl modified nucleotide
  modified_base 83: mod_base = OTHER; note = 2'-O-methyl modified nucleotide
  modified_base 84: mod_base = OTHER; note = 2'-O-methyl modified nucleotide
  modified_base 85: mod_base = OTHER; note = 2'-O-methyl modified nucleotide
  modified_base 86: mod_base = OTHER; note = 2'-O-methyl modified nucleotide
  modified_base 87: mod_base = OTHER; note = 2'-O-methyl modified nucleotide
  modified_base 88: mod_base = OTHER; note = 2'-O-methyl modified nucleotide
  modified_base 89: mod_base = OTHER; note = 2'-O-methyl modified nucleotide
  modified_base 90: mod_base = OTHER; note = 2'-O-methyl modified nucleotide
  modified_base 91: mod_base = OTHER; note = 2'-O-methyl modified nucleotide
  modified_base 92: mod_base = OTHER; note = 2'-O-methyl modified nucleotide
  modified_base 93: mod_base = OTHER; note = 2'-O-methyl modified nucleotide
  modified_base 94: mod_base = OTHER; note = 2'-O-methyl modified nucleotide
  modified_base 95: mod_base = OTHER; note = 2'-O-methyl modified nucleotide
  modified_base 96: mod_base = OTHER; note = 2'-O-methyl modified nucleotide
  modified_base 116: mod_base = OTHER; note = Nucleotide with phosphorothioate linkage
  modified_base 117: mod_base = OTHER; note = 2'-O-methyl modified nucleotide with phosphorothioate linkage
  modified_base 118: mod_base = OTHER; note = 2'-O-methyl modified nucleotide with phosphorothioate linkage
  modified_base 119: mod_base = OTHER; note = 2'-O-methyl modified nucleotide
gagaatcaaaatcggtgaatgttttagagctagaaatagcaagttaaaataaggctagtccgttatcaacttgaaaaagtggcaccgagtcggtgcgacaagtctgtctgccaccgatt

SEQ ID NO: 16121 - RNA, 126 nt, synthetic construct
  source 1..126: mol_type = other RNA
  modified_base 1: mod_base = OTHER; note = 2'-O-methyl modified nucleotide with phosphorothioate linkage
  modified_base 2: mod_base = OTHER; note = 2'-O-methyl modified nucleotide with phosphorothioate linkage
  modified_base 3: mod_base = OTHER; note = 2'-O-methyl modified nucleotide with phosphorothioate linkage
  modified_base 29: mod_base = OTHER; note = 2'-O-methyl modified nucleotide
  modified_base 30: mod_base = OTHER; note = 2'-O-methyl modified nucleotide
  modified_base 31: mod_base = OTHER; note = 2'-O-methyl modified nucleotide
  modified_base 32: mod_base = OTHER; note = 2'-O-methyl modified nucleotide
  modified_base 33: mod_base = OTHER; note = 2'-O-methyl modified nucleotide
  modified_base 34: mod_base = OTHER; note = 2'-O-methyl modified nucleotide
  modified_base 35: mod_base = OTHER; note = 2'-O-methyl modified nucleotide
  modified_base 36: mod_base = OTHER; note = 2'-O-methyl modified nucleotide
  modified_base 37: mod_base = OTHER; note = 2'-O-methyl modified nucleotide
  modified_base 38: mod_base = OTHER; note = 2'-O-methyl modified nucleotide
  modified_base 39: mod_base = OTHER; note = 2'-O-methyl modified nucleotide
  modified_base 40: mod_base = OTHER; note = 2'-O-methyl modified nucleotide
  modified_base 69: mod_base = OTHER; note = 2'-O-methyl modified nucleotide
  modified_base 70: mod_base = OTHER; note = 2'-O-methyl modified nucleotide
  modified_base 71: mod_base = OTHER; note = 2'-O-methyl modified nucleotide
  modified_base 72: mod_base = OTHER; note = 2'-O-methyl modified nucleotide
  modified_base 73: mod_base = OTHER; note = 2'-O-methyl modified nucleotide
  modified_base 74: mod_base = OTHER; note = 2'-O-methyl modified nucleotide
  modified_base 75: mod_base = OTHER; note = 2'-O-methyl modified nucleotide
  modified_base 76: mod_base = OTHER; note = 2'-O-methyl modified nucleotide
  modified_base 77: mod_base = OTHER; note = 2'-O-methyl modified nucleotide
  modified_base 78: mod_base = OTHER; note = 2'-O-methyl modified nucleotide
  modified_base 79: mod_base = OTHER; note = 2'-O-methyl modified nucleotide
  modified_base 80: mod_base = OTHER; note = 2'-O-methyl modified nucleotide
  modified_base 81: mod_base = OTHER; note = 2'-O-methyl modified nucleotide
  modified_base 82: mod_base = OTHER; note = 2'-O-methyl modified nucleotide
  modified_base 83: mod_base = OTHER; note = 2'-O-methyl modified nucleotide
  modified_base 84: mod_base = OTHER; note = 2'-O-methyl modified nucleotide
  modified_base 85: mod_base = OTHER; note = 2'-O-methyl modified nucleotide
  modified_base 86: mod_base = OTHER; note = 2'-O-methyl modified nucleotide
  modified_base 87: mod_base = OTHER; note = 2'-O-methyl modified nucleotide
  modified_base 88: mod_base = OTHER; note = 2'-O-methyl modified nucleotide
  modified_base 89: mod_base = OTHER; note = 2'-O-methyl modified nucleotide
  modified_base 90: mod_base = OTHER; note = 2'-O-methyl modified nucleotide
  modified_base 91: mod_base = OTHER; note = 2'-O-methyl modified nucleotide
  modified_base 92: mod_base = OTHER; note = 2'-O-methyl modified nucleotide
  modified_base 93: mod_base = OTHER; note = 2'-O-methyl modified nucleotide
  modified_base 94: mod_base = OTHER; note = 2'-O-methyl modified nucleotide
  modified_base 95: mod_base = OTHER; note = 2'-O-methyl modified nucleotide
  modified_base 96: mod_base = OTHER; note = 2'-O-methyl modified nucleotide
  modified_base 123: mod_base = OTHER; note = Nucleotide with phosphorothioate linkage
  modified_base 124: mod_base = OTHER; note = 2'-O-methyl modified nucleotide with phosphorothioate linkage
  modified_base 125: mod_base = OTHER; note = 2'-O-methyl modified nucleotide with phosphorothioate linkage
  modified_base 126: mod_base = OTHER; note = 2'-O-methyl modified nucleotide
gagaatcaaaatcggtgaatgttttagagctagaaatagcaagttaaaataaggctagtccgttatcaacttgaaaaagtggcaccgagtcggtgcgtgacaagtctgtctgccaccgattttgat

SEQ ID NO: 16122 - RNA, 125 nt, synthetic construct
  source 1..125: mol_type = other RNA
  modified_base 1: mod_base = OTHER; note = 2'-O-methyl modified nucleotide with phosphorothioate linkage
  modified_base 2: mod_base = OTHER; note = 2'-O-methyl modified nucleotide with phosphorothioate linkage
  modified_base 3: mod_base = OTHER; note = 2'-O-methyl modified nucleotide with phosphorothioate linkage
  modified_base 29: mod_base = OTHER; note = 2'-O-methyl modified nucleotide
  modified_base 30: mod_base = OTHER; note = 2'-O-methyl modified nucleotide
  modified_base 31: mod_base = OTHER; note = 2'-O-methyl modified nucleotide
  modified_base 32: mod_base = OTHER; note = 2'-O-methyl modified nucleotide
  modified_base 33: mod_base = OTHER; note = 2'-O-methyl modified nucleotide
  modified_base 34: mod_base = OTHER; note = 2'-O-methyl modified nucleotide
  modified_base 35: mod_base = OTHER; note = 2'-O-methyl modified nucleotide
  modified_base 36: mod_base = OTHER; note = 2'-O-methyl modified nucleotide
  modified_base 37: mod_base = OTHER; note = 2'-O-methyl modified nucleotide
  modified_base 38: mod_base = OTHER; note = 2'-O-methyl modified nucleotide
  modified_base 39: mod_base = OTHER; note = 2'-O-methyl modified nucleotide
  modified_base 40: mod_base = OTHER; note = 2'-O-methyl modified nucleotide
  modified_base 69: mod_base = OTHER; note = 2'-O-methyl modified nucleotide
  modified_base 70: mod_base = OTHER; note = 2'-O-methyl modified nucleotide
  modified_base 71: mod_base = OTHER; note = 2'-O-methyl modified nucleotide
  modified_base 72: mod_base = OTHER; note = 2'-O-methyl modified nucleotide
  modified_base 73: mod_base = OTHER; note = 2'-O-methyl modified nucleotide
  modified_base 74: mod_base = OTHER; note = 2'-O-methyl modified nucleotide
  modified_base 75: mod_base = OTHER; note = 2'-O-methyl modified nucleotide
  modified_base 76: mod_base = OTHER; note = 2'-O-methyl modified nucleotide
  modified_base 77: mod_base = OTHER; note = 2'-O-methyl modified nucleotide
  modified_base 78: mod_base = OTHER; note = 2'-O-methyl modified nucleotide
  modified_base 79: mod_base = OTHER; note = 2'-O-methyl modified nucleotide
  modified_base 80: mod_base = OTHER; note = 2'-O-methyl modified nucleotide
  modified_base 81: mod_base = OTHER; note = 2'-O-methyl modified nucleotide
  modified_base 82: mod_base = OTHER; note = 2'-O-methyl modified nucleotide
  modified_base 83: mod_base = OTHER; note = 2'-O-methyl modified nucleotide
  modified_base 84: mod_base = OTHER; note = 2'-O-methyl modified nucleotide
  modified_base 85: mod_base = OTHER; note = 2'-O-methyl modified nucleotide
  modified_base 86: mod_base = OTHER; note = 2'-O-methyl modified nucleotide
  modified_base 87: mod_base = OTHER; note = 2'-O-methyl modified nucleotide
  modified_base 88: mod_base = OTHER; note = 2'-O-methyl modified nucleotide
  modified_base 89: mod_base = OTHER; note = 2'-O-methyl modified nucleotide
  modified_base 90: mod_base = OTHER; note = 2'-O-methyl modified nucleotide
  modified_base 91: mod_base = OTHER; note = 2'-O-methyl modified nucleotide
  modified_base 92: mod_base = OTHER; note = 2'-O-methyl modified nucleotide
  modified_base 93: mod_base = OTHER; note = 2'-O-methyl modified nucleotide
  modified_base 94: mod_base = OTHER; note = 2'-O-methyl modified nucleotide
  modified_base 95: mod_base = OTHER; note = 2'-O-methyl modified nucleotide
  modified_base 96: mod_base = OTHER; note = 2'-O-methyl modified nucleotide
  modified_base 122: mod_base = OTHER; note = Nucleotide with phosphorothioate linkage
  modified_base 123: mod_base = OTHER; note = 2'-O-methyl modified nucleotide with phosphorothioate linkage
  modified_base 124: mod_base = OTHER; note = 2'-O-methyl modified nucleotide with phosphorothioate linkage
  modified_base 125: mod_base = OTHER; note = 2'-O-methyl modified nucleotide
gagaatcaaaatcggtgaatgttttagagctagaaatagcaagttaaaataaggctagtccgttatcaacttgaaaaagtggcaccgagtcggtgcgtgacaagtctgtctgccaccgattttga

SEQ ID NO: 16123 - RNA, 124 nt, synthetic construct
  source 1..124: mol_type = other RNA
  modified_base 1: mod_base = OTHER; note = 2'-O-methyl modified nucleotide with phosphorothioate linkage
  modified_base 2: mod_base = OTHER; note = 2'-O-methyl modified nucleotide with phosphorothioate linkage
  modified_base 3: mod_base = OTHER; note = 2'-O-methyl modified nucleotide with phosphorothioate linkage
  modified_base 29: mod_base = OTHER; note = 2'-O-methyl modified nucleotide
  modified_base 30: mod_base = OTHER; note = 2'-O-methyl modified nucleotide
  modified_base 31: mod_base = OTHER; note = 2'-O-methyl modified nucleotide
  modified_base 32: mod_base = OTHER; note = 2'-O-methyl modified nucleotide
  modified_base 33: mod_base = OTHER; note = 2'-O-methyl modified nucleotide
  modified_base 34: mod_base = OTHER; note = 2'-O-methyl modified nucleotide
  modified_base 35: mod_base = OTHER; note = 2'-O-methyl modified nucleotide
  modified_base 36: mod_base = OTHER; note = 2'-O-methyl modified nucleotide
  modified_base 37: mod_base = OTHER; note = 2'-O-methyl modified nucleotide
  modified_base 38: mod_base = OTHER; note = 2'-O-methyl modified nucleotide
  modified_base 39: mod_base = OTHER; note = 2'-O-methyl modified nucleotide
  modified_base 40: mod_base = OTHER; note = 2'-O-methyl modified nucleotide
  modified_base 69: mod_base = OTHER; note = 2'-O-methyl modified nucleotide
  modified_base 70: mod_base = OTHER; note = 2'-O-methyl modified nucleotide
  modified_base 71: mod_base = OTHER; note = 2'-O-methyl modified nucleotide
  modified_base 72: mod_base = OTHER; note = 2'-O-methyl modified nucleotide
  modified_base 73: mod_base = OTHER; note = 2'-O-methyl modified nucleotide
  modified_base 74: mod_base = OTHER; note = 2'-O-methyl modified nucleotide
  modified_base 75: mod_base = OTHER; note = 2'-O-methyl modified nucleotide
  modified_base 76: mod_base = OTHER; note = 2'-O-methyl modified nucleotide
  modified_base 77: mod_base = OTHER; note = 2'-O-methyl modified nucleotide
  modified_base 78: mod_base = OTHER; note = 2'-O-methyl modified nucleotide
  modified_base 79: mod_base = OTHER; note = 2'-O-methyl modified nucleotide
  modified_base 80: mod_base = OTHER; note = 2'-O-methyl modified nucleotide
  modified_base 81: mod_base = OTHER; note = 2'-O-methyl modified nucleotide
  modified_base 82: mod_base = OTHER; note = 2'-O-methyl modified nucleotide
  modified_base 83: mod_base = OTHER; note = 2'-O-methyl modified nucleotide
  modified_base 84: mod_base = OTHER; note = 2'-O-methyl modified nucleotide
  modified_base 85: mod_base = OTHER; note = 2'-O-methyl modified nucleotide
  modified_base 86: mod_base = OTHER; note = 2'-O-methyl modified nucleotide
  modified_base 87: mod_base = OTHER; note = 2'-O-methyl modified nucleotide
  modified_base 88: mod_base = OTHER; note = 2'-O-methyl modified nucleotide
  modified_base 89: mod_base = OTHER; note = 2'-O-methyl modified nucleotide
  modified_base 90: mod_base = OTHER; note = 2'-O-methyl modified nucleotide
  modified_base 91: mod_base = OTHER; note = 2'-O-methyl modified nucleotide
  modified_base 92: mod_base = OTHER; note = 2'-O-methyl modified nucleotide
  modified_base 93: mod_base = OTHER; note = 2'-O-methyl modified nucleotide
  modified_base 94: mod_base = OTHER; note = 2'-O-methyl modified nucleotide
  modified_base 95: mod_base = OTHER; note = 2'-O-methyl modified nucleotide
  modified_base 96: mod_base = OTHER; note = 2'-O-methyl modified nucleotide
  modified_base 121: mod_base = OTHER; note = Nucleotide with phosphorothioate linkage
  modified_base 122: mod_base = OTHER; note = 2'-O-methyl modified nucleotide with phosphorothioate linkage
  modified_base 123: mod_base = OTHER; note = 2'-O-methyl modified nucleotide with phosphorothioate linkage
  modified_base 124: mod_base = OTHER; note = 2'-O-methyl modified nucleotide
gagaatcaaaatcggtgaatgttttagagctagaaatagcaagttaaaataaggctagtccgttatcaacttgaaaaagtggcaccgagtcggtgcgtgacaagtctgtctgccaccgattttg

SEQ ID NO: 16124 - RNA, 123 nt, synthetic construct
  source 1..123: mol_type = other RNA
  modified_base 1: mod_base = OTHER; note = 2'-O-methyl modified nucleotide with phosphorothioate linkage
  modified_base 2: mod_base = OTHER; note = 2'-O-methyl modified nucleotide with phosphorothioate linkage
  modified_base 3: mod_base = OTHER; note = 2'-O-methyl modified nucleotide with phosphorothioate linkage
  modified_base 29: mod_base = OTHER; note = 2'-O-methyl modified nucleotide
  modified_base 30: mod_base = OTHER; note = 2'-O-methyl modified nucleotide
  modified_base 31: mod_base = OTHER; note = 2'-O-methyl modified nucleotide
  modified_base 32: mod_base = OTHER; note = 2'-O-methyl modified nucleotide
  modified_base 33: mod_base = OTHER; note = 2'-O-methyl modified nucleotide
  modified_base 34: mod_base = OTHER; note = 2'-O-methyl modified nucleotide
  modified_base 35: mod_base = OTHER; note = 2'-O-methyl modified nucleotide
  modified_base 36: mod_base = OTHER; note = 2'-O-methyl modified nucleotide
  modified_base 37: mod_base = OTHER; note = 2'-O-methyl modified nucleotide
  modified_base 38: mod_base = OTHER; note = 2'-O-methyl modified nucleotide
  modified_base 39: mod_base = OTHER; note = 2'-O-methyl modified nucleotide
  modified_base 40: mod_base = OTHER; note = 2'-O-methyl modified nucleotide
  modified_base 69: mod_base = OTHER; note = 2'-O-methyl modified nucleotide
  modified_base 70: mod_base = OTHER; note = 2'-O-methyl modified nucleotide
  modified_base 71: mod_base = OTHER; note = 2'-O-methyl modified nucleotide
  modified_base 72: mod_base = OTHER; note = 2'-O-methyl modified nucleotide
  modified_base 73: mod_base = OTHER; note = 2'-O-methyl modified nucleotide
  modified_base 74: mod_base = OTHER; note = 2'-O-methyl modified nucleotide
  modified_base 75: mod_base = OTHER; note = 2'-O-methyl modified nucleotide
  modified_base 76: mod_base = OTHER; note = 2'-O-methyl modified nucleotide
  modified_base 77: mod_base = OTHER; note = 2'-O-methyl modified nucleotide
  modified_base 78: mod_base = OTHER; note = 2'-O-methyl modified nucleotide
  modified_base 79: mod_base = OTHER; note = 2'-O-methyl modified nucleotide
  modified_base 80: mod_base = OTHER; note = 2'-O-methyl modified nucleotide
  modified_base 81: mod_base = OTHER; note = 2'-O-methyl modified nucleotide
  modified_base 82: mod_base = OTHER; note = 2'-O-methyl modified nucleotide
  modified_base 83: mod_base = OTHER; note = 2'-O-methyl modified nucleotide
  modified_base 84: mod_base = OTHER; note = 2'-O-methyl modified nucleotide
  modified_base 85: mod_base = OTHER; note = 2'-O-methyl modified nucleotide
  modified_base 86: mod_base = OTHER; note = 2'-O-methyl modified nucleotide
  modified_base 87: mod_base = OTHER; note = 2'-O-methyl modified nucleotide
  modified_base 88: mod_base = OTHER; note = 2'-O-methyl modified nucleotide
  modified_base 89: mod_base = OTHER; note = 2'-O-methyl modified nucleotide
  modified_base 90: mod_base = OTHER; note = 2'-O-methyl modified nucleotide
  modified_base 91: mod_base = OTHER; note = 2'-O-methyl modified nucleotide
  modified_base 92: mod_base = OTHER; note = 2'-O-methyl modified nucleotide
  modified_base 93: mod_base = OTHER; note = 2'-O-methyl modified nucleotide
  modified_base 94: mod_base = OTHER; note = 2'-O-methyl modified nucleotide
  modified_base 95: mod_base = OTHER; note = 2'-O-methyl modified nucleotide
  modified_base 96: mod_base = OTHER; note = 2'-O-methyl modified nucleotide
  modified_base 120: mod_base = OTHER; note = Nucleotide with phosphorothioate linkage
  modified_base 121: mod_base = OTHER; note = 2'-O-methyl modified nucleotide with phosphorothioate linkage
  modified_base 122: mod_base = OTHER; note = 2'-O-methyl modified nucleotide with phosphorothioate linkage
  modified_base 123: mod_base = OTHER; note = 2'-O-methyl modified nucleotide
gagaatcaaaatcggtgaatgttttagagctagaaatagcaagttaaaataaggctagtccgttatcaacttgaaaaagtggcaccgagtcggtgcgtgacaagtctgtctgccaccgatttt

SEQ ID NO: 16125 - RNA, 122 nt, synthetic construct
  source 1..122: mol_type = other RNA
  modified_base 1: mod_base = OTHER; note = 2'-O-methyl modified nucleotide with phosphorothioate linkage
  modified_base 2: mod_base = OTHER; note = 2'-O-methyl modified nucleotide with phosphorothioate linkage
  modified_base 3: mod_base = OTHER; note = 2'-O-methyl modified nucleotide with phosphorothioate linkage
  modified_base 29: mod_base = OTHER; note = 2'-O-methyl modified nucleotide
  modified_base 30: mod_base = OTHER; note = 2'-O-methyl modified nucleotide
  modified_base 31: mod_base = OTHER; note = 2'-O-methyl modified nucleotide
  modified_base 32: mod_base = OTHER; note = 2'-O-methyl modified nucleotide
  modified_base 33: mod_base = OTHER; note = 2'-O-methyl modified nucleotide
  modified_base 34: mod_base = OTHER; note = 2'-O-methyl modified nucleotide
  modified_base 35: mod_base = OTHER; note = 2'-O-methyl modified nucleotide
  modified_base 36: mod_base = OTHER; note = 2'-O-methyl modified nucleotide
  modified_base 37: mod_base = OTHER; note = 2'-O-methyl modified nucleotide
  modified_base 38: mod_base = OTHER; note = 2'-O-methyl modified nucleotide
  modified_base 39: mod_base = OTHER; note = 2'-O-methyl modified nucleotide
  modified_base 40: mod_base = OTHER; note = 2'-O-methyl modified nucleotide
  modified_base 69: mod_base = OTHER; note = 2'-O-methyl modified nucleotide
  modified_base 70: mod_base = OTHER; note = 2'-O-methyl modified nucleotide
  modified_base 71: mod_base = OTHER; note = 2'-O-methyl modified nucleotide
  modified_base 72: mod_base = OTHER; note = 2'-O-methyl modified nucleotide
  modified_base 73: mod_base = OTHER; note = 2'-O-methyl modified nucleotide
  modified_base 74: mod_base = OTHER; note = 2'-O-methyl modified nucleotide
  modified_base 75: mod_base = OTHER; note = 2'-O-methyl modified nucleotide
  modified_base 76: mod_base = OTHER; note = 2'-O-methyl modified nucleotide
  modified_base 77: mod_base = OTHER; note = 2'-O-methyl modified nucleotide
  modified_base 78: mod_base = OTHER; note = 2'-O-methyl modified nucleotide
  modified_base 79: mod_base = OTHER; note = 2'-O-methyl modified nucleotide
  modified_base 80: mod_base = OTHER; note = 2'-O-methyl modified nucleotide
  modified_base 81: mod_base = OTHER; note = 2'-O-methyl modified nucleotide
  modified_base 82: mod_base = OTHER; note = 2'-O-methyl modified nucleotide
  modified_base 83: mod_base = OTHER; note = 2'-O-methyl modified nucleotide
  modified_base 84: mod_base = OTHER; note = 2'-O-methyl modified nucleotide
  modified_base 85: mod_base = OTHER; note = 2'-O-methyl modified nucleotide
  modified_base 86: mod_base = OTHER; note = 2'-O-methyl modified nucleotide
  modified_base 87: mod_base = OTHER; note = 2'-O-methyl modified nucleotide
  modified_base 88: mod_base = OTHER; note = 2'-O-methyl modified nucleotide
  modified_base 89: mod_base = OTHER; note = 2'-O-methyl modified nucleotide
  modified_base 90: mod_base = OTHER; note = 2'-O-methyl modified nucleotide
  modified_base 91: mod_base = OTHER; note = 2'-O-methyl modified nucleotide
  modified_base 92: mod_base = OTHER; note = 2'-O-methyl modified nucleotide
  modified_base 93: mod_base = OTHER; note = 2'-O-methyl modified nucleotide
  modified_base 94: mod_base = OTHER; note = 2'-O-methyl modified nucleotide
  modified_base 95: mod_base = OTHER; note = 2'-O-methyl modified nucleotide
  modified_base 96: mod_base = OTHER; note = 2'-O-methyl modified nucleotide
  modified_base 119: mod_base = OTHER; note = Nucleotide with phosphorothioate linkage
  modified_base 120: mod_base = OTHER; note = 2'-O-methyl modified nucleotide with phosphorothioate linkage
  modified_base 121: mod_base = OTHER; note = 2'-O-methyl modified nucleotide with phosphorothioate linkage
  modified_base 122: mod_base = OTHER; note = 2'-O-methyl modified nucleotide
gagaatcaaaatcggtgaatgttttagagctagaaatagcaagttaaaataaggctagtccgttatcaacttgaaaaagtggcaccgagtcggtgcgtgacaagtctgtctgccaccgattt

SEQ ID NO: 16126 - RNA, 121 nt, synthetic construct
  source 1..121: mol_type = other RNA
  modified_base 1: mod_base = OTHER; note = 2'-O-methyl modified nucleotide with phosphorothioate linkage
  modified_base 2: mod_base = OTHER; note = 2'-O-methyl modified nucleotide with phosphorothioate linkage
  modified_base 3: mod_base = OTHER; note = 2'-O-methyl modified nucleotide with phosphorothioate linkage
  modified_base 29: mod_base = OTHER; note = 2'-O-methyl modified nucleotide
  modified_base 30: mod_base = OTHER; note = 2'-O-methyl modified nucleotide
  modified_base 31: mod_base = OTHER; note = 2'-O-methyl modified nucleotide
  modified_base 32: mod_base = OTHER; note = 2'-O-methyl modified nucleotide
  modified_base 33: mod_base = OTHER; note = 2'-O-methyl modified nucleotide
  modified_base 34: mod_base = OTHER; note = 2'-O-methyl modified nucleotide
  modified_base 35: mod_base = OTHER; note = 2'-O-methyl modified nucleotide
  modified_base 36: mod_base = OTHER; note = 2'-O-methyl modified nucleotide
  modified_base 37: mod_base = OTHER; note = 2'-O-methyl modified nucleotide
  modified_base 38: mod_base = OTHER; note = 2'-O-methyl modified nucleotide
  modified_base 39: mod_base = OTHER; note = 2'-O-methyl modified nucleotide
  modified_base 40: mod_base = OTHER; note = 2'-O-methyl modified nucleotide
  modified_base 69: mod_base = OTHER; note = 2'-O-methyl modified nucleotide
  modified_base 70: mod_base = OTHER; note = 2'-O-methyl modified nucleotide
  modified_base 71: mod_base = OTHER; note = 2'-O-methyl modified nucleotide
  modified_base 72: mod_base = OTHER; note = 2'-O-methyl modified nucleotide
  modified_base 73: mod_base = OTHER; note = 2'-O-methyl modified nucleotide
  modified_base 74: mod_base = OTHER; note = 2'-O-methyl modified nucleotide
  modified_base 75: mod_base = OTHER; note = 2'-O-methyl modified nucleotide
  modified_base 76: mod_base = OTHER; note = 2'-O-methyl modified nucleotide
  modified_base 77: mod_base = OTHER; note = 2'-O-methyl modified nucleotide
  modified_base 78: mod_base = OTHER; note = 2'-O-methyl modified nucleotide
  modified_base 79: mod_base = OTHER; note = 2'-O-methyl modified nucleotide
  modified_base 80: mod_base = OTHER; note = 2'-O-methyl modified nucleotide
  modified_base 81: mod_base = OTHER; note = 2'-O-methyl modified nucleotide
  modified_base 82: mod_base = OTHER; note = 2'-O-methyl modified nucleotide
  modified_base 83: mod_base = OTHER; note = 2'-O-methyl modified nucleotide
  modified_base 84: mod_base = OTHER; note = 2'-O-methyl modified nucleotide
  modified_base 85: mod_base = OTHER; note = 2'-O-methyl modified nucleotide
  modified_base 86: mod_base = OTHER; note = 2'-O-methyl modified nucleotide
  modified_base 87: mod_base = OTHER; note = 2'-O-methyl modified nucleotide
  modified_base 88: mod_base = OTHER; note = 2'-O-methyl modified nucleotide
  modified_base 89: mod_base = OTHER; note = 2'-O-methyl modified nucleotide
  modified_base 90: mod_base = OTHER; note = 2'-O-methyl modified nucleotide
  modified_base 91: mod_base = OTHER; note = 2'-O-methyl modified nucleotide
  modified_base 92: mod_base = OTHER; note = 2'-O-methyl modified nucleotide
  modified_base 93: mod_base = OTHER; note = 2'-O-methyl modified nucleotide
  modified_base 94: mod_base = OTHER; note = 2'-O-methyl modified nucleotide
  modified_base 95: mod_base = OTHER; note = 2'-O-methyl modified nucleotide
  modified_base 96: mod_base = OTHER; note = 2'-O-methyl modified nucleotide
  modified_base 118: mod_base = OTHER; note = Nucleotide with phosphorothioate linkage
  modified_base 119: mod_base = OTHER; note = 2'-O-methyl modified nucleotide with phosphorothioate linkage
  modified_base 120: mod_base = OTHER; note = 2'-O-methyl modified nucleotide with phosphorothioate linkage
  modified_base 121: mod_base = OTHER; note = 2'-O-methyl modified nucleotide
gagaatcaaaatcggtgaatgttttagagctagaaatagcaagttaaaataaggctagtccgttatcaacttgaaaaagtggcaccgagtcggtgcgtgacaagtctgtctgccaccgatt

SEQ ID NO: 16127 - RNA, 114 nt, synthetic construct
  source 1..114: mol_type = other RNA
  modified_base 1: mod_base = OTHER; note = 2'-O-methyl modified nucleotide with phosphorothioate linkage
  modified_base 2: mod_base = OTHER; note = 2'-O-methyl modified nucleotide with phosphorothioate linkage
  modified_base 3: mod_base = OTHER; note = 2'-O-methyl modified nucleotide with phosphorothioate linkage
  modified_base 29: mod_base = OTHER; note = 2'-O-methyl modified nucleotide
  modified_base 30: mod_base = OTHER; note = 2'-O-methyl modified nucleotide
  modified_base 31: mod_base = OTHER; note = 2'-O-methyl modified nucleotide
  modified_base 32: mod_base = OTHER; note = 2'-O-methyl modified nucleotide
  modified_base 33: mod_base = OTHER; note = 2'-O-methyl modified nucleotide
  modified_base 34: mod_base = OTHER; note = 2'-O-methyl modified nucleotide
  modified_base 35: mod_base = OTHER; note = 2'-O-methyl modified nucleotide
  modified_base 36: mod_base = OTHER; note = 2'-O-methyl modified nucleotide
  modified_base 37: mod_base = OTHER; note = 2'-O-methyl modified nucleotide
  modified_base 38: mod_base = OTHER; note = 2'-O-methyl modified nucleotide
  modified_base 39: mod_base = OTHER; note = 2'-O-methyl modified nucleotide
  modified_base 40: mod_base = OTHER; note = 2'-O-methyl modified nucleotide
  modified_base 69: mod_base = OTHER; note = 2'-O-methyl modified nucleotide
  modified_base 70: mod_base = OTHER; note = 2'-O-methyl modified nucleotide
  modified_base 71: mod_base = OTHER; note = 2'-O-methyl modified nucleotide
  modified_base 72: mod_base = OTHER; note = 2'-O-methyl modified nucleotide
  modified_base 73: mod_base = OTHER; note = 2'-O-methyl modified nucleotide
  modified_base 74: mod_base = OTHER; note = 2'-O-methyl modified nucleotide
  modified_base 75: mod_base = OTHER; note = 2'-O-methyl modified nucleotide
  modified_base 76: mod_base = OTHER; note = 2'-O-methyl modified nucleotide
  modified_base 77: mod_base = OTHER; note = 2'-O-methyl modified nucleotide
  modified_base 78: mod_base = OTHER; note = 2'-O-methyl modified nucleotide
  modified_base 79: mod_base = OTHER; note = 2'-O-methyl modified nucleotide
  modified_base 80: mod_base = OTHER; note = 2'-O-methyl modified nucleotide
  modified_base 81: mod_base = OTHER; note = 2'-O-methyl modified nucleotide
  modified_base 82: mod_base = OTHER; note = 2'-O-methyl modified nucleotide
  modified_base 83: mod_base = OTHER; note = 2'-O-methyl modified nucleotide
  modified_base 84: mod_base = OTHER; note = 2'-O-methyl modified nucleotide
  modified_base 85: mod_base = OTHER; note = 2'-O-methyl modified nucleotide
  modified_base 86: mod_base = OTHER; note = 2'-O-methyl modified nucleotide
  modified_base 87: mod_base = OTHER; note = 2'-O-methyl modified nucleotide
  modified_base 88: mod_base = OTHER; note = 2'-O-methyl modified nucleotide
  modified_base 89: mod_base = OTHER; note = 2'-O-methyl modified nucleotide
  modified_base 90: mod_base = OTHER; note = 2'-O-methyl modified nucleotide
  modified_base 91: mod_base = OTHER; note = 2'-O-methyl modified nucleotide
  modified_base 92: mod_base = OTHER; note = 2'-O-methyl modified nucleotide
  modified_base 93: mod_base = OTHER; note = 2'-O-methyl modified nucleotide
  modified_base 94: mod_base = OTHER; note = 2'-O-methyl modified nucleotide
  modified_base 95: mod_base = OTHER; note = 2'-O-methyl modified nucleotide
  modified_base 96: mod_base = OTHER; note = 2'-O-methyl modified nucleotide
  modified_base 111: mod_base = OTHER; note = Nucleotide with phosphorothioate linkage
  modified_base 112: mod_base = OTHER; note = 2'-O-methyl modified nucleotide with phosphorothioate linkage
  modified_base 113: mod_base = OTHER; note = 2'-O-methyl modified nucleotide with phosphorothioate linkage
  modified_base 114: mod_base = OTHER; note = 2'-O-methyl modified nucleotide
gagaatcaaaatcggtgaatgttttagagctagaaatagcaagttaaaataaggctagtccgttatcaacttgaaaaagtggcaccgagtcggtgctgtctcaccgattttgat

SEQ ID NO: 16128 - RNA, 113 nt, synthetic construct
  source 1..113: mol_type = other RNA
  modified_base 1: mod_base = OTHER; note = 2'-O-methyl modified nucleotide with phosphorothioate linkage
  modified_base 2: mod_base = OTHER; note = 2'-O-methyl modified nucleotide with phosphorothioate linkage
  modified_base 3: mod_base = OTHER; note = 2'-O-methyl modified nucleotide with phosphorothioate linkage
  modified_base 29: mod_base = OTHER; note = 2'-O-methyl modified nucleotide
  modified_base 30: mod_base = OTHER; note = 2'-O-methyl modified nucleotide
  modified_base 31: mod_base = OTHER; note = 2'-O-methyl modified nucleotide
  modified_base 32: mod_base = OTHER; note = 2'-O-methyl modified nucleotide
  modified_base 33: mod_base = OTHER; note = 2'-O-methyl modified nucleotide
  modified_base 34: mod_base = OTHER; note = 2'-O-methyl modified nucleotide
  modified_base 35: mod_base = OTHER; note = 2'-O-methyl modified nucleotide
  modified_base 36: mod_base = OTHER; note = 2'-O-methyl modified nucleotide
  modified_base 37: mod_base = OTHER; note = 2'-O-methyl modified nucleotide
  modified_base 38: mod_base = OTHER; note = 2'-O-methyl modified nucleotide
  modified_base 39: mod_base = OTHER; note = 2'-O-methyl modified nucleotide
  modified_base 40: mod_base = OTHER; note = 2'-O-methyl modified nucleotide
  modified_base 69: mod_base = OTHER; note = 2'-O-methyl modified nucleotide
  modified_base 70: mod_base = OTHER; note = 2'-O-methyl modified nucleotide
  modified_base 71: mod_base = OTHER; note = 2'-O-methyl modified nucleotide
  modified_base 72: mod_base = OTHER; note = 2'-O-methyl modified nucleotide
  modified_base 73: mod_base = OTHER; note = 2'-O-methyl modified nucleotide
  modified_base 74: mod_base = OTHER; note = 2'-O-methyl modified nucleotide
  modified_base 75: mod_base = OTHER; note = 2'-O-methyl modified nucleotide
  modified_base 76: mod_base = OTHER; note = 2'-O-methyl modified nucleotide
  modified_base 77: mod_base = OTHER; note = 2'-O-methyl modified nucleotide
  modified_base 78: mod_base = OTHER; note = 2'-O-methyl modified nucleotide
  modified_base 79: mod_base = OTHER; note = 2'-O-methyl modified nucleotide
  modified_base 80: mod_base = OTHER; note = 2'-O-methyl modified nucleotide
  modified_base 81: mod_base = OTHER; note = 2'-O-methyl modified nucleotide
  modified_base 82: mod_base = OTHER; note = 2'-O-methyl modified nucleotide
  modified_base 83: mod_base = OTHER; note = 2'-O-methyl modified nucleotide
  modified_base 84: mod_base = OTHER; note = 2'-O-methyl modified nucleotide
  modified_base 85: mod_base = OTHER; note = 2'-O-methyl modified nucleotide
  modified_base 86: mod_base = OTHER; note = 2'-O-methyl modified nucleotide
  modified_base 87: mod_base = OTHER; note = 2'-O-methyl modified nucleotide
  modified_base 88: mod_base = OTHER; note = 2'-O-methyl modified nucleotide
  modified_base 89: mod_base = OTHER; note = 2'-O-methyl modified nucleotide
  modified_base 90: mod_base = OTHER; note = 2'-O-methyl modified nucleotide
  modified_base 91: mod_base = OTHER; note = 2'-O-methyl modified nucleotide
  modified_base 92: mod_base = OTHER; note = 2'-O-methyl modified nucleotide
  modified_base 93: mod_base = OTHER; note = 2'-O-methyl modified nucleotide
  modified_base 94: mod_base = OTHER; note = 2'-O-methyl modified nucleotide
  modified_base 95: mod_base = OTHER; note = 2'-O-methyl modified nucleotide
  modified_base 96: mod_base = OTHER; note = 2'-O-methyl modified nucleotide
  modified_base 110: mod_base = OTHER; note = Nucleotide with phosphorothioate linkage
  modified_base 111: mod_base = OTHER; note = 2'-O-methyl modified nucleotide with phosphorothioate linkage
  modified_base 112: mod_base = OTHER; note = 2'-O-methyl modified nucleotide with phosphorothioate linkage
  modified_base 113: mod_base = OTHER; note = 2'-O-methyl modified nucleotide
gagaatcaaaatcggtgaatgttttagagctagaaatagcaagttaaaataaggctagtccgttatcaacttgaaaaagtggcaccgagtcggtgctgtctcaccgattttga

SEQ ID NO: 16129 - RNA, 112 nt, synthetic construct
  source 1..112: mol_type = other RNA
  modified_base 1: mod_base = OTHER; note = 2'-O-methyl modified nucleotide with phosphorothioate linkage
  modified_base 2: mod_base = OTHER; note = 2'-O-methyl modified nucleotide with phosphorothioate linkage
  modified_base 3: mod_base = OTHER; note = 2'-O-methyl modified nucleotide with phosphorothioate linkage
  modified_base 29: mod_base = OTHER; note = 2'-O-methyl modified nucleotide
  modified_base 30: mod_base = OTHER; note = 2'-O-methyl modified nucleotide
  modified_base 31: mod_base = OTHER; note = 2'-O-methyl modified nucleotide
  modified_base 32: mod_base = OTHER; note = 2'-O-methyl modified nucleotide
  modified_base 33: mod_base = OTHER; note = 2'-O-methyl modified nucleotide
  modified_base 34: mod_base = OTHER; note = 2'-O-methyl modified nucleotide
  modified_base 35: mod_base = OTHER; note = 2'-O-methyl modified nucleotide
  modified_base 36: mod_base = OTHER; note = 2'-O-methyl modified nucleotide
  modified_base 37: mod_base = OTHER; note = 2'-O-methyl modified nucleotide
  modified_base 38: mod_base = OTHER; note = 2'-O-methyl modified nucleotide
  modified_base 39: mod_base = OTHER; note = 2'-O-methyl modified nucleotide
  modified_base 40: mod_base = OTHER; note = 2'-O-methyl modified nucleotide
  modified_base 69: mod_base = OTHER; note = 2'-O-methyl modified nucleotide
  modified_base 70: mod_base = OTHER; note = 2'-O-methyl modified nucleotide
  modified_base 71: mod_base = OTHER; note = 2'-O-methyl modified nucleotide
  modified_base 72: mod_base = OTHER; note = 2'-O-methyl modified nucleotide
  modified_base 73: mod_base = OTHER; note = 2'-O-methyl modified nucleotide
  modified_base 74: mod_base = OTHER; note = 2'-O-methyl modified nucleotide
  modified_base 75: mod_base = OTHER; note = 2'-O-methyl modified nucleotide
  modified_base 76: mod_base = OTHER; note = 2'-O-methyl modified nucleotide
  modified_base 77: mod_base = OTHER; note = 2'-O-methyl modified nucleotide
  modified_base 78: mod_base = OTHER; note = 2'-O-methyl modified nucleotide
  modified_base 79: mod_base = OTHER; note = 2'-O-methyl modified nucleotide
  modified_base 80: mod_base = OTHER; note = 2'-O-methyl modified nucleotide
  modified_base 81: mod_base = OTHER; note = 2'-O-methyl modified nucleotide
  modified_base 82: mod_base = OTHER; note = 2'-O-methyl modified nucleotide
  modified_base 83: mod_base = OTHER; note = 2'-O-methyl modified nucleotide
  modified_base 84: mod_base = OTHER; note = 2'-O-methyl modified nucleotide
  modified_base 85: mod_base = OTHER; note = 2'-O-methyl modified nucleotide
  modified_base 86: mod_base = OTHER; note = 2'-O-methyl modified nucleotide
  modified_base 87: mod_base = OTHER; note = 2'-O-methyl modified nucleotide
  modified_base 88: mod_base = OTHER; note = 2'-O-methyl modified nucleotide
  modified_base 89: mod_base = OTHER; note = 2'-O-methyl modified nucleotide
  modified_base 90: mod_base = OTHER; note = 2'-O-methyl modified nucleotide
  modified_base 91: mod_base = OTHER; note = 2'-O-methyl modified nucleotide
  modified_base 92: mod_base = OTHER; note = 2'-O-methyl modified nucleotide
  modified_base 93: mod_base = OTHER; note = 2'-O-methyl modified nucleotide
  modified_base 94: mod_base = OTHER; note = 2'-O-methyl modified nucleotide
  modified_base 95: mod_base = OTHER; note = 2'-O-methyl modified nucleotide
  modified_base 96: mod_base = OTHER; note = 2'-O-methyl modified nucleotide
  modified_base 109: mod_base = OTHER; note = Nucleotide with phosphorothioate linkage
  modified_base 110: mod_base = OTHER; note = 2'-O-methyl modified nucleotide with phosphorothioate linkage
  modified_base 111: mod_base = OTHER; note = 2'-O-methyl modified nucleotide with phosphorothioate linkage
  modified_base 112: mod_base = OTHER; note = 2'-O-methyl modified nucleotide
gagaatcaaaatcggtgaatgttttagagctagaaatagcaagttaaaataaggctagtccgttatcaacttgaaaaagtggcaccgagtcggtgctgtctcaccgattttg

SEQ ID NO: 16130 - RNA, 111 nt, synthetic construct
  source 1..111: mol_type = other RNA
  modified_base 1: mod_base = OTHER; note = 2'-O-methyl modified nucleotide with phosphorothioate linkage
  modified_base 2: mod_base = OTHER; note = 2'-O-methyl modified nucleotide with phosphorothioate linkage
  modified_base 3: mod_base = OTHER; note = 2'-O-methyl modified nucleotide with phosphorothioate linkage
  modified_base 29: mod_base = OTHER; note = 2'-O-methyl modified nucleotide
  modified_base 30: mod_base = OTHER; note = 2'-O-methyl modified nucleotide
  modified_base 31: mod_base = OTHER; note = 2'-O-methyl modified nucleotide
  modified_base 32: mod_base = OTHER; note = 2'-O-methyl modified nucleotide
  modified_base 33: mod_base = OTHER; note = 2'-O-methyl modified nucleotide
  modified_base 34: mod_base = OTHER; note = 2'-O-methyl modified nucleotide
  modified_base 35: mod_base = OTHER; note = 2'-O-methyl modified nucleotide
  modified_base 36: mod_base = OTHER; note = 2'-O-methyl modified nucleotide
  modified_base 37: mod_base = OTHER; note = 2'-O-methyl modified nucleotide
  modified_base 38: mod_base = OTHER; note = 2'-O-methyl modified nucleotide
  modified_base 39: mod_base = OTHER; note = 2'-O-methyl modified nucleotide
  modified_base 40: mod_base = OTHER; note = 2'-O-methyl modified nucleotide
  modified_base 69: mod_base = OTHER; note = 2'-O-methyl modified nucleotide
  modified_base 70: mod_base = OTHER; note = 2'-O-methyl modified nucleotide
  modified_base 71: mod_base = OTHER; note = 2'-O-methyl modified nucleotide
  modified_base 72: mod_base = OTHER; note = 2'-O-methyl modified nucleotide
  modified_base 73: mod_base = OTHER; note = 2'-O-methyl modified nucleotide
  modified_base 74: mod_base = OTHER; note = 2'-O-methyl modified nucleotide
  modified_base 75: mod_base = OTHER; note = 2'-O-methyl modified nucleotide
  modified_base 76: mod_base = OTHER; note = 2'-O-methyl modified nucleotide
  modified_base 77: mod_base = OTHER; note = 2'-O-methyl modified nucleotide
  modified_base 78: mod_base = OTHER; note = 2'-O-methyl modified nucleotide
  modified_base 79: mod_base = OTHER; note = 2'-O-methyl modified nucleotide
  modified_base 80: mod_base = OTHER; note = 2'-O-methyl modified nucleotide
  modified_base 81: mod_base = OTHER; note = 2'-O-methyl modified nucleotide
  modified_base 82: mod_base = OTHER; note = 2'-O-methyl modified nucleotide
  modified_base 83: mod_base = OTHER; note = 2'-O-methyl modified nucleotide
  modified_base 84: mod_base = OTHER; note = 2'-O-methyl modified nucleotide
  modified_base 85: mod_base = OTHER; note = 2'-O-methyl modified nucleotide
  modified_base 86: mod_base = OTHER; note = 2'-O-methyl modified nucleotide
  modified_base 87: mod_base = OTHER; note = 2'-O-methyl modified nucleotide
  modified_base 88: mod_base = OTHER; note = 2'-O-methyl modified nucleotide
  modified_base 89: mod_base = OTHER; note = 2'-O-methyl modified nucleotide
  modified_base 90: mod_base = OTHER; note = 2'-O-methyl modified nucleotide
  modified_base 91: mod_base = OTHER; note = 2'-O-methyl modified nucleotide
  modified_base 92: mod_base = OTHER; note = 2'-O-methyl modified nucleotide
  modified_base 93: mod_base = OTHER; note = 2'-O-methyl modified nucleotide
  modified_base 94: mod_base = OTHER; note = 2'-O-methyl modified nucleotide
  modified_base 95: mod_base = OTHER; note = 2'-O-methyl modified nucleotide
  modified_base 96: mod_base = OTHER; note = 2'-O-methyl modified nucleotide
  modified_base 108: mod_base = OTHER; note = Nucleotide with phosphorothioate linkage
  modified_base 109: mod_base = OTHER; note = 2'-O-methyl modified nucleotide with phosphorothioate linkage
  modified_base 110: mod_base = OTHER; note = 2'-O-methyl modified nucleotide with phosphorothioate linkage
  modified_base 111: mod_base = OTHER; note = 2'-O-methyl modified nucleotide
gagaatcaaaatcggtgaatgttttagagctagaaatagcaagttaaaataaggctagtccgttatcaacttgaaaaagtggcaccgagtcggtgctgtctcaccgatttt

SEQ ID NO: 16131 - RNA, 110 nt, synthetic construct
  source 1..110: mol_type = other RNA
  modified_base 1: mod_base = OTHER; note = 2'-O-methyl modified nucleotide with phosphorothioate linkage
  modified_base 2: mod_base = OTHER; note = 2'-O-methyl modified nucleotide with phosphorothioate linkage
  modified_base 3: mod_base = OTHER; note = 2'-O-methyl modified nucleotide with phosphorothioate linkage
  modified_base 29: mod_base = OTHER; note = 2'-O-methyl modified nucleotide
  modified_base 30: mod_base = OTHER; note = 2'-O-methyl modified nucleotide
  modified_base 31: mod_base = OTHER; note = 2'-O-methyl modified nucleotide
  modified_base 32: mod_base = OTHER; note = 2'-O-methyl modified nucleotide
  modified_base 33: mod_base = OTHER; note = 2'-O-methyl modified nucleotide
  modified_base 34: mod_base = OTHER; note = 2'-O-methyl modified nucleotide
  modified_base 35: mod_base = OTHER; note = 2'-O-methyl modified nucleotide
  modified_base 36: mod_base = OTHER; note = 2'-O-methyl modified nucleotide
  modified_base 37: mod_base = OTHER; note = 2'-O-methyl modified nucleotide
  modified_base 38: mod_base = OTHER; note = 2'-O-methyl modified nucleotide
  modified_base 39: mod_base = OTHER; note = 2'-O-methyl modified nucleotide
  modified_base 40: mod_base = OTHER; note = 2'-O-methyl modified nucleotide
  modified_base 69: mod_base = OTHER; note = 2'-O-methyl modified nucleotide
  modified_base 70: mod_base = OTHER; note = 2'-O-methyl modified nucleotide
  modified_base 71: mod_base = OTHER; note = 2'-O-methyl modified nucleotide
  modified_base 72: mod_base = OTHER; note = 2'-O-methyl modified nucleotide
  modified_base 73: mod_base = OTHER; note = 2'-O-methyl modified nucleotide
  modified_base 74: mod_base = OTHER; note = 2'-O-methyl modified nucleotide
  modified_base 75: mod_base = OTHER; note = 2'-O-methyl modified nucleotide
  modified_base 76: mod_base = OTHER; note = 2'-O-methyl modified nucleotide
  modified_base 77: mod_base = OTHER; note = 2'-O-methyl modified nucleotide
  modified_base 78: mod_base = OTHER; note = 2'-O-methyl modified nucleotide
  modified_base 79: mod_base = OTHER; note = 2'-O-methyl modified nucleotide
  modified_base 80: mod_base = OTHER; note = 2'-O-methyl modified nucleotide
  modified_base 81: mod_base = OTHER; note = 2'-O-methyl modified nucleotide
  modified_base 82: mod_base = OTHER; note = 2'-O-methyl modified nucleotide
  modified_base 83: mod_base = OTHER; note = 2'-O-methyl modified nucleotide
  modified_base 84: mod_base = OTHER; note = 2'-O-methyl modified nucleotide
  modified_base 85: mod_base = OTHER; note = 2'-O-methyl modified nucleotide
  modified_base 86: mod_base = OTHER; note = 2'-O-methyl modified nucleotide
  modified_base 87: mod_base = OTHER; note = 2'-O-methyl modified nucleotide
  modified_base 88: mod_base = OTHER; note = 2'-O-methyl modified nucleotide
  modified_base 89: mod_base = OTHER; note = 2'-O-methyl modified nucleotide
  modified_base 90: mod_base = OTHER; note = 2'-O-methyl modified nucleotide
  modified_base 91: mod_base = OTHER; note = 2'-O-methyl modified nucleotide
  modified_base 92: mod_base = OTHER; note = 2'-O-methyl modified nucleotide
  modified_base 93: mod_base = OTHER; note = 2'-O-methyl modified nucleotide
  modified_base 94: mod_base = OTHER; note = 2'-O-methyl modified nucleotide
  modified_base 95: mod_base = OTHER; note = 2'-O-methyl modified nucleotide
  modified_base 96: mod_base = OTHER; note = 2'-O-methyl modified nucleotide
  modified_base 107: mod_base = OTHER; note = Nucleotide with phosphorothioate linkage
  modified_base 108: mod_base = OTHER; note = 2'-O-methyl modified nucleotide with phosphorothioate linkage
  modified_base 109: mod_base = OTHER; note = 2'-O-methyl modified nucleotide with phosphorothioate linkage
  modified_base 110: mod_base = OTHER; note = 2'-O-methyl modified nucleotide
gagaatcaaaatcggtgaatgttttagagctagaaatagcaagttaaaataaggctagtccgttatcaacttgaaaaagtggcaccgagtcggtgctgtctcaccgattt

SEQ ID NO: 16132 - RNA, 109 nt, synthetic construct
  source 1..109: mol_type = other RNA
  modified_base 1: mod_base = OTHER; note = 2'-O-methyl modified nucleotide with phosphorothioate linkage
  modified_base 2: mod_base = OTHER; note = 2'-O-methyl modified nucleotide with phosphorothioate linkage
  modified_base 3: mod_base = OTHER; note = 2'-O-methyl modified nucleotide with phosphorothioate linkage
  modified_base 29: mod_base = OTHER; note = 2'-O-methyl modified nucleotide
  modified_base 30: mod_base = OTHER; note = 2'-O-methyl modified nucleotide
  modified_base 31: mod_base = OTHER; note = 2'-O-methyl modified nucleotide
  modified_base 32: mod_base = OTHER; note = 2'-O-methyl modified nucleotide
  modified_base 33: mod_base = OTHER; note = 2'-O-methyl modified nucleotide
  modified_base 34: mod_base = OTHER; note = 2'-O-methyl modified nucleotide
  modified_base 35: mod_base = OTHER; note = 2'-O-methyl modified nucleotide
  modified_base 36: mod_base = OTHER; note = 2'-O-methyl modified nucleotide
  modified_base 37: mod_base = OTHER; note = 2'-O-methyl modified nucleotide
  modified_base 38: mod_base = OTHER; note = 2'-O-methyl modified nucleotide
  modified_base 39: mod_base = OTHER; note = 2'-O-methyl modified nucleotide
  modified_base 40: mod_base = OTHER; note = 2'-O-methyl modified nucleotide
  modified_base 69: mod_base = OTHER; note = 2'-O-methyl modified nucleotide
  modified_base 70: mod_base = OTHER; note = 2'-O-methyl modified nucleotide
  modified_base 71: mod_base = OTHER; note = 2'-O-methyl modified nucleotide
  modified_base 72: mod_base = OTHER; note = 2'-O-methyl modified nucleotide
  modified_base 73: mod_base = OTHER; note = 2'-O-methyl modified nucleotide
  modified_base 74: mod_base = OTHER; note = 2'-O-methyl modified nucleotide
  modified_base 75: mod_base = OTHER; note = 2'-O-methyl modified nucleotide
  modified_base 76: mod_base = OTHER; note = 2'-O-methyl modified nucleotide
  modified_base 77: mod_base = OTHER; note = 2'-O-methyl modified nucleotide
  modified_base 78: mod_base = OTHER; note = 2'-O-methyl modified nucleotide
  modified_base 79: mod_base = OTHER; note = 2'-O-methyl modified nucleotide
  modified_base 80: mod_base = OTHER; note = 2'-O-methyl modified nucleotide
  modified_base 81: mod_base = OTHER; note = 2'-O-methyl modified nucleotide
  modified_base 82: mod_base = OTHER; note = 2'-O-methyl modified nucleotide
  modified_base 83: mod_base = OTHER; note = 2'-O-methyl modified nucleotide
  modified_base 84: mod_base = OTHER; note = 2'-O-methyl modified nucleotide
  modified_base 85: mod_base = OTHER; note = 2'-O-methyl modified nucleotide
  modified_base 86: mod_base = OTHER; note = 2'-O-methyl modified nucleotide
  modified_base 87: mod_base = OTHER; note = 2'-O-methyl modified nucleotide
  modified_base 88: mod_base = OTHER; note = 2'-O-methyl modified nucleotide
  modified_base 89: mod_base = OTHER; note = 2'-O-methyl modified nucleotide
  modified_base 90: mod_base = OTHER; note = 2'-O-methyl modified nucleotide
  modified_base 91: mod_base = OTHER; note = 2'-O-methyl modified nucleotide
  modified_base 92: mod_base = OTHER; note = 2'-O-methyl modified nucleotide
  modified_base 93: mod_base = OTHER; note = 2'-O-methyl modified nucleotide
  modified_base 94: mod_base = OTHER; note = 2'-O-methyl modified nucleotide
  modified_base 95: mod_base = OTHER; note = 2'-O-methyl modified nucleotide
  modified_base 96: mod_base = OTHER; note = 2'-O-methyl modified nucleotide
  modified_base 106: mod_base = OTHER; note = Nucleotide with phosphorothioate linkage
  modified_base 107: mod_base = OTHER; note = 2'-O-methyl modified nucleotide with phosphorothioate linkage
  modified_base 108: mod_base = OTHER; note = 2'-O-methyl modified nucleotide with phosphorothioate linkage
  modified_base 109: mod_base = OTHER; note = 2'-O-methyl modified nucleotide
gagaatcaaaatcggtgaatgttttagagctagaaatagcaagttaaaataaggctagtccgttatcaacttgaaaaagtggcaccgagtcggtgctgtctcaccgatt

SEQ ID NO: 16133 - RNA, 116 nt, synthetic construct
  source 1..116: mol_type = other RNA
  modified_base 1: mod_base = OTHER; note = 2'-O-methyl modified nucleotide with phosphorothioate linkage
  modified_base 2: mod_base = OTHER; note = 2'-O-methyl modified nucleotide with phosphorothioate linkage
  modified_base 3: mod_base = OTHER; note = 2'-O-methyl modified nucleotide with phosphorothioate linkage
  modified_base 29: mod_base = OTHER; note = 2'-O-methyl modified nucleotide
  modified_base 30: mod_base = OTHER; note = 2'-O-methyl modified nucleotide
  modified_base 31: mod_base = OTHER; note = 2'-O-methyl modified nucleotide
  modified_base 32: mod_base = OTHER; note = 2'-O-methyl modified nucleotide
  modified_base 33: mod_base = OTHER; note = 2'-O-methyl modified nucleotide
  modified_base 34: mod_base = OTHER; note = 2'-O-methyl modified nucleotide
  modified_base 35: mod_base = OTHER; note = 2'-O-methyl modified nucleotide
  modified_base 36: mod_base = OTHER; note = 2'-O-methyl modified nucleotide
  modified_base 37: mod_base = OTHER; note = 2'-O-methyl modified nucleotide
  modified_base 38: mod_base = OTHER; note = 2'-O-methyl modified nucleotide
  modified_base 39: mod_base = OTHER; note = 2'-O-methyl modified nucleotide
  modified_base 40: mod_base = OTHER; note = 2'-O-methyl modified nucleotide
  modified_base 69: mod_base = OTHER; note = 2'-O-methyl modified nucleotide
  modified_base 70: mod_base = OTHER; note = 2'-O-methyl modified nucleotide
  modified_base 71: mod_base = OTHER; note = 2'-O-methyl modified nucleotide
  modified_base 72: mod_base = OTHER; note = 2'-O-methyl modified nucleotide
  modified_base 73: mod_base = OTHER; note = 2'-O-methyl modified nucleotide
  modified_base 74: mod_base = OTHER; note = 2'-O-methyl modified nucleotide
  modified_base 75: mod_base = OTHER; note = 2'-O-methyl modified nucleotide
  modified_base 76: mod_base = OTHER; note = 2'-O-methyl modified nucleotide
  modified_base 77: mod_base = OTHER; note = 2'-O-methyl modified nucleotide
  modified_base 78: mod_base = OTHER; note = 2'-O-methyl modified nucleotide
  modified_base 79: mod_base = OTHER; note = 2'-O-methyl modified nucleotide
  modified_base 80: mod_base = OTHER; note = 2'-O-methyl modified nucleotide
  modified_base 81: mod_base = OTHER; note = 2'-O-methyl modified nucleotide
  modified_base 82: mod_base = OTHER; note = 2'-O-methyl modified nucleotide
  modified_base 83: mod_base = OTHER; note = 2'-O-methyl modified nucleotide
  modified_base 84: mod_base = OTHER; note = 2'-O-methyl modified nucleotide
  modified_base 85: mod_base = OTHER; note = 2'-O-methyl modified nucleotide
  modified_base 86: mod_base = OTHER; note = 2'-O-methyl modified nucleotide
  modified_base 87: mod_base = OTHER; note = 2'-O-methyl modified nucleotide
  modified_base 88: mod_base = OTHER; note = 2'-O-methyl modified nucleotide
  modified_base 89: mod_base = OTHER; note = 2'-O-methyl modified nucleotide
  modified_base 90: mod_base = OTHER; note = 2'-O-methyl modified nucleotide
  modified_base 91: mod_base = OTHER; note = 2'-O-methyl modified nucleotide
  modified_base 92: mod_base = OTHER; note = 2'-O-methyl modified nucleotide
  modified_base 93: mod_base = OTHER; note = 2'-O-methyl modified nucleotide
  modified_base 94: mod_base = OTHER; note = 2'-O-methyl modified nucleotide
  modified_base 95: mod_base = OTHER; note = 2'-O-methyl modified nucleotide
  modified_base 96: mod_base = OTHER; note = 2'-O-methyl modified nucleotide
  modified_base 113: mod_base = OTHER; note = Nucleotide with phosphorothioate linkage
  modified_base 114: mod_base = OTHER; note = 2'-O-methyl modified nucleotide with phosphorothioate linkage
  modified_base 115: mod_base = OTHER; note = 2'-O-methyl modified nucleotide with phosphorothioate linkage
  modified_base 116: mod_base = OTHER; note = 2'-O-methyl modified nucleotide
gagaatcaaaatcggtgaatgttttagagctagaaatagcaagttaaaataaggctagtccgttatcaacttgaaaaagtggcaccgagtcggtgctctgtctcaccgattttgat

SEQ ID NO: 16134 - RNA, 115 nt, synthetic construct
  source 1..115: mol_type = other RNA
  modified_base 1: mod_base = OTHER; note = 2'-O-methyl modified nucleotide with phosphorothioate linkage
  modified_base 2: mod_base = OTHER; note = 2'-O-methyl modified nucleotide with phosphorothioate linkage
  modified_base 3: mod_base = OTHER; note = 2'-O-methyl modified nucleotide with phosphorothioate linkage
  modified_base 29: mod_base = OTHER; note = 2'-O-methyl modified nucleotide
  modified_base 30: mod_base = OTHER; note = 2'-O-methyl modified nucleotide
  modified_base 31: mod_base = OTHER; note = 2'-O-methyl modified nucleotide
  modified_base 32: mod_base = OTHER; note = 2'-O-methyl modified nucleotide
  modified_base 33: mod_base = OTHER; note = 2'-O-methyl modified nucleotide
  modified_base 34: mod_base = OTHER; note = 2'-O-methyl modified nucleotide
  modified_base 35: mod_base = OTHER; note = 2'-O-methyl modified nucleotide
  modified_base 36: mod_base = OTHER; note = 2'-O-methyl modified nucleotide
  modified_base 37: mod_base = OTHER; note = 2'-O-methyl modified nucleotide
  modified_base 38: mod_base = OTHER; note = 2'-O-methyl modified nucleotide
  modified_base 39: mod_base = OTHER; note = 2'-O-methyl modified nucleotide
  modified_base 40: mod_base = OTHER; note = 2'-O-methyl modified nucleotide
  modified_base 69: mod_base = OTHER; note = 2'-O-methyl modified nucleotide
  modified_base 70: mod_base = OTHER; note = 2'-O-methyl modified nucleotide
  modified_base 71: mod_base = OTHER; note = 2'-O-methyl modified nucleotide
  modified_base 72: mod_base = OTHER; note = 2'-O-methyl modified nucleotide
  modified_base 73: mod_base = OTHER; note = 2'-O-methyl modified nucleotide
  modified_base 74: mod_base = OTHER; note = 2'-O-methyl modified nucleotide
  modified_base 75: mod_base = OTHER; note = 2'-O-methyl modified nucleotide
  modified_base 76: mod_base = OTHER; note = 2'-O-methyl modified nucleotide
  modified_base 77: mod_base = OTHER; note = 2'-O-methyl modified nucleotide
  modified_base 78: mod_base = OTHER; note = 2'-O-methyl modified nucleotide
  modified_base 79: mod_base = OTHER; note = 2'-O-methyl modified nucleotide
  modified_base 80: mod_base = OTHER; note = 2'-O-methyl modified nucleotide
  modified_base 81: mod_base = OTHER; note = 2'-O-methyl modified nucleotide
  modified_base 82: mod_base = OTHER; note = 2'-O-methyl modified nucleotide
  modified_base 83: mod_base = OTHER; note = 2'-O-methyl modified nucleotide
  modified_base 84: mod_base = OTHER; note = 2'-O-methyl modified nucleotide
  modified_base 85: mod_base = OTHER; note = 2'-O-methyl modified nucleotide
  modified_base 86: mod_base = OTHER; note = 2'-O-methyl modified nucleotide
  modified_base 87: mod_base = OTHER; note = 2'-O-methyl modified nucleotide
  modified_base 88: mod_base = OTHER; note = 2'-O-methyl modified nucleotide
  modified_base 89: mod_base = OTHER; note = 2'-O-methyl modified nucleotide
  modified_base 90: mod_base = OTHER; note = 2'-O-methyl modified nucleotide
  modified_base 91: mod_base = OTHER; note = 2'-O-methyl modified nucleotide
  modified_base 92: mod_base = OTHER; note = 2'-O-methyl modified nucleotide
  modified_base 93: mod_base = OTHER; note = 2'-O-methyl modified nucleotide
  modified_base 94: mod_base = OTHER; note = 2'-O-methyl modified nucleotide
  modified_base 95: mod_base = OTHER; note = 2'-O-methyl modified nucleotide
  modified_base 96: mod_base = OTHER; note = 2'-O-methyl modified nucleotide
  modified_base 112: mod_base = OTHER; note = Nucleotide with phosphorothioate linkage
  modified_base 113: mod_base = OTHER; note = 2'-O-methyl modified nucleotide with phosphorothioate linkage
  modified_base 114: mod_base = OTHER; note = 2'-O-methyl modified nucleotide with phosphorothioate linkage
  modified_base 115: mod_base = OTHER; note = 2'-O-methyl modified nucleotide
gagaatcaaaatcggtgaatgttttagagctagaaatagcaagttaaaataaggctagtccgttatcaacttgaaaaagtggcaccgagtcggtgctctgtctcaccgattttga

SEQ ID NO: 16135 - RNA, 114 nt, synthetic construct
  source 1..114: mol_type = other RNA
  modified_base 1: mod_base = OTHER; note = 2'-O-methyl modified nucleotide with phosphorothioate linkage
  modified_base 2: mod_base = OTHER; note = 2'-O-methyl modified nucleotide with phosphorothioate linkage
  modified_base 3: mod_base = OTHER; note = 2'-O-methyl modified nucleotide with phosphorothioate linkage
  modified_base 29: mod_base = OTHER; note = 2'-O-methyl modified nucleotide
  modified_base 30: mod_base = OTHER; note = 2'-O-methyl modified nucleotide
  modified_base 31: mod_base = OTHER; note = 2'-O-methyl modified nucleotide
  modified_base 32: mod_base = OTHER; note = 2'-O-methyl modified nucleotide
  modified_base 33: mod_base = OTHER; note = 2'-O-methyl modified nucleotide
  modified_base 34: mod_base = OTHER; note = 2'-O-methyl modified nucleotide
  modified_base 35: mod_base = OTHER; note = 2'-O-methyl modified nucleotide
  modified_base 36: mod_base = OTHER; note = 2'-O-methyl modified nucleotide
  modified_base 37: mod_base = OTHER; note = 2'-O-methyl modified nucleotide
  modified_base 38: mod_base = OTHER; note = 2'-O-methyl modified nucleotide
  modified_base 39: mod_base = OTHER; note = 2'-O-methyl modified nucleotide
  modified_base 40: mod_base = OTHER; note = 2'-O-methyl modified nucleotide
  modified_base 69: mod_base = OTHER; note = 2'-O-methyl modified nucleotide
  modified_base 70: mod_base = OTHER; note = 2'-O-methyl modified nucleotide
  modified_base 71: mod_base = OTHER; note = 2'-O-methyl modified nucleotide
  modified_base 72: mod_base = OTHER; note = 2'-O-methyl modified nucleotide
  modified_base 73: mod_base = OTHER; note = 2'-O-methyl modified nucleotide
  modified_base 74: mod_base = OTHER; note = 2'-O-methyl modified nucleotide
  modified_base 75: mod_base = OTHER; note = 2'-O-methyl modified nucleotide
  modified_base 76: mod_base = OTHER; note = 2'-O-methyl modified nucleotide
  modified_base 77: mod_base = OTHER; note = 2'-O-methyl modified nucleotide
  modified_base 78: mod_base = OTHER; note = 2'-O-methyl modified nucleotide
  modified_base 79: mod_base = OTHER; note = 2'-O-methyl modified nucleotide
  modified_base 80: mod_base = OTHER; note = 2'-O-methyl modified nucleotide
  modified_base 81: mod_base = OTHER; note = 2'-O-methyl modified nucleotide
  modified_base 82: mod_base = OTHER; note = 2'-O-methyl modified nucleotide
  modified_base 83: mod_base = OTHER; note = 2'-O-methyl modified nucleotide
  modified_base 84: mod_base = OTHER; note = 2'-O-methyl modified nucleotide
  modified_base 85: mod_base = OTHER; note = 2'-O-methyl modified nucleotide
  modified_base 86: mod_base = OTHER; note = 2'-O-methyl modified nucleotide
  modified_base 87: mod_base = OTHER; note = 2'-O-methyl modified nucleotide
  modified_base 88: mod_base = OTHER; note = 2'-O-methyl modified nucleotide
  modified_base 89: mod_base = OTHER; note = 2'-O-methyl modified nucleotide
  modified_base 90: mod_base = OTHER; note = 2'-O-methyl modified nucleotide
  modified_base 91: mod_base = OTHER; note = 2'-O-methyl modified nucleotide
  modified_base 92: mod_base = OTHER; note = 2'-O-methyl modified nucleotide
  modified_base 93: mod_base = OTHER; note = 2'-O-methyl modified nucleotide
  modified_base 94: mod_base = OTHER; note = 2'-O-methyl modified nucleotide
  modified_base 95: mod_base = OTHER; note = 2'-O-methyl modified nucleotide
  modified_base 96: mod_base = OTHER; note = 2'-O-methyl modified nucleotide
  modified_base 111: mod_base = OTHER; note = Nucleotide with phosphorothioate linkage
  modified_base 112: mod_base = OTHER; note = 2'-O-methyl modified nucleotide with phosphorothioate linkage
  modified_base 113: mod_base = OTHER; note = 2'-O-methyl modified nucleotide with phosphorothioate linkage
  modified_base 114: mod_base = OTHER; note = 2'-O-methyl modified nucleotide
gagaatcaaaatcggtgaatgttttagagctagaaatagcaagttaaaataaggctagtccgttatcaacttgaaaaagtggcaccgagtcggtgctctgtctcaccgattttg

SEQ ID NO: 16136 - RNA, 113 nt, synthetic construct
  source 1..113: mol_type = other RNA
  modified_base 1: mod_base = OTHER; note = 2'-O-methyl modified nucleotide with phosphorothioate linkage
  modified_base 2: mod_base = OTHER; note = 2'-O-methyl modified nucleotide with phosphorothioate linkage
  modified_base 3: mod_base = OTHER; note = 2'-O-methyl modified nucleotide with phosphorothioate linkage
  modified_base 29: mod_base = OTHER; note = 2'-O-methyl modified nucleotide
  modified_base 30: mod_base = OTHER; note = 2'-O-methyl modified nucleotide
  modified_base 31: mod_base = OTHER; note = 2'-O-methyl modified nucleotide
  modified_base 32: mod_base = OTHER; note = 2'-O-methyl modified nucleotide
  modified_base 33: mod_base = OTHER; note = 2'-O-methyl modified nucleotide
  modified_base 34: mod_base = OTHER; note = 2'-O-methyl modified nucleotide
  modified_base 35: mod_base = OTHER; note = 2'-O-methyl modified nucleotide
  modified_base 36: mod_base = OTHER; note = 2'-O-methyl modified nucleotide
  modified_base 37: mod_base = OTHER; note = 2'-O-methyl modified nucleotide
  modified_base 38: mod_base = OTHER; note = 2'-O-methyl modified nucleotide
  modified_base 39: mod_base = OTHER; note = 2'-O-methyl modified nucleotide
  modified_base 40: mod_base = OTHER; note = 2'-O-methyl modified nucleotide
  modified_base 69: mod_base = OTHER; note = 2'-O-methyl modified nucleotide
  modified_base 70: mod_base = OTHER; note = 2'-O-methyl modified nucleotide
  modified_base 71: mod_base = OTHER; note = 2'-O-methyl modified nucleotide
  modified_base 72: mod_base = OTHER; note = 2'-O-methyl modified nucleotide
  modified_base 73: mod_base = OTHER; note = 2'-O-methyl modified nucleotide
  modified_base 74: mod_base = OTHER; note = 2'-O-methyl modified nucleotide
  modified_base 75: mod_base = OTHER; note = 2'-O-methyl modified nucleotide
  modified_base 76: mod_base = OTHER; note = 2'-O-methyl modified nucleotide
  modified_base 77: mod_base = OTHER; note = 2'-O-methyl modified nucleotide
  modified_base 78: mod_base = OTHER; note = 2'-O-methyl modified nucleotide
  modified_base 79: mod_base = OTHER; note = 2'-O-methyl modified nucleotide
  modified_base 80: mod_base = OTHER; note = 2'-O-methyl modified nucleotide
  modified_base 81: mod_base = OTHER; note = 2'-O-methyl modified nucleotide
  modified_base 82: mod_base = OTHER; note = 2'-O-methyl modified nucleotide
  modified_base 83: mod_base = OTHER; note = 2'-O-methyl modified nucleotide
  modified_base 84: mod_base = OTHER; note = 2'-O-methyl modified nucleotide
  modified_base 85: mod_base = OTHER; note = 2'-O-methyl modified nucleotide
  modified_base 86: mod_base = OTHER; note = 2'-O-methyl modified nucleotide
  modified_base 87: mod_base = OTHER; note = 2'-O-methyl modified nucleotide
  modified_base 88: mod_base = OTHER; note = 2'-O-methyl modified nucleotide
  modified_base 89: mod_base = OTHER; note = 2'-O-methyl modified nucleotide
  modified_base 90: mod_base = OTHER; note = 2'-O-methyl modified nucleotide
  modified_base 91: mod_base = OTHER; note = 2'-O-methyl modified nucleotide
  modified_base 92: mod_base = OTHER; note = 2'-O-methyl modified nucleotide
  modified_base 93: mod_base = OTHER; note = 2'-O-methyl modified nucleotide
  modified_base 94: mod_base = OTHER; note = 2'-O-methyl modified nucleotide
  modified_base 95: mod_base = OTHER; note = 2'-O-methyl modified nucleotide
  modified_base 96: mod_base = OTHER; note = 2'-O-methyl modified nucleotide
  modified_base 110: mod_base = OTHER; note = Nucleotide with phosphorothioate linkage
  modified_base 111: mod_base = OTHER; note = 2'-O-methyl modified nucleotide with phosphorothioate linkage
  modified_base 112: mod_base = OTHER; note = 2'-O-methyl modified nucleotide with phosphorothioate linkage
  modified_base 113: mod_base = OTHER; note = 2'-O-methyl modified nucleotide
gagaatcaaaatcggtgaatgttttagagctagaaatagcaagttaaaataaggctagtccgttatcaacttgaaaaagtggcaccgagtcggtgctctgtctcaccgatttt

SEQ ID NO: 16137 - RNA, 112 nt, synthetic construct
  source 1..112: mol_type = other RNA
  modified_base 1: mod_base = OTHER; note = 2'-O-methyl modified nucleotide with phosphorothioate linkage
  modified_base 2: mod_base = OTHER; note = 2'-O-methyl modified nucleotide with phosphorothioate linkage
  modified_base 3: mod_base = OTHER; note = 2'-O-methyl modified nucleotide with phosphorothioate linkage
  modified_base 29: mod_base = OTHER; note = 2'-O-methyl modified nucleotide
  modified_base 30: mod_base = OTHER; note = 2'-O-methyl modified nucleotide
  modified_base 31: mod_base = OTHER; note = 2'-O-methyl modified nucleotide
  modified_base 32: mod_base = OTHER; note = 2'-O-methyl modified nucleotide
  modified_base 33: mod_base = OTHER; note = 2'-O-methyl modified nucleotide
  modified_base 34: mod_base = OTHER; note = 2'-O-methyl modified nucleotide
  modified_base 35: mod_base = OTHER; note = 2'-O-methyl modified nucleotide
  modified_base 36: mod_base = OTHER; note = 2'-O-methyl modified nucleotide
  modified_base 37: mod_base = OTHER; note = 2'-O-methyl modified nucleotide
  modified_base 38: mod_base = OTHER; note = 2'-O-methyl modified nucleotide
  modified_base 39: mod_base = OTHER; note = 2'-O-methyl modified nucleotide
  modified_base 40: mod_base = OTHER; note = 2'-O-methyl modified nucleotide
  modified_base 69: mod_base = OTHER; note = 2'-O-methyl modified nucleotide
  modified_base 70: mod_base = OTHER; note = 2'-O-methyl modified nucleotide
  modified_base 71: mod_base = OTHER; note = 2'-O-methyl modified nucleotide
  modified_base 72: mod_base = OTHER; note = 2'-O-methyl modified nucleotide
  modified_base 73: mod_base = OTHER; note = 2'-O-methyl modified nucleotide
  modified_base 74: mod_base = OTHER; note = 2'-O-methyl modified nucleotide
  modified_base 75: mod_base = OTHER; note = 2'-O-methyl modified nucleotide
  modified_base 76: mod_base = OTHER; note = 2'-O-methyl modified nucleotide
  modified_base 77: mod_base = OTHER; note = 2'-O-methyl modified nucleotide
  modified_base 78: mod_base = OTHER; note = 2'-O-methyl modified nucleotide
  modified_base 79: mod_base = OTHER; note = 2'-O-methyl modified nucleotide
  modified_base 80: mod_base = OTHER; note = 2'-O-methyl modified nucleotide
  modified_base 81: mod_base = OTHER; note = 2'-O-methyl modified nucleotide
  modified_base 82: mod_base = OTHER; note = 2'-O-methyl modified nucleotide
  modified_base 83: mod_base = OTHER; note = 2'-O-methyl modified nucleotide
  modified_base 84: mod_base = OTHER; note = 2'-O-methyl modified nucleotide
  modified_base 85: mod_base = OTHER; note = 2'-O-methyl modified nucleotide
  modified_base 86: mod_base = OTHER; note = 2'-O-methyl modified nucleotide
  modified_base 87: mod_base = OTHER; note = 2'-O-methyl modified nucleotide
  modified_base 88: mod_base = OTHER; note = 2'-O-methyl modified nucleotide
  modified_base 89: mod_base = OTHER; note = 2'-O-methyl modified nucleotide
  modified_base 90: mod_base = OTHER; note = 2'-O-methyl modified nucleotide
  modified_base 91: mod_base = OTHER; note = 2'-O-methyl modified nucleotide
  modified_base 92: mod_base = OTHER; note = 2'-O-methyl modified nucleotide
  modified_base 93: mod_base = OTHER; note = 2'-O-methyl modified nucleotide
  modified_base 94: mod_base = OTHER; note = 2'-O-methyl modified nucleotide
  modified_base 95: mod_base = OTHER; note = 2'-O-methyl modified nucleotide
  modified_base 96: mod_base = OTHER; note = 2'-O-methyl modified nucleotide
  modified_base 109: mod_base = OTHER; note = Nucleotide with phosphorothioate linkage
  modified_base 110: mod_base = OTHER; note = 2'-O-methyl modified nucleotide with phosphorothioate linkage
  modified_base 111: mod_base = OTHER; note = 2'-O-methyl modified nucleotide with phosphorothioate linkage
  modified_base 112: mod_base = OTHER; note = 2'-O-methyl modified nucleotide
gagaatcaaaatcggtgaatgttttagagctagaaatagcaagttaaaataaggctagtccgttatcaacttgaaaaagtggcaccgagtcggtgctctgtctcaccgattt

SEQ ID NO: 16138 - RNA, 111 nt, synthetic construct
  source 1..111: mol_type = other RNA
  modified_base 1: mod_base = OTHER; note = 2'-O-methyl modified nucleotide with phosphorothioate linkage
  modified_base 2: mod_base = OTHER; note = 2'-O-methyl modified nucleotide with phosphorothioate linkage
  modified_base 3: mod_base = OTHER; note = 2'-O-methyl modified nucleotide with phosphorothioate linkage
  modified_base 29: mod_base = OTHER; note = 2'-O-methyl modified nucleotide
  modified_base 30: mod_base = OTHER; note = 2'-O-methyl modified nucleotide
  modified_base 31: mod_base = OTHER; note = 2'-O-methyl modified nucleotide
  modified_base 32: mod_base = OTHER; note = 2'-O-methyl modified nucleotide
  modified_base 33: mod_base = OTHER; note = 2'-O-methyl modified nucleotide
  modified_base 34: mod_base = OTHER; note = 2'-O-methyl modified nucleotide
  modified_base 35: mod_base = OTHER; note = 2'-O-methyl modified nucleotide
  modified_base 36: mod_base = OTHER; note = 2'-O-methyl modified nucleotide
  modified_base 37: mod_base = OTHER; note = 2'-O-methyl modified nucleotide
  modified_base 38: mod_base = OTHER; note = 2'-O-methyl modified nucleotide
  modified_base 39: mod_base = OTHER; note = 2'-O-methyl modified nucleotide
  modified_base 40: mod_base = OTHER; note = 2'-O-methyl modified nucleotide
  modified_base 69: mod_base = OTHER; note = 2'-O-methyl modified nucleotide
  modified_base 70: mod_base = OTHER; note = 2'-O-methyl modified nucleotide
  modified_base 71: mod_base = OTHER; note = 2'-O-methyl modified nucleotide
  modified_base 72: mod_base = OTHER; note = 2'-O-methyl modified nucleotide
  modified_base 73: mod_base = OTHER; note = 2'-O-methyl modified nucleotide
  modified_base 74: mod_base = OTHER; note = 2'-O-methyl modified nucleotide
  modified_base 75: mod_base = OTHER; note = 2'-O-methyl modified nucleotide
  modified_base 76: mod_base = OTHER; note = 2'-O-methyl modified nucleotide
  modified_base 77: mod_base = OTHER; note = 2'-O-methyl modified nucleotide
  modified_base 78: mod_base = OTHER; note = 2'-O-methyl modified nucleotide
  modified_base 79: mod_base = OTHER; note = 2'-O-methyl modified nucleotide
  modified_base 80: mod_base = OTHER; note = 2'-O-methyl modified nucleotide
  modified_base 81: mod_base = OTHER; note = 2'-O-methyl modified nucleotide
  modified_base 82: mod_base = OTHER; note = 2'-O-methyl modified nucleotide
  modified_base 83: mod_base = OTHER; note = 2'-O-methyl modified nucleotide
  modified_base 84: mod_base = OTHER; note = 2'-O-methyl modified nucleotide
  modified_base 85: mod_base = OTHER; note = 2'-O-methyl modified nucleotide
  modified_base 86: mod_base = OTHER; note = 2'-O-methyl modified nucleotide
  modified_base 87: mod_base = OTHER; note = 2'-O-methyl modified nucleotide
  modified_base 88: mod_base = OTHER; note = 2'-O-methyl modified nucleotide
  modified_base 89: mod_base = OTHER; note = 2'-O-methyl modified nucleotide
  modified_base 90: mod_base = OTHER; note = 2'-O-methyl modified nucleotide
  modified_base 91: mod_base = OTHER; note = 2'-O-methyl modified nucleotide
  modified_base 92: mod_base = OTHER; note = 2'-O-methyl modified nucleotide
  modified_base 93: mod_base = OTHER; note = 2'-O-methyl modified nucleotide
  modified_base 94: mod_base = OTHER; note = 2'-O-methyl modified nucleotide
  modified_base 95: mod_base = OTHER; note = 2'-O-methyl modified nucleotide
  modified_base 96: mod_base = OTHER; note = 2'-O-methyl modified nucleotide
  modified_base 108: mod_base = OTHER; note = Nucleotide with phosphorothioate linkage
  modified_base 109: mod_base = OTHER; note = 2'-O-methyl modified nucleotide with phosphorothioate linkage
  modified_base 110: mod_base = OTHER; note = 2'-O-methyl modified nucleotide with phosphorothioate linkage
  modified_base 111: mod_base = OTHER; note = 2'-O-methyl modified nucleotide
gagaatcaaaatcggtgaatgttttagagctagaaatagcaagttaaaataaggctagtccgttatcaacttgaaaaagtggcaccgagtcggtgctctgtctcaccgatt

SEQ ID NO: 16139 - RNA, 118 nt, synthetic construct
  source 1..118: mol_type = other RNA
  modified_base 1: mod_base = OTHER; note = 2'-O-methyl modified nucleotide with phosphorothioate linkage
  modified_base 2: mod_base = OTHER; note = 2'-O-methyl modified nucleotide with phosphorothioate linkage
  modified_base 3: mod_base = OTHER; note = 2'-O-methyl modified nucleotide with phosphorothioate linkage
  modified_base 29: mod_base = OTHER; note = 2'-O-methyl modified nucleotide
  modified_base 30: mod_base = OTHER; note = 2'-O-methyl modified nucleotide
  modified_base 31: mod_base = OTHER; note = 2'-O-methyl modified nucleotide
  modified_base 32: mod_base = OTHER; note = 2'-O-methyl modified nucleotide
  modified_base 33: mod_base = OTHER; note = 2'-O-methyl modified nucleotide
  modified_base 34: mod_base = OTHER; note = 2'-O-methyl modified nucleotide
  modified_base 35: mod_base = OTHER; note = 2'-O-methyl modified nucleotide
  modified_base 36: mod_base = OTHER; note = 2'-O-methyl modified nucleotide
  modified_base 37: mod_base = OTHER; note = 2'-O-methyl modified nucleotide
  modified_base 38: mod_base = OTHER; note = 2'-O-methyl modified nucleotide
  modified_base 39: mod_base = OTHER; note = 2'-O-methyl modified nucleotide
  modified_base 40: mod_base = OTHER; note = 2'-O-methyl modified nucleotide
  modified_base 69: mod_base = OTHER; note = 2'-O-methyl modified nucleotide
  modified_base 70: mod_base = OTHER; note = 2'-O-methyl modified nucleotide
  modified_base 71: mod_base = OTHER; note = 2'-O-methyl modified nucleotide
  modified_base 72: mod_base = OTHER; note = 2'-O-methyl modified nucleotide
  modified_base 73: mod_base = OTHER; note = 2'-O-methyl modified nucleotide
  modified_base 74: mod_base = OTHER; note = 2'-O-methyl modified nucleotide
  modified_base 75: mod_base = OTHER; note = 2'-O-methyl modified nucleotide
  modified_base 76: mod_base = OTHER; note = 2'-O-methyl modified nucleotide
  modified_base 77: mod_base = OTHER; note = 2'-O-methyl modified nucleotide
  modified_base 78: mod_base = OTHER; note = 2'-O-methyl modified nucleotide
  modified_base 79: mod_base = OTHER; note = 2'-O-methyl modified nucleotide
  modified_base 80: mod_base = OTHER; note = 2'-O-methyl modified nucleotide
  modified_base 81: mod_base = OTHER; note = 2'-O-methyl modified nucleotide
  modified_base 82: mod_base = OTHER; note = 2'-O-methyl modified nucleotide
  modified_base 83: mod_base = OTHER; note = 2'-O-methyl modified nucleotide
  modified_base 84: mod_base = OTHER; note = 2'-O-methyl modified nucleotide
  modified_base 85: mod_base = OTHER; note = 2'-O-methyl modified nucleotide
  modified_base 86: mod_base = OTHER; note = 2'-O-methyl modified nucleotide
  modified_base 87: mod_base = OTHER; note = 2'-O-methyl modified nucleotide
  modified_base 88: mod_base = OTHER; note = 2'-O-methyl modified nucleotide
  modified_base 89: mod_base = OTHER; note = 2'-O-methyl modified nucleotide
  modified_base 90: mod_base = OTHER; note = 2'-O-methyl modified nucleotide
  modified_base 91: mod_base = OTHER; note = 2'-O-methyl modified nucleotide
  modified_base 92: mod_base = OTHER; note = 2'-O-methyl modified nucleotide
  modified_base 93: mod_base = OTHER; note = 2'-O-methyl modified nucleotide
  modified_base 94: mod_base = OTHER; note = 2'-O-methyl modified nucleotide
  modified_base 95: mod_base = OTHER; note = 2'-O-methyl modified nucleotide
  modified_base 96: mod_base = OTHER; note = 2'-O-methyl modified nucleotide
  modified_base 115: mod_base = OTHER; note = Nucleotide with phosphorothioate linkage
  modified_base 116: mod_base = OTHER; note = 2'-O-methyl modified nucleotide with phosphorothioate linkage
  modified_base 117: mod_base = OTHER; note = 2'-O-methyl modified nucleotide with phosphorothioate linkage
  modified_base 118: mod_base = OTHER; note = 2'-O-methyl modified nucleotide
gagaatcaaaatcggtgaatgttttagagctagaaatagcaagttaaaataaggctagtccgttatcaacttgaaaaagtggcaccgagtcggtgcagtctgtctcaccgattttgat

SEQ ID NO: 16140 - RNA, 117 nt, synthetic construct
  source 1..117: mol_type = other RNA
  modified_base 1: mod_base = OTHER; note = 2'-O-methyl modified nucleotide with phosphorothioate linkage
  modified_base 2: mod_base = OTHER; note = 2'-O-methyl modified nucleotide with phosphorothioate linkage
  modified_base 3: mod_base = OTHER; note = 2'-O-methyl modified nucleotide with phosphorothioate linkage
  modified_base 29: mod_base = OTHER; note = 2'-O-methyl modified nucleotide
  modified_base 30: mod_base = OTHER; note = 2'-O-methyl modified nucleotide
  modified_base 31: mod_base = OTHER; note = 2'-O-methyl modified nucleotide
  modified_base 32: mod_base = OTHER; note = 2'-O-methyl modified nucleotide
  modified_base 33: mod_base = OTHER; note = 2'-O-methyl modified nucleotide
  modified_base 34: mod_base = OTHER; note = 2'-O-methyl modified nucleotide
  modified_base 35: mod_base = OTHER; note = 2'-O-methyl modified nucleotide
  modified_base 36: mod_base = OTHER; note = 2'-O-methyl modified nucleotide
  modified_base 37: mod_base = OTHER; note = 2'-O-methyl modified nucleotide
  modified_base 38: mod_base = OTHER; note = 2'-O-methyl modified nucleotide
  modified_base 39: mod_base = OTHER; note = 2'-O-methyl modified nucleotide
  modified_base 40: mod_base = OTHER; note = 2'-O-methyl modified nucleotide
  modified_base 69: mod_base = OTHER; note = 2'-O-methyl modified nucleotide
  modified_base 70: mod_base = OTHER; note = 2'-O-methyl modified nucleotide
  modified_base 71: mod_base = OTHER; note = 2'-O-methyl modified nucleotide
  modified_base 72: mod_base = OTHER; note = 2'-O-methyl modified nucleotide
  modified_base 73: mod_base = OTHER; note = 2'-O-methyl modified nucleotide
  modified_base 74: mod_base = OTHER; note = 2'-O-methyl modified nucleotide
  modified_base 75: mod_base = OTHER; note = 2'-O-methyl modified nucleotide
  modified_base 76: mod_base = OTHER; note = 2'-O-methyl modified nucleotide
  modified_base 77: mod_base = OTHER; note = 2'-O-methyl modified nucleotide
  modified_base 78: mod_base = OTHER; note = 2'-O-methyl modified nucleotide
  modified_base 79: mod_base = OTHER; note = 2'-O-methyl modified nucleotide
  modified_base 80: mod_base = OTHER; note = 2'-O-methyl modified nucleotide
  modified_base 81: mod_base = OTHER; note = 2'-O-methyl modified nucleotide
  modified_base 82: mod_base = OTHER; note = 2'-O-methyl modified nucleotide
  modified_base 83: mod_base = OTHER; note = 2'-O-methyl modified nucleotide
  modified_base 84: mod_base = OTHER; note = 2'-O-methyl modified nucleotide
  modified_base 85: mod_base = OTHER; note = 2'-O-methyl modified nucleotide
  modified_base 86: mod_base = OTHER; note = 2'-O-methyl modified nucleotide
  modified_base 87: mod_base = OTHER; note = 2'-O-methyl modified nucleotide
  modified_base 88: mod_base = OTHER; note = 2'-O-methyl modified nucleotide
  modified_base 89: mod_base = OTHER; note = 2'-O-methyl modified nucleotide
  modified_base 90: mod_base = OTHER; note = 2'-O-methyl modified nucleotide
  modified_base 91: mod_base = OTHER; note = 2'-O-methyl modified nucleotide
  modified_base 92: mod_base = OTHER; note = 2'-O-methyl modified nucleotide
  modified_base 93: mod_base = OTHER; note = 2'-O-methyl modified nucleotide
  modified_base 94: mod_base = OTHER; note = 2'-O-methyl modified nucleotide
  modified_base 95: mod_base = OTHER; note = 2'-O-methyl modified nucleotide
  modified_base 96: mod_base = OTHER; note = 2'-O-methyl modified nucleotide
  modified_base 114: mod_base = OTHER; note = Nucleotide with phosphorothioate linkage
  modified_base 115: mod_base = OTHER; note = 2'-O-methyl modified nucleotide with phosphorothioate linkage
  modified_base 116: mod_base = OTHER; note = 2'-O-methyl modified nucleotide with phosphorothioate linkage
  modified_base 117: mod_base = OTHER; note = 2'-O-methyl modified nucleotide
gagaatcaaaatcggtgaatgttttagagctagaaatagcaagttaaaataaggctagtccgttatcaacttgaaaaagtggcaccgagtcggtgcagtctgtctcaccgattttga

SEQ ID NO: 16141 - RNA, 116 nt, synthetic construct
  source 1..116: mol_type = other RNA
  modified_base 1: mod_base = OTHER; note = 2'-O-methyl modified nucleotide with phosphorothioate linkage
  modified_base 2: mod_base = OTHER; note = 2'-O-methyl modified nucleotide with phosphorothioate linkage
  modified_base 3: mod_base = OTHER; note = 2'-O-methyl modified nucleotide with phosphorothioate linkage
  modified_base 29: mod_base = OTHER; note = 2'-O-methyl modified nucleotide
  modified_base 30: mod_base = OTHER; note = 2'-O-methyl modified nucleotide
  modified_base 31: mod_base = OTHER; note = 2'-O-methyl modified nucleotide
  modified_base 32: mod_base = OTHER; note = 2'-O-methyl modified nucleotide
  modified_base 33: mod_base = OTHER; note = 2'-O-methyl modified nucleotide
  modified_base 34: mod_base = OTHER; note = 2'-O-methyl modified nucleotide
  modified_base 35: mod_base = OTHER; note = 2'-O-methyl modified nucleotide
  modified_base 36: mod_base = OTHER; note = 2'-O-methyl modified nucleotide
  modified_base 37: mod_base = OTHER; note = 2'-O-methyl modified nucleotide
  modified_base 38: mod_base = OTHER; note = 2'-O-methyl modified nucleotide
  modified_base 39: mod_base = OTHER; note = 2'-O-methyl modified nucleotide
  modified_base 40: mod_base = OTHER; note = 2'-O-methyl modified nucleotide
  modified_base 69: mod_base = OTHER; note = 2'-O-methyl modified nucleotide
  modified_base 70: mod_base = OTHER; note = 2'-O-methyl modified nucleotide
  modified_base 71: mod_base = OTHER; note = 2'-O-methyl modified nucleotide
  modified_base 72: mod_base = OTHER; note = 2'-O-methyl modified nucleotide
  modified_base 73: mod_base = OTHER; note = 2'-O-methyl modified nucleotide
  modified_base 74: mod_base = OTHER; note = 2'-O-methyl modified nucleotide
  modified_base 75: mod_base = OTHER; note = 2'-O-methyl modified nucleotide
  modified_base 76: mod_base = OTHER; note = 2'-O-methyl modified nucleotide
  modified_base 77: mod_base = OTHER; note = 2'-O-methyl modified nucleotide
  modified_base 78: mod_base = OTHER; note = 2'-O-methyl modified nucleotide
  modified_base 79: mod_base = OTHER; note = 2'-O-methyl modified nucleotide
  modified_base 80: mod_base = OTHER; note = 2'-O-methyl modified nucleotide
  modified_base 81: mod_base = OTHER; note = 2'-O-methyl modified nucleotide
  modified_base 82: mod_base = OTHER; note = 2'-O-methyl modified nucleotide
  modified_base 83: mod_base = OTHER; note = 2'-O-methyl modified nucleotide
  modified_base 84: mod_base = OTHER; note = 2'-O-methyl modified nucleotide
  modified_base 85: mod_base = OTHER; note = 2'-O-methyl modified nucleotide
  modified_base 86: mod_base = OTHER; note = 2'-O-methyl modified nucleotide
  modified_base 87: mod_base = OTHER; note = 2'-O-methyl modified nucleotide
  modified_base 88: mod_base = OTHER; note = 2'-O-methyl modified nucleotide
  modified_base 89: mod_base = OTHER; note = 2'-O-methyl modified nucleotide
  modified_base 90: mod_base = OTHER; note = 2'-O-methyl modified nucleotide
  modified_base 91: mod_base = OTHER; note = 2'-O-methyl modified nucleotide
  modified_base 92: mod_base = OTHER; note = 2'-O-methyl modified nucleotide
  modified_base 93: mod_base = OTHER; note = 2'-O-methyl modified nucleotide
  modified_base 94: mod_base = OTHER; note = 2'-O-methyl modified nucleotide
  modified_base 95: mod_base = OTHER; note = 2'-O-methyl modified nucleotide
  modified_base 96: mod_base = OTHER; note = 2'-O-methyl modified nucleotide
  modified_base 113: mod_base = OTHER; note = Nucleotide with phosphorothioate linkage
  modified_base 114: mod_base = OTHER; note = 2'-O-methyl modified nucleotide with phosphorothioate linkage
  modified_base 115: mod_base = OTHER; note = 2'-O-methyl modified nucleotide with phosphorothioate linkage
  modified_base 116: mod_base = OTHER; note = 2'-O-methyl modified nucleotide
gagaatcaaaatcggtgaatgttttagagctagaaatagcaagttaaaataaggctagtccgttatcaacttgaaaaagtggcaccgagtcggtgcagtctgtctcaccgattttg

SEQ ID NO: 16142 - RNA, 115 nt, synthetic construct
  source 1..115: mol_type = other RNA
  modified_base 1: mod_base = OTHER; note = 2'-O-methyl modified nucleotide with phosphorothioate linkage
  modified_base 2: mod_base = OTHER; note = 2'-O-methyl modified nucleotide with phosphorothioate linkage
  modified_base 3: mod_base = OTHER; note = 2'-O-methyl modified nucleotide with phosphorothioate linkage
  modified_base 29: mod_base = OTHER; note = 2'-O-methyl modified nucleotide
  modified_base 30: mod_base = OTHER; note = 2'-O-methyl modified nucleotide
  modified_base 31: mod_base = OTHER; note = 2'-O-methyl modified nucleotide
  modified_base 32: mod_base = OTHER; note = 2'-O-methyl modified nucleotide
  modified_base 33: mod_base = OTHER; note = 2'-O-methyl modified nucleotide
  modified_base 34: mod_base = OTHER; note = 2'-O-methyl modified nucleotide
  modified_base 35: mod_base = OTHER; note = 2'-O-methyl modified nucleotide
  modified_base 36: mod_base = OTHER; note = 2'-O-methyl modified nucleotide
  modified_base 37: mod_base = OTHER; note = 2'-O-methyl modified nucleotide
  modified_base 38: mod_base = OTHER; note = 2'-O-methyl modified nucleotide
  modified_base 39: mod_base = OTHER; note = 2'-O-methyl modified nucleotide
  modified_base 40: mod_base = OTHER; note = 2'-O-methyl modified nucleotide
  modified_base 69: mod_base = OTHER; note = 2'-O-methyl modified nucleotide
  modified_base 70: mod_base = OTHER; note = 2'-O-methyl modified nucleotide
  modified_base 71: mod_base = OTHER; note = 2'-O-methyl modified nucleotide
  modified_base 72: mod_base = OTHER; note = 2'-O-methyl modified nucleotide
  modified_base 73: mod_base = OTHER; note = 2'-O-methyl modified nucleotide
  modified_base 74: mod_base = OTHER; note = 2'-O-methyl modified nucleotide
  modified_base 75: mod_base = OTHER; note = 2'-O-methyl modified nucleotide
  modified_base 76: mod_base = OTHER; note = 2'-O-methyl modified nucleotide
  modified_base 77: mod_base = OTHER; note = 2'-O-methyl modified nucleotide
  modified_base 78: mod_base = OTHER; note = 2'-O-methyl modified nucleotide
  modified_base 79: mod_base = OTHER; note = 2'-O-methyl modified nucleotide
  modified_base 80: mod_base = OTHER; note = 2'-O-methyl modified nucleotide
  modified_base 81: mod_base = OTHER; note = 2'-O-methyl modified nucleotide
  modified_base 82: mod_base = OTHER; note = 2'-O-methyl modified nucleotide
  modified_base 83: mod_base = OTHER; note = 2'-O-methyl modified nucleotide
  modified_base 84: mod_base = OTHER; note = 2'-O-methyl modified nucleotide
  modified_base 85: mod_base = OTHER; note = 2'-O-methyl modified nucleotide
  modified_base 86: mod_base = OTHER; note = 2'-O-methyl modified nucleotide
  modified_base 87: mod_base = OTHER; note = 2'-O-methyl modified nucleotide
  modified_base 88: mod_base = OTHER; note = 2'-O-methyl modified nucleotide
  modified_base 89: mod_base = OTHER; note = 2'-O-methyl modified nucleotide
  modified_base 90: mod_base = OTHER; note = 2'-O-methyl modified nucleotide
  modified_base 91: mod_base = OTHER; note = 2'-O-methyl modified nucleotide
  modified_base 92: mod_base = OTHER; note = 2'-O-methyl modified nucleotide
  modified_base 93: mod_base = OTHER; note = 2'-O-methyl modified nucleotide
  modified_base 94: mod_base = OTHER; note = 2'-O-methyl modified nucleotide
  modified_base 95: mod_base = OTHER; note = 2'-O-methyl modified nucleotide
  modified_base 96: mod_base = OTHER; note = 2'-O-methyl modified nucleotide
  modified_base 112: mod_base = OTHER; note = Nucleotide with phosphorothioate linkage
  modified_base 113: mod_base = OTHER; note = 2'-O-methyl modified nucleotide with phosphorothioate linkage
  modified_base 114: mod_base = OTHER; note = 2'-O-methyl modified nucleotide with phosphorothioate linkage
  modified_base 115: mod_base = OTHER; note = 2'-O-methyl modified nucleotide
gagaatcaaaatcggtgaatgttttagagctagaaatagcaagttaaaataaggctagtccgttatcaacttgaaaaagtggcaccgagtcggtgcagtctgtctcaccgatttt

SEQ ID NO: 16143 - RNA, 114 nt, synthetic construct
  source 1..114: mol_type = other RNA
  modified_base 1: mod_base = OTHER; note = 2'-O-methyl modified nucleotide with phosphorothioate linkage
  modified_base 2: mod_base = OTHER; note = 2'-O-methyl modified nucleotide with phosphorothioate linkage
  modified_base 3: mod_base = OTHER; note = 2'-O-methyl modified nucleotide with phosphorothioate linkage
  modified_base 29: mod_base = OTHER; note = 2'-O-methyl modified nucleotide
  modified_base 30: mod_base = OTHER; note = 2'-O-methyl modified nucleotide
  modified_base 31: mod_base = OTHER; note = 2'-O-methyl modified nucleotide
  modified_base 32: mod_base = OTHER; note = 2'-O-methyl modified nucleotide
  modified_base 33: mod_base = OTHER; note = 2'-O-methyl modified nucleotide
  modified_base 34: mod_base = OTHER; note = 2'-O-methyl modified nucleotide
  modified_base 35: mod_base = OTHER; note = 2'-O-methyl modified nucleotide
  modified_base 36: mod_base = OTHER; note = 2'-O-methyl modified nucleotide
  modified_base 37: mod_base = OTHER; note = 2'-O-methyl modified nucleotide
  modified_base 38: mod_base = OTHER; note = 2'-O-methyl modified nucleotide
  modified_base 39: mod_base = OTHER; note = 2'-O-methyl modified nucleotide
  modified_base 40: mod_base = OTHER; note = 2'-O-methyl modified nucleotide
  modified_base 69: mod_base = OTHER; note = 2'-O-methyl modified nucleotide
  modified_base 70: mod_base = OTHER; note = 2'-O-methyl modified nucleotide
  modified_base 71: mod_base = OTHER; note = 2'-O-methyl modified nucleotide
  modified_base 72: mod_base = OTHER; note = 2'-O-methyl modified nucleotide
  modified_base 73: mod_base = OTHER; note = 2'-O-methyl modified nucleotide
  modified_base 74: mod_base = OTHER; note = 2'-O-methyl modified nucleotide
  modified_base 75: mod_base = OTHER; note = 2'-O-methyl modified nucleotide
  modified_base 76: mod_base = OTHER; note = 2'-O-methyl modified nucleotide
  modified_base 77: mod_base = OTHER; note = 2'-O-methyl modified nucleotide
  modified_base 78: mod_base = OTHER; note = 2'-O-methyl modified nucleotide
  modified_base 79: mod_base = OTHER; note = 2'-O-methyl modified nucleotide
  modified_base 80: mod_base = OTHER; note = 2'-O-methyl modified nucleotide
  modified_base 81: mod_base = OTHER; note = 2'-O-methyl modified nucleotide
  modified_base 82: mod_base = OTHER; note = 2'-O-methyl modified nucleotide
  modified_base 83: mod_base = OTHER; note = 2'-O-methyl modified nucleotide
  modified_base 84: mod_base = OTHER; note = 2'-O-methyl modified nucleotide
  modified_base 85: mod_base = OTHER; note = 2'-O-methyl modified nucleotide
  modified_base 86: mod_base = OTHER; note = 2'-O-methyl modified nucleotide
  modified_base 87: mod_base = OTHER; note = 2'-O-methyl modified nucleotide
  modified_base 88: mod_base = OTHER; note = 2'-O-methyl modified nucleotide
  modified_base 89: mod_base = OTHER; note = 2'-O-methyl modified nucleotide
  modified_base 90: mod_base = OTHER; note = 2'-O-methyl modified nucleotide
  modified_base 91: mod_base = OTHER; note = 2'-O-methyl modified nucleotide
  modified_base 92: mod_base = OTHER; note = 2'-O-methyl modified nucleotide
  modified_base 93: mod_base = OTHER; note = 2'-O-methyl modified nucleotide
  modified_base 94: mod_base = OTHER; note = 2'-O-methyl modified nucleotide
  modified_base 95: mod_base = OTHER; note = 2'-O-methyl modified nucleotide
  modified_base 96: mod_base = OTHER; note = 2'-O-methyl modified nucleotide
  modified_base 111: mod_base = OTHER; note = Nucleotide with phosphorothioate linkage
  modified_base 112: mod_base = OTHER; note = 2'-O-methyl modified nucleotide with phosphorothioate linkage
  modified_base 113: mod_base = OTHER; note = 2'-O-methyl modified nucleotide with phosphorothioate linkage
  modified_base 114: mod_base = OTHER; note = 2'-O-methyl modified nucleotide
gagaatcaaaatcggtgaatgttttagagctagaaatagcaagttaaaataaggctagtccgttatcaacttgaaaaagtggcaccgagtcggtgcagtctgtctcaccgattt

SEQ ID NO: 16144 - RNA, 113 nt, synthetic construct
  source 1..113: mol_type = other RNA
  modified_base 1: mod_base = OTHER; note = 2'-O-methyl modified nucleotide with phosphorothioate linkage
  modified_base 2: mod_base = OTHER; note = 2'-O-methyl modified nucleotide with phosphorothioate linkage
  modified_base 3: mod_base = OTHER; note = 2'-O-methyl modified nucleotide with phosphorothioate linkage
  modified_base 29: mod_base = OTHER; note = 2'-O-methyl modified nucleotide
  modified_base 30: mod_base = OTHER; note = 2'-O-methyl modified nucleotide
  modified_base 31: mod_base = OTHER; note = 2'-O-methyl modified nucleotide
  modified_base 32: mod_base = OTHER; note = 2'-O-methyl modified nucleotide
  modified_base 33: mod_base = OTHER; note = 2'-O-methyl modified nucleotide
  modified_base 34: mod_base = OTHER; note = 2'-O-methyl modified nucleotide
  modified_base 35: mod_base = OTHER; note = 2'-O-methyl modified nucleotide
  modified_base 36: mod_base = OTHER; note = 2'-O-methyl modified nucleotide
  modified_base 37: mod_base = OTHER; note = 2'-O-methyl modified nucleotide
  modified_base 38: mod_base = OTHER; note = 2'-O-methyl modified nucleotide
  modified_base 39: mod_base = OTHER; note = 2'-O-methyl modified nucleotide
  modified_base 40: mod_base = OTHER; note = 2'-O-methyl modified nucleotide
  modified_base 69: mod_base = OTHER; note = 2'-O-methyl modified nucleotide
  modified_base 70: mod_base = OTHER; note = 2'-O-methyl modified nucleotide
  modified_base 71: mod_base = OTHER; note = 2'-O-methyl modified nucleotide
  modified_base 72: mod_base = OTHER; note = 2'-O-methyl modified nucleotide
  modified_base 73: mod_base = OTHER; note = 2'-O-methyl modified nucleotide
  modified_base 74: mod_base = OTHER; note = 2'-O-methyl modified nucleotide
  modified_base 75: mod_base = OTHER; note = 2'-O-methyl modified nucleotide
  modified_base 76: mod_base = OTHER; note = 2'-O-methyl modified nucleotide
  modified_base 77: mod_base = OTHER; note = 2'-O-methyl modified nucleotide
  modified_base 78: mod_base = OTHER; note = 2'-O-methyl modified nucleotide
  modified_base 79: mod_base = OTHER; note = 2'-O-methyl modified nucleotide
  modified_base 80: mod_base = OTHER; note = 2'-O-methyl modified nucleotide
  modified_base 81: mod_base = OTHER; note = 2'-O-methyl modified nucleotide
  modified_base 82: mod_base = OTHER; note = 2'-O-methyl modified nucleotide
  modified_base 83: mod_base = OTHER; note = 2'-O-methyl modified nucleotide
  modified_base 84: mod_base = OTHER; note = 2'-O-methyl modified nucleotide
  modified_base 85: mod_base = OTHER; note = 2'-O-methyl modified nucleotide
  modified_base 86: mod_base = OTHER; note = 2'-O-methyl modified nucleotide
  modified_base 87: mod_base = OTHER; note = 2'-O-methyl modified nucleotide
  modified_base 88: mod_base = OTHER; note = 2'-O-methyl modified nucleotide
  modified_base 89: mod_base = OTHER; note = 2'-O-methyl modified nucleotide
  modified_base 90: mod_base = OTHER; note = 2'-O-methyl modified nucleotide
  modified_base 91: mod_base = OTHER; note = 2'-O-methyl modified nucleotide
  modified_base 92: mod_base = OTHER; note = 2'-O-methyl modified nucleotide
  modified_base 93: mod_base = OTHER; note = 2'-O-methyl modified nucleotide
  modified_base 94: mod_base = OTHER; note = 2'-O-methyl modified nucleotide
  modified_base 95: mod_base = OTHER; note = 2'-O-methyl modified nucleotide
  modified_base 96: mod_base = OTHER; note = 2'-O-methyl modified nucleotide
  modified_base 110: mod_base = OTHER; note = Nucleotide with phosphorothioate linkage
  modified_base 111: mod_base = OTHER; note = 2'-O-methyl modified nucleotide with phosphorothioate linkage
  modified_base 112: mod_base = OTHER; note = 2'-O-methyl modified nucleotide with phosphorothioate linkage
  modified_base 113: mod_base = OTHER; note = 2'-O-methyl modified nucleotide
gagaatcaaaatcggtgaatgttttagagctagaaatagcaagttaaaataaggctagtccgttatcaacttgaaaaagtggcaccgagtcggtgcagtctgtctcaccgatt

SEQ ID NO: 16145 - RNA, 120 nt, synthetic construct
  source 1..120: mol_type = other RNA
  modified_base 1: mod_base = OTHER; note = 2'-O-methyl modified nucleotide with phosphorothioate linkage
  modified_base 2: mod_base = OTHER; note = 2'-O-methyl modified nucleotide with phosphorothioate linkage
  modified_base 3: mod_base = OTHER; note = 2'-O-methyl modified nucleotide with phosphorothioate linkage
  modified_base 29: mod_base = OTHER; note = 2'-O-methyl modified nucleotide
  modified_base 30: mod_base = OTHER; note = 2'-O-methyl modified nucleotide
  modified_base 31: mod_base = OTHER; note = 2'-O-methyl modified nucleotide
  modified_base 32: mod_base = OTHER; note = 2'-O-methyl modified nucleotide
  modified_base 33: mod_base = OTHER; note = 2'-O-methyl modified nucleotide
  modified_base 34: mod_base = OTHER; note = 2'-O-methyl modified nucleotide
  modified_base 35: mod_base = OTHER; note = 2'-O-methyl modified nucleotide
  modified_base 36: mod_base = OTHER; note = 2'-O-methyl modified nucleotide
  modified_base 37: mod_base = OTHER; note = 2'-O-methyl modified nucleotide
  modified_base 38: mod_base = OTHER; note = 2'-O-methyl modified nucleotide
  modified_base 39: mod_base = OTHER; note = 2'-O-methyl modified nucleotide
  modified_base 40: mod_base = OTHER; note = 2'-O-methyl modified nucleotide
  modified_base 69: mod_base = OTHER; note = 2'-O-methyl modified nucleotide
  modified_base 70: mod_base = OTHER; note = 2'-O-methyl modified nucleotide
  modified_base 71: mod_base = OTHER; note = 2'-O-methyl modified nucleotide
  modified_base 72: mod_base = OTHER; note = 2'-O-methyl modified nucleotide
  modified_base 73: mod_base = OTHER; note = 2'-O-methyl modified nucleotide
  modified_base 74: mod_base = OTHER; note = 2'-O-methyl modified nucleotide
  modified_base 75: mod_base = OTHER; note = 2'-O-methyl modified nucleotide
  modified_base 76: mod_base = OTHER; note = 2'-O-methyl modified nucleotide
  modified_base 77: mod_base = OTHER; note = 2'-O-methyl modified nucleotide
  modified_base 78: mod_base = OTHER; note = 2'-O-methyl modified nucleotide
  modified_base 79: mod_base = OTHER; note = 2'-O-methyl modified nucleotide
  modified_base 80: mod_base = OTHER; note = 2'-O-methyl modified nucleotide
  modified_base 81: mod_base = OTHER; note = 2'-O-methyl modified nucleotide
  modified_base 82: mod_base = OTHER; note = 2'-O-methyl modified nucleotide
  modified_base 83: mod_base = OTHER; note = 2'-O-methyl modified nucleotide
  modified_base 84: mod_base = OTHER; note = 2'-O-methyl modified nucleotide
  modified_base 85: mod_base = OTHER; note = 2'-O-methyl modified nucleotide
  modified_base 86: mod_base = OTHER; note = 2'-O-methyl modified nucleotide
  modified_base 87: mod_base = OTHER; note = 2'-O-methyl modified nucleotide
  modified_base 88: mod_base = OTHER; note = 2'-O-methyl modified nucleotide
  modified_base 89: mod_base = OTHER; note = 2'-O-methyl modified nucleotide
  modified_base 90: mod_base = OTHER; note = 2'-O-methyl modified nucleotide
  modified_base 91: mod_base = OTHER; note = 2'-O-methyl modified nucleotide
  modified_base 92: mod_base = OTHER; note = 2'-O-methyl modified nucleotide
  modified_base 93: mod_base = OTHER; note = 2'-O-methyl modified nucleotide
  modified_base 94: mod_base = OTHER; note = 2'-O-methyl modified nucleotide
  modified_base 95: mod_base = OTHER; note = 2'-O-methyl modified nucleotide
  modified_base 96: mod_base = OTHER; note = 2'-O-methyl modified nucleotide
  modified_base 117: mod_base = OTHER; note = Nucleotide with phosphorothioate linkage
  modified_base 118: mod_base = OTHER; note = 2'-O-methyl modified nucleotide with phosphorothioate linkage
  modified_base 119: mod_base = OTHER; note = 2'-O-methyl modified nucleotide with phosphorothioate linkage
  modified_base 120: mod_base = OTHER; note = 2'-O-methyl modified nucleotide
gagaatcaaaatcggtgaatgttttagagctagaaatagcaagttaaaataaggctagtccgttatcaacttgaaaaagtggcaccgagtcggtgccaagtctgtctcaccgattttgat

SEQ ID NO: 16146 - RNA, 119 nt, synthetic construct
  source 1..119: mol_type = other RNA
  modified_base 1: mod_base = OTHER; note = 2'-O-methyl modified nucleotide with phosphorothioate linkage
  modified_base 2: mod_base = OTHER; note = 2'-O-methyl modified nucleotide with phosphorothioate linkage
  modified_base 3: mod_base = OTHER; note = 2'-O-methyl modified nucleotide with phosphorothioate linkage
  modified_base 29: mod_base = OTHER; note = 2'-O-methyl modified nucleotide
  modified_base 30: mod_base = OTHER; note = 2'-O-methyl modified nucleotide
  modified_base 31: mod_base = OTHER; note = 2'-O-methyl modified nucleotide
  modified_base 32: mod_base = OTHER; note = 2'-O-methyl modified nucleotide
  modified_base 33: mod_base = OTHER; note = 2'-O-methyl modified nucleotide
  modified_base 34: mod_base = OTHER; note = 2'-O-methyl modified nucleotide
  modified_base 35: mod_base = OTHER; note = 2'-O-methyl modified nucleotide
  modified_base 36: mod_base = OTHER; note = 2'-O-methyl modified nucleotide
  modified_base 37: mod_base = OTHER; note = 2'-O-methyl modified nucleotide
  modified_base 38: mod_base = OTHER; note = 2'-O-methyl modified nucleotide
  modified_base 39: mod_base = OTHER; note = 2'-O-methyl modified nucleotide
  modified_base 40: mod_base = OTHER; note = 2'-O-methyl modified nucleotide
  modified_base 69: mod_base = OTHER; note = 2'-O-methyl modified nucleotide
  modified_base 70: mod_base = OTHER; note = 2'-O-methyl modified nucleotide
  modified_base 71: mod_base = OTHER; note = 2'-O-methyl modified nucleotide
  modified_base 72: mod_base = OTHER; note = 2'-O-methyl modified nucleotide
  modified_base 73: mod_base = OTHER; note = 2'-O-methyl modified nucleotide
  modified_base 74: mod_base = OTHER; note = 2'-O-methyl modified nucleotide
  modified_base 75: mod_base = OTHER; note = 2'-O-methyl modified nucleotide
  modified_base 76: mod_base = OTHER; note = 2'-O-methyl modified nucleotide
  modified_base 77: mod_base = OTHER; note = 2'-O-methyl modified nucleotide
  modified_base 78: mod_base = OTHER; note = 2'-O-methyl modified nucleotide
  modified_base 79: mod_base = OTHER; note = 2'-O-methyl modified nucleotide
  modified_base 80: mod_base = OTHER; note = 2'-O-methyl modified nucleotide
  modified_base 81: mod_base = OTHER; note = 2'-O-methyl modified nucleotide
  modified_base 82: mod_base = OTHER; note = 2'-O-methyl modified nucleotide
  modified_base 83: mod_base = OTHER; note = 2'-O-methyl modified nucleotide
  modified_base 84: mod_base = OTHER; note = 2'-O-methyl modified nucleotide
  modified_base 85: mod_base = OTHER; note = 2'-O-methyl modified nucleotide
  modified_base 86: mod_base = OTHER; note = 2'-O-methyl modified nucleotide
  modified_base 87: mod_base = OTHER; note = 2'-O-methyl modified nucleotide
  modified_base 88: mod_base = OTHER; note = 2'-O-methyl modified nucleotide
  modified_base 89: mod_base = OTHER; note = 2'-O-methyl modified nucleotide
  modified_base 90: mod_base = OTHER; note = 2'-O-methyl modified nucleotide
  modified_base 91: mod_base = OTHER; note = 2'-O-methyl modified nucleotide
  modified_base 92: mod_base = OTHER; note = 2'-O-methyl modified nucleotide
  modified_base 93: mod_base = OTHER; note = 2'-O-methyl modified nucleotide
  modified_base 94: mod_base = OTHER; note = 2'-O-methyl modified nucleotide
  modified_base 95: mod_base = OTHER; note = 2'-O-methyl modified nucleotide
  modified_base 96: mod_base = OTHER; note = 2'-O-methyl modified nucleotide
  modified_base 116: mod_base = OTHER; note = Nucleotide with phosphorothioate linkage
  modified_base 117: mod_base = OTHER; note = 2'-O-methyl modified nucleotide with phosphorothioate linkage
  modified_base 118: mod_base = OTHER; note = 2'-O-methyl modified nucleotide with phosphorothioate linkage
  modified_base 119: mod_base = OTHER; note = 2'-O-methyl modified nucleotide
gagaatcaaaatcggtgaatgttttagagctagaaatagcaagttaaaataaggctagtccgttatcaacttgaaaaagtggcaccgagtcggtgccaagtctgtctcaccgattttga

SEQ ID NO: 16147 - RNA, 118 nt, synthetic construct
  source 1..118: mol_type = other RNA
  modified_base 1: mod_base = OTHER; note = 2'-O-methyl modified nucleotide with phosphorothioate linkage
  modified_base 2: mod_base = OTHER; note = 2'-O-methyl modified nucleotide with phosphorothioate linkage
  modified_base 3: mod_base = OTHER; note = 2'-O-methyl modified nucleotide with phosphorothioate linkage
  modified_base 29: mod_base = OTHER; note = 2'-O-methyl modified nucleotide
  modified_base 30: mod_base = OTHER; note = 2'-O-methyl modified nucleotide
  modified_base 31: mod_base = OTHER; note = 2'-O-methyl modified nucleotide
  modified_base 32: mod_base = OTHER; note = 2'-O-methyl modified nucleotide
  modified_base 33: mod_base = OTHER; note = 2'-O-methyl modified nucleotide
  modified_base 34: mod_base = OTHER; note = 2'-O-methyl modified nucleotide
  modified_base 35: mod_base = OTHER; note = 2'-O-methyl modified nucleotide
  modified_base 36: mod_base = OTHER; note = 2'-O-methyl modified nucleotide
  modified_base 37: mod_base = OTHER; note = 2'-O-methyl modified nucleotide
  modified_base 38: mod_base = OTHER; note = 2'-O-methyl modified nucleotide
  modified_base 39: mod_base = OTHER; note = 2'-O-methyl modified nucleotide
  modified_base 40: mod_base = OTHER; note = 2'-O-methyl modified nucleotide
  modified_base 69: mod_base = OTHER; note = 2'-O-methyl modified nucleotide
  modified_base 70: mod_base = OTHER; note = 2'-O-methyl modified nucleotide
  modified_base 71: mod_base = OTHER; note = 2'-O-methyl modified nucleotide
  modified_base 72: mod_base = OTHER; note = 2'-O-methyl modified nucleotide
  modified_base 73: mod_base = OTHER; note = 2'-O-methyl modified nucleotide
  modified_base 74: mod_base = OTHER; note = 2'-O-methyl modified nucleotide
  modified_base 75: mod_base = OTHER; note = 2'-O-methyl modified nucleotide
  modified_base 76: mod_base = OTHER; note = 2'-O-methyl modified nucleotide
  modified_base 77: mod_base = OTHER; note = 2'-O-methyl modified nucleotide
  modified_base 78: mod_base = OTHER; note = 2'-O-methyl modified nucleotide
  modified_base 79: mod_base = OTHER; note = 2'-O-methyl modified nucleotide
  modified_base 80: mod_base = OTHER; note = 2'-O-methyl modified nucleotide
  modified_base 81: mod_base = OTHER; note = 2'-O-methyl modified nucleotide
  modified_base 82: mod_base = OTHER; note = 2'-O-methyl modified nucleotide
  modified_base 83: mod_base = OTHER; note = 2'-O-methyl modified nucleotide
  modified_base 84: mod_base = OTHER; note = 2'-O-methyl modified nucleotide
  modified_base 85: mod_base = OTHER; note = 2'-O-methyl modified nucleotide
  modified_base 86: mod_base = OTHER; note = 2'-O-methyl modified nucleotide
  modified_base 87: mod_base = OTHER; note = 2'-O-methyl modified nucleotide
  modified_base 88: mod_base = OTHER; note = 2'-O-methyl modified nucleotide
  modified_base 89: mod_base = OTHER; note = 2'-O-methyl modified nucleotide
  modified_base 90: mod_base = OTHER; note = 2'-O-methyl modified nucleotide
  modified_base 91: mod_base = OTHER; note = 2'-O-methyl modified nucleotide
  modified_base 92: mod_base = OTHER; note = 2'-O-methyl modified nucleotide
  modified_base 93: mod_base = OTHER; note = 2'-O-methyl modified nucleotide
  modified_base 94: mod_base = OTHER; note = 2'-O-methyl modified nucleotide
  modified_base 95: mod_base = OTHER; note = 2'-O-methyl modified nucleotide
  modified_base 96: mod_base = OTHER; note = 2'-O-methyl modified nucleotide
  modified_base 115: mod_base = OTHER; note = Nucleotide with phosphorothioate linkage
  modified_base 116: mod_base = OTHER; note = 2'-O-methyl modified nucleotide with phosphorothioate linkage
  modified_base 117: mod_base = OTHER; note = 2'-O-methyl modified nucleotide with phosphorothioate linkage
  modified_base 118: mod_base = OTHER; note = 2'-O-methyl modified nucleotide
gagaatcaaaatcggtgaatgttttagagctagaaatagcaagttaaaataaggctagtccgttatcaacttgaaaaagtggcaccgagtcggtgccaagtctgtctcaccgattttg

SEQ ID NO: 16148 - RNA, 117 nt, synthetic construct
  source 1..117: mol_type = other RNA
  modified_base 1: mod_base = OTHER; note = 2'-O-methyl modified nucleotide with phosphorothioate linkage
  modified_base 2: mod_base = OTHER; note = 2'-O-methyl modified nucleotide with phosphorothioate linkage
  modified_base 3: mod_base = OTHER; note = 2'-O-methyl modified nucleotide with phosphorothioate linkage
  modified_base 29: mod_base = OTHER; note = 2'-O-methyl modified nucleotide
  modified_base 30: mod_base = OTHER; note = 2'-O-methyl modified nucleotide
  modified_base 31: mod_base = OTHER; note = 2'-O-methyl modified nucleotide
  modified_base 32: mod_base = OTHER; note = 2'-O-methyl modified nucleotide
  modified_base 33: mod_base = OTHER; note = 2'-O-methyl modified nucleotide
  modified_base 34: mod_base = OTHER; note = 2'-O-methyl modified nucleotide
  modified_base 35: mod_base = OTHER; note = 2'-O-methyl modified nucleotide
  modified_base 36: mod_base = OTHER; note = 2'-O-methyl modified nucleotide
  modified_base 37: mod_base = OTHER; note = 2'-O-methyl modified nucleotide
  modified_base 38: mod_base = OTHER; note = 2'-O-methyl modified nucleotide
  modified_base 39: mod_base = OTHER; note = 2'-O-methyl modified nucleotide
  modified_base 40: mod_base = OTHER; note = 2'-O-methyl modified nucleotide
  modified_base 69: mod_base = OTHER; note = 2'-O-methyl modified nucleotide
  modified_base 70: mod_base = OTHER; note = 2'-O-methyl modified nucleotide
  modified_base 71: mod_base = OTHER; note = 2'-O-methyl modified nucleotide
  modified_base 72: mod_base = OTHER; note = 2'-O-methyl modified nucleotide
  modified_base 73: mod_base = OTHER; note = 2'-O-methyl modified nucleotide
  modified_base 74: mod_base = OTHER; note = 2'-O-methyl modified nucleotide
  modified_base 75: mod_base = OTHER; note = 2'-O-methyl modified nucleotide
  modified_base 76: mod_base = OTHER; note = 2'-O-methyl modified nucleotide
  modified_base 77: mod_base = OTHER; note = 2'-O-methyl modified nucleotide
  modified_base 78: mod_base = OTHER; note = 2'-O-methyl modified nucleotide
  modified_base 79: mod_base = OTHER; note = 2'-O-methyl modified nucleotide
  modified_base 80: mod_base = OTHER; note = 2'-O-methyl modified nucleotide
  modified_base 81: mod_base = OTHER; note = 2'-O-methyl modified nucleotide
  modified_base 82: mod_base = OTHER; note = 2'-O-methyl modified nucleotide
  modified_base 83: mod_base = OTHER; note = 2'-O-methyl modified nucleotide
  modified_base 84: mod_base = OTHER; note = 2'-O-methyl modified nucleotide
  modified_base 85: mod_base = OTHER; note = 2'-O-methyl modified nucleotide
  modified_base 86: mod_base = OTHER; note = 2'-O-methyl modified nucleotide
  modified_base 87: mod_base = OTHER; note = 2'-O-methyl modified nucleotide
  modified_base 88: mod_base = OTHER; note = 2'-O-methyl modified nucleotide
  modified_base 89: mod_base = OTHER; note = 2'-O-methyl modified nucleotide
  modified_base 90: mod_base = OTHER; note = 2'-O-methyl modified nucleotide
  modified_base 91: mod_base = OTHER; note = 2'-O-methyl modified nucleotide
  modified_base 92: mod_base = OTHER; note = 2'-O-methyl modified nucleotide
  modified_base 93: mod_base = OTHER; note = 2'-O-methyl modified nucleotide
  modified_base 94: mod_base = OTHER; note = 2'-O-methyl modified nucleotide
  modified_base 95: mod_base = OTHER; note = 2'-O-methyl modified nucleotide
  modified_base 96: mod_base = OTHER; note = 2'-O-methyl modified nucleotide
  modified_base 114: mod_base = OTHER; note = Nucleotide with phosphorothioate linkage
  modified_base 115: mod_base = OTHER; note = 2'-O-methyl modified nucleotide with phosphorothioate linkage
  modified_base 116: mod_base = OTHER; note = 2'-O-methyl modified nucleotide with phosphorothioate linkage
  modified_base 117: mod_base = OTHER; note = 2'-O-methyl modified nucleotide
gagaatcaaaatcggtgaatgttttagagctagaaatagcaagttaaaataaggctagtccgttatcaacttgaaaaagtggcaccgagtcggtgccaagtctgtctcaccgatttt

SEQ ID NO: 16149 - RNA, 116 nt, synthetic construct
  source 1..116: mol_type = other RNA
  modified_base 1: mod_base = OTHER; note = 2'-O-methyl modified nucleotide with phosphorothioate linkage
  modified_base 2: mod_base = OTHER; note = 2'-O-methyl modified nucleotide with phosphorothioate linkage
  modified_base 3: mod_base = OTHER; note = 2'-O-methyl modified nucleotide with phosphorothioate linkage
  modified_base 29: mod_base = OTHER; note = 2'-O-methyl modified nucleotide
  modified_base 30: mod_base = OTHER; note = 2'-O-methyl modified nucleotide
  modified_base 31: mod_base = OTHER; note = 2'-O-methyl modified nucleotide
  modified_base 32: mod_base = OTHER; note = 2'-O-methyl modified nucleotide
  modified_base 33: mod_base = OTHER; note = 2'-O-methyl modified nucleotide
  modified_base 34: mod_base = OTHER; note = 2'-O-methyl modified nucleotide
  modified_base 35: mod_base = OTHER; note = 2'-O-methyl modified nucleotide
  modified_base 36: mod_base = OTHER; note = 2'-O-methyl modified nucleotide
  modified_base 37: mod_base = OTHER; note = 2'-O-methyl modified nucleotide
  modified_base 38: mod_base = OTHER; note = 2'-O-methyl modified nucleotide
  modified_base 39: mod_base = OTHER; note = 2'-O-methyl modified nucleotide
  modified_base 40: mod_base = OTHER; note = 2'-O-methyl modified nucleotide
  modified_base 69: mod_base = OTHER; note = 2'-O-methyl modified nucleotide
  modified_base 70: mod_base = OTHER; note = 2'-O-methyl modified nucleotide
  modified_base 71: mod_base = OTHER; note = 2'-O-methyl modified nucleotide
  modified_base 72: mod_base = OTHER; note = 2'-O-methyl modified nucleotide
  modified_base 73: mod_base = OTHER; note = 2'-O-methyl modified nucleotide
  modified_base 74: mod_base = OTHER; note = 2'-O-methyl modified nucleotide
  modified_base 75: mod_base = OTHER; note = 2'-O-methyl modified nucleotide
  modified_base 76: mod_base = OTHER; note = 2'-O-methyl modified nucleotide
  modified_base 77: mod_base = OTHER; note = 2'-O-methyl modified nucleotide
  modified_base 78: mod_base = OTHER; note = 2'-O-methyl modified nucleotide
  modified_base 79: mod_base = OTHER; note = 2'-O-methyl modified nucleotide
  modified_base 80: mod_base = OTHER; note = 2'-O-methyl modified nucleotide
  modified_base 81: mod_base = OTHER; note = 2'-O-methyl modified nucleotide
  modified_base 82: mod_base = OTHER; note = 2'-O-methyl modified nucleotide
  modified_base 83: mod_base = OTHER; note = 2'-O-methyl modified nucleotide
  modified_base 84: mod_base = OTHER; note = 2'-O-methyl modified nucleotide
  modified_base 85: mod_base = OTHER; note = 2'-O-methyl modified nucleotide
  modified_base 86: mod_base = OTHER; note = 2'-O-methyl modified nucleotide
  modified_base 87: mod_base = OTHER; note = 2'-O-methyl modified nucleotide
  modified_base 88: mod_base = OTHER; note = 2'-O-methyl modified nucleotide
  modified_base 89: mod_base = OTHER; note = 2'-O-methyl modified nucleotide
  modified_base 90: mod_base = OTHER; note = 2'-O-methyl modified nucleotide
  modified_base 91: mod_base = OTHER; note = 2'-O-methyl modified nucleotide
  modified_base 92: mod_base = OTHER; note = 2'-O-methyl modified nucleotide
  modified_base 93: mod_base = OTHER; note = 2'-O-methyl modified nucleotide
  modified_base 94: mod_base = OTHER; note = 2'-O-methyl modified nucleotide
  modified_base 95: mod_base = OTHER; note = 2'-O-methyl modified nucleotide
  modified_base 96: mod_base = OTHER; note = 2'-O-methyl modified nucleotide
  modified_base 113: mod_base = OTHER; note = Nucleotide with phosphorothioate linkage
  modified_base 114: mod_base = OTHER; note = 2'-O-methyl modified nucleotide with phosphorothioate linkage
  modified_base 115: mod_base = OTHER; note = 2'-O-methyl modified nucleotide with phosphorothioate linkage
  modified_base 116: mod_base = OTHER; note = 2'-O-methyl modified nucleotide
gagaatcaaaatcggtgaatgttttagagctagaaatagcaagttaaaataaggctagtccgttatcaacttgaaaaagtggcaccgagtcggtgccaagtctgtctcaccgattt

SEQ ID NO: 16150 - RNA, 115 nt, synthetic construct
  source 1..115: mol_type = other RNA
  modified_base 1: mod_base = OTHER; note = 2'-O-methyl modified nucleotide with phosphorothioate linkage
  modified_base 2: mod_base = OTHER; note = 2'-O-methyl modified nucleotide with phosphorothioate linkage
  modified_base 3: mod_base = OTHER; note = 2'-O-methyl modified nucleotide with phosphorothioate linkage
  modified_base 29: mod_base = OTHER; note = 2'-O-methyl modified nucleotide
  modified_base 30: mod_base = OTHER; note = 2'-O-methyl modified nucleotide
  modified_base 31: mod_base = OTHER; note = 2'-O-methyl modified nucleotide
  modified_base 32: mod_base = OTHER; note = 2'-O-methyl modified nucleotide
  modified_base 33: mod_base = OTHER; note = 2'-O-methyl modified nucleotide
  modified_base 34: mod_base = OTHER; note = 2'-O-methyl modified nucleotide
  modified_base 35: mod_base = OTHER; note = 2'-O-methyl modified nucleotide
  modified_base 36: mod_base = OTHER; note = 2'-O-methyl modified nucleotide
  modified_base 37: mod_base = OTHER; note = 2'-O-methyl modified nucleotide
  modified_base 38: mod_base = OTHER; note = 2'-O-methyl modified nucleotide
  modified_base 39: mod_base = OTHER; note = 2'-O-methyl modified nucleotide
  modified_base 40: mod_base = OTHER; note = 2'-O-methyl modified nucleotide
  modified_base 69: mod_base = OTHER; note = 2'-O-methyl modified nucleotide
  modified_base 70: mod_base = OTHER; note = 2'-O-methyl modified nucleotide
  modified_base 71: mod_base = OTHER; note = 2'-O-methyl modified nucleotide
  modified_base 72: mod_base = OTHER; note = 2'-O-methyl modified nucleotide
  modified_base 73: mod_base = OTHER; note = 2'-O-methyl modified nucleotide
  modified_base 74: mod_base = OTHER; note = 2'-O-methyl modified nucleotide
  modified_base 75: mod_base = OTHER; note = 2'-O-methyl modified nucleotide
  modified_base 76: mod_base = OTHER; note = 2'-O-methyl modified nucleotide
  modified_base 77: mod_base = OTHER; note = 2'-O-methyl modified nucleotide
  modified_base 78: mod_base = OTHER; note = 2'-O-methyl modified nucleotide
  modified_base 79: mod_base = OTHER; note = 2'-O-methyl modified nucleotide
  modified_base 80: mod_base = OTHER; note = 2'-O-methyl modified nucleotide
  modified_base 81: mod_base = OTHER; note = 2'-O-methyl modified nucleotide
  modified_base 82: mod_base = OTHER; note = 2'-O-methyl modified nucleotide
  modified_base 83: mod_base = OTHER; note = 2'-O-methyl modified nucleotide
  modified_base 84: mod_base = OTHER; note = 2'-O-methyl modified nucleotide
  modified_base 85: mod_base = OTHER; note = 2'-O-methyl modified nucleotide
  modified_base 86: mod_base = OTHER; note = 2'-O-methyl modified nucleotide
  modified_base 87: mod_base = OTHER; note = 2'-O-methyl modified nucleotide
  modified_base 88: mod_base = OTHER; note = 2'-O-methyl modified nucleotide
  modified_base 89: mod_base = OTHER; note = 2'-O-methyl modified nucleotide
  modified_base 90: mod_base = OTHER; note = 2'-O-methyl modified nucleotide
  modified_base 91: mod_base = OTHER; note = 2'-O-methyl modified nucleotide
  modified_base 92: mod_base = OTHER; note = 2'-O-methyl modified nucleotide
  modified_base 93: mod_base = OTHER; note = 2'-O-methyl modified nucleotide
  modified_base 94: mod_base = OTHER; note = 2'-O-methyl modified nucleotide
  modified_base 95: mod_base = OTHER; note = 2'-O-methyl modified nucleotide
  modified_base 96: mod_base = OTHER; note = 2'-O-methyl modified nucleotide
  modified_base 112: mod_base = OTHER; note = Nucleotide with phosphorothioate linkage
  modified_base 113: mod_base = OTHER; note = 2'-O-methyl modified nucleotide with phosphorothioate linkage
  modified_base 114: mod_base = OTHER; note = 2'-O-methyl modified nucleotide with phosphorothioate linkage
  modified_base 115: mod_base = OTHER; note = 2'-O-methyl modified nucleotide
gagaatcaaaatcggtgaatgttttagagctagaaatagcaagttaaaataaggctagtccgttatcaacttgaaaaagtggcaccgagtcggtgccaagtctgtctcaccgatt

SEQ ID NO: 16151 - RNA, 122 nt, synthetic construct
  source 1..122: mol_type = other RNA
  modified_base 1: mod_base = OTHER; note = 2'-O-methyl modified nucleotide with phosphorothioate linkage
  modified_base 2: mod_base = OTHER; note = 2'-O-methyl modified nucleotide with phosphorothioate linkage
  modified_base 3: mod_base = OTHER; note = 2'-O-methyl modified nucleotide with phosphorothioate linkage
  modified_base 29: mod_base = OTHER; note = 2'-O-methyl modified nucleotide
  modified_base 30: mod_base = OTHER; note = 2'-O-methyl modified nucleotide
  modified_base 31: mod_base = OTHER; note = 2'-O-methyl modified nucleotide
  modified_base 32: mod_base = OTHER; note = 2'-O-methyl modified nucleotide
  modified_base 33: mod_base = OTHER; note = 2'-O-methyl modified nucleotide
  modified_base 34: mod_base = OTHER; note = 2'-O-methyl modified nucleotide
  modified_base 35: mod_base = OTHER; note = 2'-O-methyl modified nucleotide
  modified_base 36: mod_base = OTHER; note = 2'-O-methyl modified nucleotide
  modified_base 37: mod_base = OTHER; note = 2'-O-methyl modified nucleotide
  modified_base 38: mod_base = OTHER; note = 2'-O-methyl modified nucleotide
  modified_base 39: mod_base = OTHER; note = 2'-O-methyl modified nucleotide
  modified_base 40: mod_base = OTHER; note = 2'-O-methyl modified nucleotide
  modified_base 69: mod_base = OTHER; note = 2'-O-methyl modified nucleotide
  modified_base 70: mod_base = OTHER; note = 2'-O-methyl modified nucleotide
  modified_base 71: mod_base = OTHER; note = 2'-O-methyl modified nucleotide
  modified_base 72: mod_base = OTHER; note = 2'-O-methyl modified nucleotide
  modified_base 73: mod_base = OTHER; note = 2'-O-methyl modified nucleotide
  modified_base 74: mod_base = OTHER; note = 2'-O-methyl modified nucleotide
  modified_base 75: mod_base = OTHER; note = 2'-O-methyl modified nucleotide
  modified_base 76: mod_base = OTHER; note = 2'-O-methyl modified nucleotide
  modified_base 77: mod_base = OTHER; note = 2'-O-methyl modified nucleotide
  modified_base 78: mod_base = OTHER; note = 2'-O-methyl modified nucleotide
  modified_base 79: mod_base = OTHER; note = 2'-O-methyl modified nucleotide
  modified_base 80: mod_base = OTHER; note = 2'-O-methyl modified nucleotide
  modified_base 81: mod_base = OTHER; note = 2'-O-methyl modified nucleotide
  modified_base 82: mod_base = OTHER; note = 2'-O-methyl modified nucleotide
  modified_base 83: mod_base = OTHER; note = 2'-O-methyl modified nucleotide
  modified_base 84: mod_base = OTHER; note = 2'-O-methyl modified nucleotide
  modified_base 85: mod_base = OTHER; note = 2'-O-methyl modified nucleotide
  modified_base 86: mod_base = OTHER; note = 2'-O-methyl modified nucleotide
  modified_base 87: mod_base = OTHER; note = 2'-O-methyl modified nucleotide
  modified_base 88: mod_base = OTHER; note = 2'-O-methyl modified nucleotide
  modified_base 89: mod_base = OTHER; note = 2'-O-methyl modified nucleotide
  modified_base 90: mod_base = OTHER; note = 2'-O-methyl modified nucleotide
  modified_base 91: mod_base = OTHER; note = 2'-O-methyl modified nucleotide
  modified_base 92: mod_base = OTHER; note = 2'-O-methyl modified nucleotide
  modified_base 93: mod_base = OTHER; note = 2'-O-methyl modified nucleotide
  modified_base 94: mod_base = OTHER; note = 2'-O-methyl modified nucleotide
  modified_base 95: mod_base = OTHER; note = 2'-O-methyl modified nucleotide
  modified_base 96: mod_base = OTHER; note = 2'-O-methyl modified nucleotide
  modified_base 119: mod_base = OTHER; note = Nucleotide with phosphorothioate linkage
  modified_base 120: mod_base = OTHER; note = 2'-O-methyl modified nucleotide with phosphorothioate linkage
  modified_base 121: mod_base = OTHER; note = 2'-O-methyl modified nucleotide with phosphorothioate linkage
  modified_base 122: mod_base = OTHER; note = 2'-O-methyl modified nucleotide
gagaatcaaaatcggtgaatgttttagagctagaaatagcaagttaaaataaggctagtccgttatcaacttgaaaaagtggcaccgagtcggtgcgacaagtctgtctcaccgattttgat

SEQ ID NO: 16152 - RNA, 121 nt, synthetic construct
  source 1..121: mol_type = other RNA
  modified_base 1: mod_base = OTHER; note = 2'-O-methyl modified nucleotide with phosphorothioate linkage
  modified_base 2: mod_base = OTHER; note = 2'-O-methyl modified nucleotide with phosphorothioate linkage
  modified_base 3: mod_base = OTHER; note = 2'-O-methyl modified nucleotide with phosphorothioate linkage
  modified_base 29: mod_base = OTHER; note = 2'-O-methyl modified nucleotide
  modified_base 30: mod_base = OTHER; note = 2'-O-methyl modified nucleotide
  modified_base 31: mod_base = OTHER; note = 2'-O-methyl modified nucleotide
  modified_base 32: mod_base = OTHER; note = 2'-O-methyl modified nucleotide
  modified_base 33: mod_base = OTHER; note = 2'-O-methyl modified nucleotide
  modified_base 34: mod_base = OTHER; note = 2'-O-methyl modified nucleotide
  modified_base 35: mod_base = OTHER; note = 2'-O-methyl modified nucleotide
  modified_base 36: mod_base = OTHER; note = 2'-O-methyl modified nucleotide
  modified_base 37: mod_base = OTHER; note = 2'-O-methyl modified nucleotide
  modified_base 38: mod_base = OTHER; note = 2'-O-methyl modified nucleotide
  modified_base 39: mod_base = OTHER; note = 2'-O-methyl modified nucleotide
  modified_base 40: mod_base = OTHER; note = 2'-O-methyl modified nucleotide
  modified_base 69: mod_base = OTHER; note = 2'-O-methyl modified nucleotide
  modified_base 70: mod_base = OTHER; note = 2'-O-methyl modified nucleotide
  modified_base 71: mod_base = OTHER; note = 2'-O-methyl modified nucleotide
  modified_base 72: mod_base = OTHER; note = 2'-O-methyl modified nucleotide
  modified_base 73: mod_base = OTHER; note = 2'-O-methyl modified nucleotide
  modified_base 74: mod_base = OTHER; note = 2'-O-methyl modified nucleotide
  modified_base 75: mod_base = OTHER; note = 2'-O-methyl modified nucleotide
  modified_base 76: mod_base = OTHER; note = 2'-O-methyl modified nucleotide
  modified_base 77: mod_base = OTHER; note = 2'-O-methyl modified nucleotide
  modified_base 78: mod_base = OTHER; note = 2'-O-methyl modified nucleotide
  modified_base 79: mod_base = OTHER; note = 2'-O-methyl modified nucleotide
  modified_base 80: mod_base = OTHER; note = 2'-O-methyl modified nucleotide
  modified_base 81: mod_base = OTHER; note = 2'-O-methyl modified nucleotide
  modified_base 82: mod_base = OTHER; note = 2'-O-methyl modified nucleotide
  modified_base 83: mod_base = OTHER; note = 2'-O-methyl modified nucleotide
  modified_base 84: mod_base = OTHER; note = 2'-O-methyl modified nucleotide
  modified_base 85: mod_base = OTHER; note = 2'-O-methyl modified nucleotide
  modified_base 86: mod_base = OTHER; note = 2'-O-methyl modified nucleotide
  modified_base 87: mod_base = OTHER; note = 2'-O-methyl modified nucleotide
  modified_base 88: mod_base = OTHER; note = 2'-O-methyl modified nucleotide
  modified_base 89: mod_base = OTHER; note = 2'-O-methyl modified nucleotide
  modified_base 90: mod_base = OTHER; note = 2'-O-methyl modified nucleotide
  modified_base 91: mod_base = OTHER; note = 2'-O-methyl modified nucleotide
  modified_base 92: mod_base = OTHER; note = 2'-O-methyl modified nucleotide
  modified_base 93: mod_base = OTHER; note = 2'-O-methyl modified nucleotide
  modified_base 94: mod_base = OTHER; note = 2'-O-methyl modified nucleotide
  modified_base 95: mod_base = OTHER; note = 2'-O-methyl modified nucleotide
  modified_base 96: mod_base = OTHER; note = 2'-O-methyl modified nucleotide
  modified_base 118: mod_base = OTHER; note = Nucleotide with phosphorothioate linkage
  modified_base 119: mod_base = OTHER; note = 2'-O-methyl modified nucleotide with phosphorothioate linkage
  modified_base 120: mod_base = OTHER; note = 2'-O-methyl modified nucleotide with phosphorothioate linkage
  modified_base 121: mod_base = OTHER; note = 2'-O-methyl modified nucleotide
gagaatcaaaatcggtgaatgttttagagctagaaatagcaagttaaaataaggctagtccgttatcaacttgaaaaagtggcaccgagtcggtgcgacaagtctgtctcaccgattttga

SEQ ID NO: 16153 - RNA, 120 nt, synthetic construct
  source 1..120: mol_type = other RNA
  modified_base 1: mod_base = OTHER; note = 2'-O-methyl modified nucleotide with phosphorothioate linkage
  modified_base 2: mod_base = OTHER; note = 2'-O-methyl modified nucleotide with phosphorothioate linkage
  modified_base 3: mod_base = OTHER; note = 2'-O-methyl modified nucleotide with phosphorothioate linkage
  modified_base 29: mod_base = OTHER; note = 2'-O-methyl modified nucleotide
  modified_base 30: mod_base = OTHER; note = 2'-O-methyl modified nucleotide
  modified_base 31: mod_base = OTHER; note = 2'-O-methyl modified nucleotide
  modified_base 32: mod_base = OTHER; note = 2'-O-methyl modified nucleotide
  modified_base 33: mod_base = OTHER; note = 2'-O-methyl modified nucleotide
  modified_base 34: mod_base = OTHER; note = 2'-O-methyl modified nucleotide
  modified_base 35: mod_base = OTHER; note = 2'-O-methyl modified nucleotide
  modified_base 36: mod_base = OTHER; note = 2'-O-methyl modified nucleotide
  modified_base 37: mod_base = OTHER; note = 2'-O-methyl modified nucleotide
  modified_base 38: mod_base = OTHER; note = 2'-O-methyl modified nucleotide
  modified_base 39: mod_base = OTHER; note = 2'-O-methyl modified nucleotide
  modified_base 40: mod_base = OTHER; note = 2'-O-methyl modified nucleotide
  modified_base 69: mod_base = OTHER; note = 2'-O-methyl modified nucleotide
  modified_base 70: mod_base = OTHER; note = 2'-O-methyl modified nucleotide
  modified_base 71: mod_base = OTHER; note = 2'-O-methyl modified nucleotide
  modified_base 72: mod_base = OTHER; note = 2'-O-methyl modified nucleotide
  modified_base 73: mod_base = OTHER; note = 2'-O-methyl modified nucleotide
  modified_base 74: mod_base = OTHER; note = 2'-O-methyl modified nucleotide
  modified_base 75: mod_base = OTHER; note = 2'-O-methyl modified nucleotide
  modified_base 76: mod_base = OTHER; note = 2'-O-methyl modified nucleotide
  modified_base 77: mod_base = OTHER; note = 2'-O-methyl modified nucleotide
  modified_base 78: mod_base = OTHER; note = 2'-O-methyl modified nucleotide
  modified_base 79: mod_base = OTHER; note = 2'-O-methyl modified nucleotide
  modified_base 80: mod_base = OTHER; note = 2'-O-methyl modified nucleotide
  modified_base 81: mod_base = OTHER; note = 2'-O-methyl modified nucleotide
  modified_base 82: mod_base = OTHER; note = 2'-O-methyl modified nucleotide
  modified_base 83: mod_base = OTHER; note = 2'-O-methyl modified nucleotide
  modified_base 84: mod_base = OTHER; note = 2'-O-methyl modified nucleotide
  modified_base 85: mod_base = OTHER; note = 2'-O-methyl modified nucleotide
  modified_base 86: mod_base = OTHER; note = 2'-O-methyl modified nucleotide
  modified_base 87: mod_base = OTHER; note = 2'-O-methyl modified nucleotide
  modified_base 88: mod_base = OTHER; note = 2'-O-methyl modified nucleotide
  modified_base 89: mod_base = OTHER; note = 2'-O-methyl modified nucleotide
  modified_base 90: mod_base = OTHER; note = 2'-O-methyl modified nucleotide
  modified_base 91: mod_base = OTHER; note = 2'-O-methyl modified nucleotide
  modified_base 92: mod_base = OTHER; note = 2'-O-methyl modified nucleotide
  modified_base 93: mod_base = OTHER; note = 2'-O-methyl modified nucleotide
  modified_base 94: mod_base = OTHER; note = 2'-O-methyl modified nucleotide
  modified_base 95: mod_base = OTHER; note = 2'-O-methyl modified nucleotide
  modified_base 96: mod_base = OTHER; note = 2'-O-methyl modified nucleotide
  modified_base 117: mod_base = OTHER; note = Nucleotide with phosphorothioate linkage
  modified_base 118: mod_base = OTHER; note = 2'-O-methyl modified nucleotide with phosphorothioate linkage
  modified_base 119: mod_base = OTHER; note = 2'-O-methyl modified nucleotide with phosphorothioate linkage
  modified_base 120: mod_base = OTHER; note = 2'-O-methyl modified nucleotide
gagaatcaaaatcggtgaatgttttagagctagaaatagcaagttaaaataaggctagtccgttatcaacttgaaaaagtggcaccgagtcggtgcgacaagtctgtctcaccgattttg

SEQ ID NO: 16154 - RNA, 119 nt, synthetic construct
  source 1..119: mol_type = other RNA
  modified_base 1: mod_base = OTHER; note = 2'-O-methyl modified nucleotide with phosphorothioate linkage
  modified_base 2: mod_base = OTHER; note = 2'-O-methyl modified nucleotide with phosphorothioate linkage
  modified_base 3: mod_base = OTHER; note = 2'-O-methyl modified nucleotide with phosphorothioate linkage
  modified_base 29: mod_base = OTHER; note = 2'-O-methyl modified nucleotide
  modified_base 30: mod_base = OTHER; note = 2'-O-methyl modified nucleotide
  modified_base 31: mod_base = OTHER; note = 2'-O-methyl modified nucleotide
  modified_base 32: mod_base = OTHER; note = 2'-O-methyl modified nucleotide
  modified_base 33: mod_base = OTHER; note = 2'-O-methyl modified nucleotide
  modified_base 34: mod_base = OTHER; note = 2'-O-methyl modified nucleotide
  modified_base 35: mod_base = OTHER; note = 2'-O-methyl modified nucleotide
  modified_base 36: mod_base = OTHER; note = 2'-O-methyl modified nucleotide
  modified_base 37: mod_base = OTHER; note = 2'-O-methyl modified nucleotide
  modified_base 38: mod_base = OTHER; note = 2'-O-methyl modified nucleotide
  modified_base 39: mod_base = OTHER; note = 2'-O-methyl modified nucleotide
  modified_base 40: mod_base = OTHER; note = 2'-O-methyl modified nucleotide
  modified_base 69: mod_base = OTHER; note = 2'-O-methyl modified nucleotide
  modified_base 70: mod_base = OTHER; note = 2'-O-methyl modified nucleotide
  modified_base 71: mod_base = OTHER; note = 2'-O-methyl modified nucleotide
  modified_base 72: mod_base = OTHER; note = 2'-O-methyl modified nucleotide
  modified_base 73: mod_base = OTHER; note = 2'-O-methyl modified nucleotide
  modified_base 74: mod_base = OTHER; note = 2'-O-methyl modified nucleotide
  modified_base 75: mod_base = OTHER; note = 2'-O-methyl modified nucleotide
  modified_base 76: mod_base = OTHER; note = 2'-O-methyl modified nucleotide
  modified_base 77: mod_base = OTHER; note = 2'-O-methyl modified nucleotide
  modified_base 78: mod_base = OTHER; note = 2'-O-methyl modified nucleotide
  modified_base 79: mod_base = OTHER; note = 2'-O-methyl modified nucleotide
  modified_base 80: mod_base = OTHER; note = 2'-O-methyl modified nucleotide
  modified_base 81: mod_base = OTHER; note = 2'-O-methyl modified nucleotide
  modified_base 82: mod_base = OTHER; note = 2'-O-methyl modified nucleotide
  modified_base 83: mod_base = OTHER; note = 2'-O-methyl modified nucleotide
  modified_base 84: mod_base = OTHER; note = 2'-O-methyl modified nucleotide
  modified_base 85: mod_base = OTHER; note = 2'-O-methyl modified nucleotide
  modified_base 86: mod_base = OTHER; note = 2'-O-methyl modified nucleotide
  modified_base 87: mod_base = OTHER; note = 2'-O-methyl modified nucleotide
  modified_base 88: mod_base = OTHER; note = 2'-O-methyl modified nucleotide
  modified_base 89: mod_base = OTHER; note = 2'-O-methyl modified nucleotide
  modified_base 90: mod_base = OTHER; note = 2'-O-methyl modified nucleotide
  modified_base 91: mod_base = OTHER; note = 2'-O-methyl modified nucleotide
  modified_base 92: mod_base = OTHER; note = 2'-O-methyl modified nucleotide
  modified_base 93: mod_base = OTHER; note = 2'-O-methyl modified nucleotide
  modified_base 94: mod_base = OTHER; note = 2'-O-methyl modified nucleotide
  modified_base 95: mod_base = OTHER; note = 2'-O-methyl modified nucleotide
  modified_base 96: mod_base = OTHER; note = 2'-O-methyl modified nucleotide
  modified_base 116: mod_base = OTHER; note = Nucleotide with phosphorothioate linkage
  modified_base 117: mod_base = OTHER; note = 2'-O-methyl modified nucleotide with phosphorothioate linkage
  modified_base 118: mod_base = OTHER; note = 2'-O-methyl modified nucleotide with phosphorothioate linkage
  modified_base 119: mod_base = OTHER; note = 2'-O-methyl modified nucleotide
gagaatcaaaatcggtgaatgttttagagctagaaatagcaagttaaaataaggctagtccgttatcaacttgaaaaagtggcaccgagtcggtgcgacaagtctgtctcaccgatttt

SEQ ID NO: 16155 - RNA, 118 nt, synthetic construct
  source 1..118: mol_type = other RNA
  modified_base 1: mod_base = OTHER; note = 2'-O-methyl modified nucleotide with phosphorothioate linkage
  modified_base 2: mod_base = OTHER; note = 2'-O-methyl modified nucleotide with phosphorothioate linkage
  modified_base 3: mod_base = OTHER; note = 2'-O-methyl modified nucleotide with phosphorothioate linkage
  modified_base 29: mod_base = OTHER; note = 2'-O-methyl modified nucleotide
  modified_base 30: mod_base = OTHER; note = 2'-O-methyl modified nucleotide
  modified_base 31: mod_base = OTHER; note = 2'-O-methyl modified nucleotide
  modified_base 32: mod_base = OTHER; note = 2'-O-methyl modified nucleotide
  modified_base 33: mod_base = OTHER; note = 2'-O-methyl modified nucleotide
  modified_base 34: mod_base = OTHER; note = 2'-O-methyl modified nucleotide
  modified_base 35: mod_base = OTHER; note = 2'-O-methyl modified nucleotide
  modified_base 36: mod_base = OTHER; note = 2'-O-methyl modified nucleotide
  modified_base 37: mod_base = OTHER; note = 2'-O-methyl modified nucleotide
  modified_base 38: mod_base = OTHER; note = 2'-O-methyl modified nucleotide
  modified_base 39: mod_base = OTHER; note = 2'-O-methyl modified nucleotide
  modified_base 40: mod_base = OTHER; note = 2'-O-methyl modified nucleotide
  modified_base 69: mod_base = OTHER; note = 2'-O-methyl modified nucleotide
  modified_base 70: mod_base = OTHER; note = 2'-O-methyl modified nucleotide
  modified_base 71: mod_base = OTHER; note = 2'-O-methyl modified nucleotide
  modified_base 72: mod_base = OTHER; note = 2'-O-methyl modified nucleotide
  modified_base 73: mod_base = OTHER; note = 2'-O-methyl modified nucleotide
  modified_base 74: mod_base = OTHER; note = 2'-O-methyl modified nucleotide
  modified_base 75: mod_base = OTHER; note = 2'-O-methyl modified nucleotide
  modified_base 76: mod_base = OTHER; note = 2'-O-methyl modified nucleotide
  modified_base 77: mod_base = OTHER; note = 2'-O-methyl modified nucleotide
  modified_base 78: mod_base = OTHER; note = 2'-O-methyl modified nucleotide
  modified_base 79: mod_base = OTHER; note = 2'-O-methyl modified nucleotide
  modified_base 80: mod_base = OTHER; note = 2'-O-methyl modified nucleotide
  modified_base 81: mod_base = OTHER; note = 2'-O-methyl modified nucleotide
  modified_base 82: mod_base = OTHER; note = 2'-O-methyl modified nucleotide
  modified_base 83: mod_base = OTHER; note = 2'-O-methyl modified nucleotide
  modified_base 84: mod_base = OTHER; note = 2'-O-methyl modified nucleotide
  modified_base 85: mod_base = OTHER; note = 2'-O-methyl modified nucleotide
  modified_base 86: mod_base = OTHER; note = 2'-O-methyl modified nucleotide
  modified_base 87: mod_base = OTHER; note = 2'-O-methyl modified nucleotide
  modified_base 88: mod_base = OTHER; note = 2'-O-methyl modified nucleotide
  modified_base 89: mod_base = OTHER; note = 2'-O-methyl modified nucleotide
  modified_base 90: mod_base = OTHER; note = 2'-O-methyl modified nucleotide
  modified_base 91: mod_base = OTHER; note = 2'-O-methyl modified nucleotide
  modified_base 92: mod_base = OTHER; note = 2'-O-methyl modified nucleotide
  modified_base 93: mod_base = OTHER; note = 2'-O-methyl modified nucleotide
  modified_base 94: mod_base = OTHER; note = 2'-O-methyl modified nucleotide
  modified_base 95: mod_base = OTHER; note = 2'-O-methyl modified nucleotide
  modified_base 96: mod_base = OTHER; note = 2'-O-methyl modified nucleotide
  modified_base 115: mod_base = OTHER; note = Nucleotide with phosphorothioate linkage
  modified_base 116: mod_base = OTHER; note = 2'-O-methyl modified nucleotide with phosphorothioate linkage
  modified_base 117: mod_base = OTHER; note = 2'-O-methyl modified nucleotide with phosphorothioate linkage
  modified_base 118: mod_base = OTHER; note = 2'-O-methyl modified nucleotide
gagaatcaaaatcggtgaatgttttagagctagaaatagcaagttaaaataaggctagtccgttatcaacttgaaaaagtggcaccgagtcggtgcgacaagtctgtctcaccgattt

SEQ ID NO: 16156 - RNA, 117 nt, synthetic construct
  source 1..117: mol_type = other RNA
  modified_base 1: mod_base = OTHER; note = 2'-O-methyl modified nucleotide with phosphorothioate linkage
  modified_base 2: mod_base = OTHER; note = 2'-O-methyl modified nucleotide with phosphorothioate linkage
  modified_base 3: mod_base = OTHER; note = 2'-O-methyl modified nucleotide with phosphorothioate linkage
  modified_base 29: mod_base = OTHER; note = 2'-O-methyl modified nucleotide
  modified_base 30: mod_base = OTHER; note = 2'-O-methyl modified nucleotide
  modified_base 31: mod_base = OTHER; note = 2'-O-methyl modified nucleotide
  modified_base 32: mod_base = OTHER; note = 2'-O-methyl modified nucleotide
  modified_base 33: mod_base = OTHER; note = 2'-O-methyl modified nucleotide
  modified_base 34: mod_base = OTHER; note = 2'-O-methyl modified nucleotide
  modified_base 35: mod_base = OTHER; note = 2'-O-methyl modified nucleotide
  modified_base 36: mod_base = OTHER; note = 2'-O-methyl modified nucleotide
  modified_base 37: mod_base = OTHER; note = 2'-O-methyl modified nucleotide
  modified_base 38: mod_base = OTHER; note = 2'-O-methyl modified nucleotide
  modified_base 39: mod_base = OTHER; note = 2'-O-methyl modified nucleotide
  modified_base 40: mod_base = OTHER; note = 2'-O-methyl modified nucleotide
  modified_base 69: mod_base = OTHER; note = 2'-O-methyl modified nucleotide
  modified_base 70: mod_base = OTHER; note = 2'-O-methyl modified nucleotide
  modified_base 71: mod_base = OTHER; note = 2'-O-methyl modified nucleotide
  modified_base 72: mod_base = OTHER; note = 2'-O-methyl modified nucleotide
  modified_base 73: mod_base = OTHER; note = 2'-O-methyl modified nucleotide
  modified_base 74: mod_base = OTHER; note = 2'-O-methyl modified nucleotide
  modified_base 75: mod_base = OTHER; note = 2'-O-methyl modified nucleotide
  modified_base 76: mod_base = OTHER; note = 2'-O-methyl modified nucleotide
  modified_base 77: mod_base = OTHER; note = 2'-O-methyl modified nucleotide
  modified_base 78: mod_base = OTHER; note = 2'-O-methyl modified nucleotide
  modified_base 79: mod_base = OTHER; note = 2'-O-methyl modified nucleotide
  modified_base 80: mod_base = OTHER; note = 2'-O-methyl modified nucleotide
  modified_base 81: mod_base = OTHER; note = 2'-O-methyl modified nucleotide
  modified_base 82: mod_base = OTHER; note = 2'-O-methyl modified nucleotide
  modified_base 83: mod_base = OTHER; note = 2'-O-methyl modified nucleotide
  modified_base 84: mod_base = OTHER; note = 2'-O-methyl modified nucleotide
  modified_base 85: mod_base = OTHER; note = 2'-O-methyl modified nucleotide
  modified_base 86: mod_base = OTHER; note = 2'-O-methyl modified nucleotide
  modified_base 87: mod_base = OTHER; note = 2'-O-methyl modified nucleotide
  modified_base 88: mod_base = OTHER; note = 2'-O-methyl modified nucleotide
  modified_base 89: mod_base = OTHER; note = 2'-O-methyl modified nucleotide
  modified_base 90: mod_base = OTHER; note = 2'-O-methyl modified nucleotide
  modified_base 91: mod_base = OTHER; note = 2'-O-methyl modified nucleotide
  modified_base 92: mod_base = OTHER; note = 2'-O-methyl modified nucleotide
  modified_base 93: mod_base = OTHER; note = 2'-O-methyl modified nucleotide
  modified_base 94: mod_base = OTHER; note = 2'-O-methyl modified nucleotide
  modified_base 95: mod_base = OTHER; note = 2'-O-methyl modified nucleotide
  modified_base 96: mod_base = OTHER; note = 2'-O-methyl modified nucleotide
  modified_base 114: mod_base = OTHER; note = Nucleotide with phosphorothioate linkage
  modified_base 115: mod_base = OTHER; note = 2'-O-methyl modified nucleotide with phosphorothioate linkage
  modified_base 116: mod_base = OTHER; note = 2'-O-methyl modified nucleotide with phosphorothioate linkage
  modified_base 117: mod_base = OTHER; note = 2'-O-methyl modified nucleotide
gagaatcaaaatcggtgaatgttttagagctagaaatagcaagttaaaataaggctagtccgttatcaacttgaaaaagtggcaccgagtcggtgcgacaagtctgtctcaccgatt

SEQ ID NO: 16157 - RNA, 124 nt, synthetic construct
  source 1..124: mol_type = other RNA
  modified_base 1: mod_base = OTHER; note = 2'-O-methyl modified nucleotide with phosphorothioate linkage
  modified_base 2: mod_base = OTHER; note = 2'-O-methyl modified nucleotide with phosphorothioate linkage
  modified_base 3: mod_base = OTHER; note = 2'-O-methyl modified nucleotide with phosphorothioate linkage
  modified_base 29: mod_base = OTHER; note = 2'-O-methyl modified nucleotide
  modified_base 30: mod_base = OTHER; note = 2'-O-methyl modified nucleotide
  modified_base 31: mod_base = OTHER; note = 2'-O-methyl modified nucleotide
  modified_base 32: mod_base = OTHER; note = 2'-O-methyl modified nucleotide
  modified_base 33: mod_base = OTHER; note = 2'-O-methyl modified nucleotide
  modified_base 34: mod_base = OTHER; note = 2'-O-methyl modified nucleotide
  modified_base 35: mod_base = OTHER; note = 2'-O-methyl modified nucleotide
  modified_base 36: mod_base = OTHER; note = 2'-O-methyl modified nucleotide
  modified_base 37: mod_base = OTHER; note = 2'-O-methyl modified nucleotide
  modified_base 38: mod_base = OTHER; note = 2'-O-methyl modified nucleotide
  modified_base 39: mod_base = OTHER; note = 2'-O-methyl modified nucleotide
  modified_base 40: mod_base = OTHER; note = 2'-O-methyl modified nucleotide
  modified_base 69: mod_base = OTHER; note = 2'-O-methyl modified nucleotide
  modified_base 70: mod_base = OTHER; note = 2'-O-methyl modified nucleotide
  modified_base 71: mod_base = OTHER; note = 2'-O-methyl modified nucleotide
  modified_base 72: mod_base = OTHER; note = 2'-O-methyl modified nucleotide
  modified_base 73: mod_base = OTHER; note = 2'-O-methyl modified nucleotide
  modified_base 74: mod_base = OTHER; note = 2'-O-methyl modified nucleotide
  modified_base 75: mod_base = OTHER; note = 2'-O-methyl modified nucleotide
  modified_base 76: mod_base = OTHER; note = 2'-O-methyl modified nucleotide
  modified_base 77: mod_base = OTHER; note = 2'-O-methyl modified nucleotide
  modified_base 78: mod_base = OTHER; note = 2'-O-methyl modified nucleotide
  modified_base 79: mod_base = OTHER; note = 2'-O-methyl modified nucleotide
  modified_base 80: mod_base = OTHER; note = 2'-O-methyl modified nucleotide
  modified_base 81: mod_base = OTHER; note = 2'-O-methyl modified nucleotide
  modified_base 82: mod_base = OTHER; note = 2'-O-methyl modified nucleotide
  modified_base 83: mod_base = OTHER; note = 2'-O-methyl modified nucleotide
  modified_base 84: mod_base = OTHER; note = 2'-O-methyl modified nucleotide
  modified_base 85: mod_base = OTHER; note = 2'-O-methyl modified nucleotide
  modified_base 86: mod_base = OTHER; note = 2'-O-methyl modified nucleotide
  modified_base 87: mod_base = OTHER; note = 2'-O-methyl modified nucleotide
  modified_base 88: mod_base = OTHER; note = 2'-O-methyl modified nucleotide
  modified_base 89: mod_base = OTHER; note = 2'-O-methyl modified nucleotide
  modified_base 90: mod_base = OTHER; note = 2'-O-methyl modified nucleotide
  modified_base 91: mod_base = OTHER; note = 2'-O-methyl modified nucleotide
  modified_base 92: mod_base = OTHER; note = 2'-O-methyl modified nucleotide
  modified_base 93: mod_base = OTHER; note = 2'-O-methyl modified nucleotide
  modified_base 94: mod_base = OTHER; note = 2'-O-methyl modified nucleotide
  modified_base 95: mod_base = OTHER; note = 2'-O-methyl modified nucleotide
  modified_base 96: mod_base = OTHER; note = 2'-O-methyl modified nucleotide
  modified_base 121: mod_base = OTHER; note = Nucleotide with phosphorothioate linkage
  modified_base 122: mod_base = OTHER; note = 2'-O-methyl modified nucleotide with phosphorothioate linkage
  modified_base 123: mod_base = OTHER; note = 2'-O-methyl modified nucleotide with phosphorothioate linkage
  modified_base 124: mod_base = OTHER; note = 2'-O-methyl modified nucleotide
gagaatcaaaatcggtgaatgttttagagctagaaatagcaagttaaaataaggctagtccgttatcaacttgaaaaagtggcaccgagtcggtgcgtgacaagtctgtctcaccgattttgat

SEQ ID NO: 16158 - RNA, 123 nt, synthetic construct
  source 1..123: mol_type = other RNA
  modified_base 1: mod_base = OTHER; note = 2'-O-methyl modified nucleotide with phosphorothioate linkage
  modified_base 2: mod_base = OTHER; note = 2'-O-methyl modified nucleotide with phosphorothioate linkage
  modified_base 3: mod_base = OTHER; note = 2'-O-methyl modified nucleotide with phosphorothioate linkage
  modified_base 29: mod_base = OTHER; note = 2'-O-methyl modified nucleotide
  modified_base 30: mod_base = OTHER; note = 2'-O-methyl modified nucleotide
  modified_base 31: mod_base = OTHER; note = 2'-O-methyl modified nucleotide
  modified_base 32: mod_base = OTHER; note = 2'-O-methyl modified nucleotide
  modified_base 33: mod_base = OTHER; note = 2'-O-methyl modified nucleotide
  modified_base 34: mod_base = OTHER; note = 2'-O-methyl modified nucleotide
  modified_base 35: mod_base = OTHER; note = 2'-O-methyl modified nucleotide
  modified_base 36: mod_base = OTHER; note = 2'-O-methyl modified nucleotide
  modified_base 37: mod_base = OTHER; note = 2'-O-methyl modified nucleotide
  modified_base 38: mod_base = OTHER; note = 2'-O-methyl modified nucleotide
  modified_base 39: mod_base = OTHER; note = 2'-O-methyl modified nucleotide
  modified_base 40: mod_base = OTHER; note = 2'-O-methyl modified nucleotide
  modified_base 69: mod_base = OTHER; note = 2'-O-methyl modified nucleotide
  modified_base 70: mod_base = OTHER; note = 2'-O-methyl modified nucleotide
  modified_base 71: mod_base = OTHER; note = 2'-O-methyl modified nucleotide
  modified_base 72: mod_base = OTHER; note = 2'-O-methyl modified nucleotide
  modified_base 73: mod_base = OTHER; note = 2'-O-methyl modified nucleotide
  modified_base 74: mod_base = OTHER; note = 2'-O-methyl modified nucleotide
  modified_base 75: mod_base = OTHER; note = 2'-O-methyl modified nucleotide
  modified_base 76: mod_base = OTHER; note = 2'-O-methyl modified nucleotide
  modified_base 77: mod_base = OTHER; note = 2'-O-methyl modified nucleotide
  modified_base 78: mod_base = OTHER; note = 2'-O-methyl modified nucleotide
  modified_base 79: mod_base = OTHER; note = 2'-O-methyl modified nucleotide
  modified_base 80: mod_base = OTHER; note = 2'-O-methyl modified nucleotide
  modified_base 81: mod_base = OTHER; note = 2'-O-methyl modified nucleotide
  modified_base 82: mod_base = OTHER; note = 2'-O-methyl modified nucleotide
  modified_base 83: mod_base = OTHER; note = 2'-O-methyl modified nucleotide
  modified_base 84: mod_base = OTHER; note = 2'-O-methyl modified nucleotide
  modified_base 85: mod_base = OTHER; note = 2'-O-methyl modified nucleotide
  modified_base 86: mod_base = OTHER; note = 2'-O-methyl modified nucleotide
  modified_base 87: mod_base = OTHER; note = 2'-O-methyl modified nucleotide
  modified_base 88: mod_base = OTHER; note = 2'-O-methyl modified nucleotide
  modified_base 89: mod_base = OTHER; note = 2'-O-methyl modified nucleotide
  modified_base 90: mod_base = OTHER; note = 2'-O-methyl modified nucleotide
  modified_base 91: mod_base = OTHER; note = 2'-O-methyl modified nucleotide
  modified_base 92: mod_base = OTHER; note = 2'-O-methyl modified nucleotide
  modified_base 93: mod_base = OTHER; note = 2'-O-methyl modified nucleotide
  modified_base 94: mod_base = OTHER; note = 2'-O-methyl modified nucleotide
  modified_base 95: mod_base = OTHER; note = 2'-O-methyl modified nucleotide
  modified_base 96: mod_base = OTHER; note = 2'-O-methyl modified nucleotide
  modified_base 120: mod_base = OTHER; note = Nucleotide with phosphorothioate linkage
  modified_base 121: mod_base = OTHER; note = 2'-O-methyl modified nucleotide with phosphorothioate linkage
  modified_base 122: mod_base = OTHER; note = 2'-O-methyl modified nucleotide with phosphorothioate linkage
  modified_base 123: mod_base = OTHER; note = 2'-O-methyl modified nucleotide
gagaatcaaaatcggtgaatgttttagagctagaaatagcaagttaaaataaggctagtccgttatcaacttgaaaaagtggcaccgagtcggtgcgtgacaagtctgtctcaccgattttga

SEQ ID NO: 16159 - RNA, 122 nt, synthetic construct
  source 1..122: mol_type = other RNA
  modified_base 1: mod_base = OTHER; note = 2'-O-methyl modified nucleotide with phosphorothioate linkage
  modified_base 2: mod_base = OTHER; note = 2'-O-methyl modified nucleotide with phosphorothioate linkage
  modified_base 3: mod_base = OTHER; note = 2'-O-methyl modified nucleotide with phosphorothioate linkage
  modified_base 29: mod_base = OTHER; note = 2'-O-methyl modified nucleotide
  modified_base 30: mod_base = OTHER; note = 2'-O-methyl modified nucleotide
  modified_base 31: mod_base = OTHER; note = 2'-O-methyl modified nucleotide
  modified_base 32: mod_base = OTHER; note = 2'-O-methyl modified nucleotide
  modified_base 33: mod_base = OTHER; note = 2'-O-methyl modified nucleotide
  modified_base 34: mod_base = OTHER; note = 2'-O-methyl modified nucleotide
  modified_base 35: mod_base = OTHER; note = 2'-O-methyl modified nucleotide
  modified_base 36: mod_base = OTHER; note = 2'-O-methyl modified nucleotide
  modified_base 37: mod_base = OTHER; note = 2'-O-methyl modified nucleotide
  modified_base 38: mod_base = OTHER; note = 2'-O-methyl modified nucleotide
  modified_base 39: mod_base = OTHER; note = 2'-O-methyl modified nucleotide
  modified_base 40: mod_base = OTHER; note = 2'-O-methyl modified nucleotide
  modified_base 69: mod_base = OTHER; note = 2'-O-methyl modified nucleotide
  modified_base 70: mod_base = OTHER; note = 2'-O-methyl modified nucleotide
  modified_base 71: mod_base = OTHER; note = 2'-O-methyl modified nucleotide
  modified_base 72: mod_base = OTHER; note = 2'-O-methyl modified nucleotide
  modified_base 73: mod_base = OTHER; note = 2'-O-methyl modified nucleotide
  modified_base 74: mod_base = OTHER; note = 2'-O-methyl modified nucleotide
  modified_base 75: mod_base = OTHER; note = 2'-O-methyl modified nucleotide
  modified_base 76: mod_base = OTHER; note = 2'-O-methyl modified nucleotide
  modified_base 77: mod_base = OTHER; note = 2'-O-methyl modified nucleotide
  modified_base 78: mod_base = OTHER; note = 2'-O-methyl modified nucleotide
  modified_base 79: mod_base = OTHER; note = 2'-O-methyl modified nucleotide
  modified_base 80: mod_base = OTHER; note = 2'-O-methyl modified nucleotide
  modified_base 81: mod_base = OTHER; note = 2'-O-methyl modified nucleotide
  modified_base 82: mod_base = OTHER; note = 2'-O-methyl modified nucleotide
  modified_base 83: mod_base = OTHER; note = 2'-O-methyl modified nucleotide
  modified_base 84: mod_base = OTHER; note = 2'-O-methyl modified nucleotide
  modified_base 85: mod_base = OTHER; note = 2'-O-methyl modified nucleotide
  modified_base 86: mod_base = OTHER; note = 2'-O-methyl modified nucleotide
  modified_base 87: mod_base = OTHER; note = 2'-O-methyl modified nucleotide
  modified_base 88: mod_base = OTHER; note = 2'-O-methyl modified nucleotide
  modified_base 89: mod_base = OTHER; note = 2'-O-methyl modified nucleotide
  modified_base 90: mod_base = OTHER; note = 2'-O-methyl modified nucleotide
  modified_base 91: mod_base = OTHER; note = 2'-O-methyl modified nucleotide
  modified_base 92: mod_base = OTHER; note = 2'-O-methyl modified nucleotide
  modified_base 93: mod_base = OTHER; note = 2'-O-methyl modified nucleotide
  modified_base 94: mod_base = OTHER; note = 2'-O-methyl modified nucleotide
  modified_base 95: mod_base = OTHER; note = 2'-O-methyl modified nucleotide
  modified_base 96: mod_base = OTHER; note = 2'-O-methyl modified nucleotide
  modified_base 119: mod_base = OTHER; note = Nucleotide with phosphorothioate linkage
  modified_base 120: mod_base = OTHER; note = 2'-O-methyl modified nucleotide with phosphorothioate linkage
  modified_base 121: mod_base = OTHER; note = 2'-O-methyl modified nucleotide with phosphorothioate linkage
  modified_base 122: mod_base = OTHER; note = 2'-O-methyl modified nucleotide
gagaatcaaaatcggtgaatgttttagagctagaaatagcaagttaaaataaggctagtccgttatcaacttgaaaaagtggcaccgagtcggtgcgtgacaagtctgtctcaccgattttg

SEQ ID NO: 16160 - RNA, 121 nt, synthetic construct
  source 1..121: mol_type = other RNA
  modified_base 1: mod_base = OTHER; note = 2'-O-methyl modified nucleotide with phosphorothioate linkage
  modified_base 2: mod_base = OTHER; note = 2'-O-methyl modified nucleotide with phosphorothioate linkage
  modified_base 3: mod_base = OTHER; note = 2'-O-methyl modified nucleotide with phosphorothioate linkage
  modified_base 29: mod_base = OTHER; note = 2'-O-methyl modified nucleotide
  modified_base 30: mod_base = OTHER; note = 2'-O-methyl modified nucleotide
  modified_base 31: mod_base = OTHER; note = 2'-O-methyl modified nucleotide
  modified_base 32: mod_base = OTHER; note = 2'-O-methyl modified nucleotide
  modified_base 33: mod_base = OTHER; note = 2'-O-methyl modified nucleotide
  modified_base 34: mod_base = OTHER; note = 2'-O-methyl modified nucleotide
  modified_base 35: mod_base = OTHER; note = 2'-O-methyl modified nucleotide
  modified_base 36: mod_base = OTHER; note = 2'-O-methyl modified nucleotide
  modified_base 37: mod_base = OTHER; note = 2'-O-methyl modified nucleotide
  modified_base 38: mod_base = OTHER; note = 2'-O-methyl modified nucleotide
  modified_base 39: mod_base = OTHER; note = 2'-O-methyl modified nucleotide
  modified_base 40: mod_base = OTHER; note = 2'-O-methyl modified nucleotide
  modified_base 69: mod_base = OTHER; note = 2'-O-methyl modified nucleotide
  modified_base 70: mod_base = OTHER; note = 2'-O-methyl modified nucleotide
  modified_base 71: mod_base = OTHER; note = 2'-O-methyl modified nucleotide
  modified_base 72: mod_base = OTHER; note = 2'-O-methyl modified nucleotide
  modified_base 73: mod_base = OTHER; note = 2'-O-methyl modified nucleotide
  modified_base 74: mod_base = OTHER; note = 2'-O-methyl modified nucleotide
  modified_base 75: mod_base = OTHER; note = 2'-O-methyl modified nucleotide
  modified_base 76: mod_base = OTHER; note = 2'-O-methyl modified nucleotide
  modified_base 77: mod_base = OTHER; note = 2'-O-methyl modified nucleotide
  modified_base 78: mod_base = OTHER; note = 2'-O-methyl modified nucleotide
  modified_base 79: mod_base = OTHER; note = 2'-O-methyl modified nucleotide
  modified_base 80: mod_base = OTHER; note = 2'-O-methyl modified nucleotide
  modified_base 81: mod_base = OTHER; note = 2'-O-methyl modified nucleotide
  modified_base 82: mod_base = OTHER; note = 2'-O-methyl modified nucleotide
  modified_base 83: mod_base = OTHER; note = 2'-O-methyl modified nucleotide
  modified_base 84: mod_base = OTHER; note = 2'-O-methyl modified nucleotide
  modified_base 85: mod_base = OTHER; note = 2'-O-methyl modified nucleotide
  modified_base 86: mod_base = OTHER; note = 2'-O-methyl modified nucleotide
  modified_base 87: mod_base = OTHER; note = 2'-O-methyl modified nucleotide
  modified_base 88: mod_base = OTHER; note = 2'-O-methyl modified nucleotide
  modified_base 89: mod_base = OTHER; note = 2'-O-methyl modified nucleotide
  modified_base 90: mod_base = OTHER; note = 2'-O-methyl modified nucleotide
  modified_base 91: mod_base = OTHER; note = 2'-O-methyl modified nucleotide
  modified_base 92: mod_base = OTHER; note = 2'-O-methyl modified nucleotide
  modified_base 93: mod_base = OTHER; note = 2'-O-methyl modified nucleotide
  modified_base 94: mod_base = OTHER; note = 2'-O-methyl modified nucleotide
  modified_base 95: mod_base = OTHER; note = 2'-O-methyl modified nucleotide
  modified_base 96: mod_base = OTHER; note = 2'-O-methyl modified nucleotide
  modified_base 118: mod_base = OTHER; note = Nucleotide with phosphorothioate linkage
  modified_base 119: mod_base = OTHER; note = 2'-O-methyl modified nucleotide with phosphorothioate linkage
  modified_base 120: mod_base = OTHER; note = 2'-O-methyl modified nucleotide with phosphorothioate linkage
  modified_base 121: mod_base = OTHER; note = 2'-O-methyl modified nucleotide
gagaatcaaaatcggtgaatgttttagagctagaaatagcaagttaaaataaggctagtccgttatcaacttgaaaaagtggcaccgagtcggtgcgtgacaagtctgtctcaccgatttt

SEQ ID NO: 16161 - RNA, 120 nt, synthetic construct
  source 1..120: mol_type = other RNA
  modified_base 1: mod_base = OTHER; note = 2'-O-methyl modified nucleotide with phosphorothioate linkage
  modified_base 2: mod_base = OTHER; note = 2'-O-methyl modified nucleotide with phosphorothioate linkage
  modified_base 3: mod_base = OTHER; note = 2'-O-methyl modified nucleotide with phosphorothioate linkage
  modified_base 29: mod_base = OTHER; note = 2'-O-methyl modified nucleotide
  modified_base 30: mod_base = OTHER; note = 2'-O-methyl modified nucleotide
  modified_base 31: mod_base = OTHER; note = 2'-O-methyl modified nucleotide
  modified_base 32: mod_base = OTHER; note = 2'-O-methyl modified nucleotide
  modified_base 33: mod_base = OTHER; note = 2'-O-methyl modified nucleotide
  modified_base 34: mod_base = OTHER; note = 2'-O-methyl modified nucleotide
  modified_base 35: mod_base = OTHER; note = 2'-O-methyl modified nucleotide
  modified_base 36: mod_base = OTHER; note = 2'-O-methyl modified nucleotide
  modified_base 37: mod_base = OTHER; note = 2'-O-methyl modified nucleotide
  modified_base 38: mod_base = OTHER; note = 2'-O-methyl modified nucleotide
  modified_base 39: mod_base = OTHER; note = 2'-O-methyl modified nucleotide
  modified_base 40: mod_base = OTHER; note = 2'-O-methyl modified nucleotide
  modified_base 69: mod_base = OTHER; note = 2'-O-methyl modified nucleotide
  modified_base 70: mod_base = OTHER; note = 2'-O-methyl modified nucleotide
  modified_base 71: mod_base = OTHER; note = 2'-O-methyl modified nucleotide
  modified_base 72: mod_base = OTHER; note = 2'-O-methyl modified nucleotide
  modified_base 73: mod_base = OTHER; note = 2'-O-methyl modified nucleotide
  modified_base 74: mod_base = OTHER; note = 2'-O-methyl modified nucleotide
  modified_base 75: mod_base = OTHER; note = 2'-O-methyl modified nucleotide
  modified_base 76: mod_base = OTHER; note = 2'-O-methyl modified nucleotide
  modified_base 77: mod_base = OTHER; note = 2'-O-methyl modified nucleotide
  modified_base 78: mod_base = OTHER; note = 2'-O-methyl modified nucleotide
  modified_base 79: mod_base = OTHER; note = 2'-O-methyl modified nucleotide
  modified_base 80: mod_base = OTHER; note = 2'-O-methyl modified nucleotide
  modified_base 81: mod_base = OTHER; note = 2'-O-methyl modified nucleotide
  modified_base 82: mod_base = OTHER; note = 2'-O-methyl modified nucleotide
  modified_base 83: mod_base = OTHER; note = 2'-O-methyl modified nucleotide
  modified_base 84: mod_base = OTHER; note = 2'-O-methyl modified nucleotide
  modified_base 85: mod_base = OTHER; note = 2'-O-methyl modified nucleotide
  modified_base 86: mod_base = OTHER; note = 2'-O-methyl modified nucleotide
  modified_base 87: mod_base = OTHER; note = 2'-O-methyl modified nucleotide
  modified_base 88: mod_base = OTHER; note = 2'-O-methyl modified nucleotide
  modified_base 89: mod_base = OTHER; note = 2'-O-methyl modified nucleotide
  modified_base 90: mod_base = OTHER; note = 2'-O-methyl modified nucleotide
  modified_base 91: mod_base = OTHER; note = 2'-O-methyl modified nucleotide
  modified_base 92: mod_base = OTHER; note = 2'-O-methyl modified nucleotide
  modified_base 93: mod_base = OTHER; note = 2'-O-methyl modified nucleotide
  modified_base 94: mod_base = OTHER; note = 2'-O-methyl modified nucleotide
  modified_base 95: mod_base = OTHER; note = 2'-O-methyl modified nucleotide
  modified_base 96: mod_base = OTHER; note = 2'-O-methyl modified nucleotide
  modified_base 117: mod_base = OTHER; note = Nucleotide with phosphorothioate linkage
  modified_base 118: mod_base = OTHER; note = 2'-O-methyl modified nucleotide with phosphorothioate linkage
  modified_base 119: mod_base = OTHER; note = 2'-O-methyl modified nucleotide with phosphorothioate linkage
  modified_base 120: mod_base = OTHER; note = 2'-O-methyl modified nucleotide
gagaatcaaaatcggtgaatgttttagagctagaaatagcaagttaaaataaggctagtccgttatcaacttgaaaaagtggcaccgagtcggtgcgtgacaagtctgtctcaccgattt

SEQ ID NO: 16162 - RNA, 119 nt, synthetic construct
  source 1..119: mol_type = other RNA
  modified_base 1: mod_base = OTHER; note = 2'-O-methyl modified nucleotide with phosphorothioate linkage
  modified_base 2: mod_base = OTHER; note = 2'-O-methyl modified nucleotide with phosphorothioate linkage
  modified_base 3: mod_base = OTHER; note = 2'-O-methyl modified nucleotide with phosphorothioate linkage
  modified_base 29: mod_base = OTHER; note = 2'-O-methyl modified nucleotide
  modified_base 30: mod_base = OTHER; note = 2'-O-methyl modified nucleotide
  modified_base 31: mod_base = OTHER; note = 2'-O-methyl modified nucleotide
  modified_base 32: mod_base = OTHER; note = 2'-O-methyl modified nucleotide
  modified_base 33: mod_base = OTHER; note = 2'-O-methyl modified nucleotide
  modified_base 34: mod_base = OTHER; note = 2'-O-methyl modified nucleotide
  modified_base 35: mod_base = OTHER; note = 2'-O-methyl modified nucleotide
  modified_base 36: mod_base = OTHER; note = 2'-O-methyl modified nucleotide
  modified_base 37: mod_base = OTHER; note = 2'-O-methyl modified nucleotide
  modified_base 38: mod_base = OTHER; note = 2'-O-methyl modified nucleotide
  modified_base 39: mod_base = OTHER; note = 2'-O-methyl modified nucleotide
  modified_base 40: mod_base = OTHER; note = 2'-O-methyl modified nucleotide
  modified_base 69: mod_base = OTHER; note = 2'-O-methyl modified nucleotide
  modified_base 70: mod_base = OTHER; note = 2'-O-methyl modified nucleotide
  modified_base 71: mod_base = OTHER; note = 2'-O-methyl modified nucleotide
  modified_base 72: mod_base = OTHER; note = 2'-O-methyl modified nucleotide
  modified_base 73: mod_base = OTHER; note = 2'-O-methyl modified nucleotide
  modified_base 74: mod_base = OTHER; note = 2'-O-methyl modified nucleotide
  modified_base 75: mod_base = OTHER; note = 2'-O-methyl modified nucleotide
  modified_base 76: mod_base = OTHER; note = 2'-O-methyl modified nucleotide
  modified_base 77: mod_base = OTHER; note = 2'-O-methyl modified nucleotide
  modified_base 78: mod_base = OTHER; note = 2'-O-methyl modified nucleotide
  modified_base 79: mod_base = OTHER; note = 2'-O-methyl modified nucleotide
  modified_base 80: mod_base = OTHER; note = 2'-O-methyl modified nucleotide
  modified_base 81: mod_base = OTHER; note = 2'-O-methyl modified nucleotide
  modified_base 82: mod_base = OTHER; note = 2'-O-methyl modified nucleotide
  modified_base 83: mod_base = OTHER; note = 2'-O-methyl modified nucleotide
  modified_base 84: mod_base = OTHER; note = 2'-O-methyl modified nucleotide
  modified_base 85: mod_base = OTHER; note = 2'-O-methyl modified nucleotide
  modified_base 86: mod_base = OTHER; note = 2'-O-methyl modified nucleotide
  modified_base 87: mod_base = OTHER; note = 2'-O-methyl modified nucleotide
  modified_base 88: mod_base = OTHER; note = 2'-O-methyl modified nucleotide
  modified_base 89: mod_base = OTHER; note = 2'-O-methyl modified nucleotide
  modified_base 90: mod_base = OTHER; note = 2'-O-methyl modified nucleotide
  modified_base 91: mod_base = OTHER; note = 2'-O-methyl modified nucleotide
  modified_base 92: mod_base = OTHER; note = 2'-O-methyl modified nucleotide
  modified_base 93: mod_base = OTHER; note = 2'-O-methyl modified nucleotide
  modified_base 94: mod_base = OTHER; note = 2'-O-methyl modified nucleotide
  modified_base 95: mod_base = OTHER; note = 2'-O-methyl modified nucleotide
  modified_base 96: mod_base = OTHER; note = 2'-O-methyl modified nucleotide
  modified_base 116: mod_base = OTHER; note = Nucleotide with phosphorothioate linkage
  modified_base 117: mod_base = OTHER; note = 2'-O-methyl modified nucleotide with phosphorothioate linkage
  modified_base 118: mod_base = OTHER; note = 2'-O-methyl modified nucleotide with phosphorothioate linkage
  modified_base 119: mod_base = OTHER; note = 2'-O-methyl modified nucleotide
gagaatcaaaatcggtgaatgttttagagctagaaatagcaagttaaaataaggctagtccgttatcaacttgaaaaagtggcaccgagtcggtgcgtgacaagtctgtctcaccgatt

SEQ ID NO: 16163 - RNA, 126 nt, synthetic construct
  source 1..126: mol_type = other RNA
  modified_base 1: mod_base = OTHER; note = 2'-O-methyl modified nucleotide with phosphorothioate linkage
  modified_base 2: mod_base = OTHER; note = 2'-O-methyl modified nucleotide with phosphorothioate linkage
  modified_base 3: mod_base = OTHER; note = 2'-O-methyl modified nucleotide with phosphorothioate linkage
  modified_base 29: mod_base = OTHER; note = 2'-O-methyl modified nucleotide
  modified_base 30: mod_base = OTHER; note = 2'-O-methyl modified nucleotide
  modified_base 31: mod_base = OTHER; note = 2'-O-methyl modified nucleotide
  modified_base 32: mod_base = OTHER; note = 2'-O-methyl modified nucleotide
  modified_base 33: mod_base = OTHER; note = 2'-O-methyl modified nucleotide
  modified_base 34: mod_base = OTHER; note = 2'-O-methyl modified nucleotide
  modified_base 35: mod_base = OTHER; note = 2'-O-methyl modified nucleotide
  modified_base 36: mod_base = OTHER; note = 2'-O-methyl modified nucleotide
  modified_base 37: mod_base = OTHER; note = 2'-O-methyl modified nucleotide
  modified_base 38: mod_base = OTHER; note = 2'-O-methyl modified nucleotide
  modified_base 39: mod_base = OTHER; note = 2'-O-methyl modified nucleotide
  modified_base 40: mod_base = OTHER; note = 2'-O-methyl modified nucleotide
  modified_base 69: mod_base = OTHER; note = 2'-O-methyl modified nucleotide
  modified_base 70: mod_base = OTHER; note = 2'-O-methyl modified nucleotide
  modified_base 71: mod_base = OTHER; note = 2'-O-methyl modified nucleotide
  modified_base 72: mod_base = OTHER; note = 2'-O-methyl modified nucleotide
  modified_base 73: mod_base = OTHER; note = 2'-O-methyl modified nucleotide
  modified_base 74: mod_base = OTHER; note = 2'-O-methyl modified nucleotide
  modified_base 75: mod_base = OTHER; note = 2'-O-methyl modified nucleotide
  modified_base 76: mod_base = OTHER; note = 2'-O-methyl modified nucleotide
  modified_base 77: mod_base = OTHER; note = 2'-O-methyl modified nucleotide
  modified_base 78: mod_base = OTHER; note = 2'-O-methyl modified nucleotide
  modified_base 79: mod_base = OTHER; note = 2'-O-methyl modified nucleotide
  modified_base 80: mod_base = OTHER; note = 2'-O-methyl modified nucleotide
  modified_base 81: mod_base = OTHER; note = 2'-O-methyl modified nucleotide
  modified_base 82: mod_base = OTHER; note = 2'-O-methyl modified nucleotide
  modified_base 83: mod_base = OTHER; note = 2'-O-methyl modified nucleotide
  modified_base 84: mod_base = OTHER; note = 2'-O-methyl modified nucleotide
  modified_base 85: mod_base = OTHER; note = 2'-O-methyl modified nucleotide
  modified_base 86: mod_base = OTHER; note = 2'-O-methyl modified nucleotide
  modified_base 87: mod_base = OTHER; note = 2'-O-methyl modified nucleotide
  modified_base 88: mod_base = OTHER; note = 2'-O-methyl modified nucleotide
  modified_base 89: mod_base = OTHER; note = 2'-O-methyl modified nucleotide
  modified_base 90: mod_base = OTHER; note = 2'-O-methyl modified nucleotide
  modified_base 91: mod_base = OTHER; note = 2'-O-methyl modified nucleotide
  modified_base 92: mod_base = OTHER; note = 2'-O-methyl modified nucleotide
  modified_base 93: mod_base = OTHER; note = 2'-O-methyl modified nucleotide
  modified_base 94: mod_base = OTHER; note = 2'-O-methyl modified nucleotide
  modified_base 95: mod_base = OTHER; note = 2'-O-methyl modified nucleotide
  modified_base 96: mod_base = OTHER; note = 2'-O-methyl modified nucleotide
  modified_base 123: mod_base = OTHER; note = Nucleotide with phosphorothioate linkage
  modified_base 124: mod_base = OTHER; note = 2'-O-methyl modified nucleotide with phosphorothioate linkage
  modified_base 125: mod_base = OTHER; note = 2'-O-methyl modified nucleotide with phosphorothioate linkage
  modified_base 126: mod_base = OTHER; note = 2'-O-methyl modified nucleotide
gagaatcaaaatcggtgaatgttttagagctagaaatagcaagttaaaataaggctagtccgttatcaacttgaaaaagtggcaccgagtcggtgccagtgacaagtctgtctcaccgattttgat

SEQ ID NO: 16164 - RNA, 125 nt, synthetic construct
  source 1..125: mol_type = other RNA
  modified_base 1: mod_base = OTHER; note = 2'-O-methyl modified nucleotide with phosphorothioate linkage
  modified_base 2: mod_base = OTHER; note = 2'-O-methyl modified nucleotide with phosphorothioate linkage
  modified_base 3: mod_base = OTHER; note = 2'-O-methyl modified nucleotide with phosphorothioate linkage
  modified_base 29: mod_base = OTHER; note = 2'-O-methyl modified nucleotide
  modified_base 30: mod_base = OTHER; note = 2'-O-methyl modified nucleotide
  modified_base 31: mod_base = OTHER; note = 2'-O-methyl modified nucleotide
  modified_base 32: mod_base = OTHER; note = 2'-O-methyl modified nucleotide
  modified_base 33: mod_base = OTHER; note = 2'-O-methyl modified nucleotide
  modified_base 34: mod_base = OTHER; note = 2'-O-methyl modified nucleotide
  modified_base 35: mod_base = OTHER; note = 2'-O-methyl modified nucleotide
  modified_base 36: mod_base = OTHER; note = 2'-O-methyl modified nucleotide
  modified_base 37: mod_base = OTHER; note = 2'-O-methyl modified nucleotide
  modified_base 38: mod_base = OTHER; note = 2'-O-methyl modified nucleotide
  modified_base 39: mod_base = OTHER; note = 2'-O-methyl modified nucleotide
  modified_base 40: mod_base = OTHER; note = 2'-O-methyl modified nucleotide
  modified_base 69: mod_base = OTHER; note = 2'-O-methyl modified nucleotide
  modified_base 70: mod_base = OTHER; note = 2'-O-methyl modified nucleotide
  modified_base 71: mod_base = OTHER; note = 2'-O-methyl modified nucleotide
  modified_base 72: mod_base = OTHER; note = 2'-O-methyl modified nucleotide
  modified_base 73: mod_base = OTHER; note = 2'-O-methyl modified nucleotide
  modified_base 74: mod_base = OTHER; note = 2'-O-methyl modified nucleotide
  modified_base 75: mod_base = OTHER; note = 2'-O-methyl modified nucleotide
  modified_base 76: mod_base = OTHER; note = 2'-O-methyl modified nucleotide
  modified_base 77: mod_base = OTHER; note = 2'-O-methyl modified nucleotide
  modified_base 78: mod_base = OTHER; note = 2'-O-methyl modified nucleotide
  modified_base 79: mod_base = OTHER; note = 2'-O-methyl modified nucleotide
  modified_base 80: mod_base = OTHER; note = 2'-O-methyl modified nucleotide
  modified_base 81: mod_base = OTHER; note = 2'-O-methyl modified nucleotide
  modified_base 82: mod_base = OTHER; note = 2'-O-methyl modified nucleotide
  modified_base 83: mod_base = OTHER; note = 2'-O-methyl modified nucleotide
  modified_base 84: mod_base = OTHER; note = 2'-O-methyl modified nucleotide
  modified_base 85: mod_base = OTHER; note = 2'-O-methyl modified nucleotide
  modified_base 86: mod_base = OTHER; note = 2'-O-methyl modified nucleotide
  modified_base 87: mod_base = OTHER; note = 2'-O-methyl modified nucleotide
  modified_base 88: mod_base = OTHER; note = 2'-O-methyl modified nucleotide
  modified_base 89: mod_base = OTHER; note = 2'-O-methyl modified nucleotide
  modified_base 90: mod_base = OTHER; note = 2'-O-methyl modified nucleotide
  modified_base 91: mod_base = OTHER; note = 2'-O-methyl modified nucleotide
  modified_base 92: mod_base = OTHER; note = 2'-O-methyl modified nucleotide
  modified_base 93: mod_base = OTHER; note = 2'-O-methyl modified nucleotide
  modified_base 94: mod_base = OTHER; note = 2'-O-methyl modified nucleotide
  modified_base 95: mod_base = OTHER; note = 2'-O-methyl modified nucleotide
  modified_base 96: mod_base = OTHER; note = 2'-O-methyl modified nucleotide
  modified_base 122: mod_base = OTHER; note = Nucleotide with phosphorothioate linkage
  modified_base 123: mod_base = OTHER; note = 2'-O-methyl modified nucleotide with phosphorothioate linkage
  modified_base 124: mod_base = OTHER; note = 2'-O-methyl modified nucleotide with phosphorothioate linkage
  modified_base 125: mod_base = OTHER; note = 2'-O-methyl modified nucleotide
gagaatcaaaatcggtgaatgttttagagctagaaatagcaagttaaaataaggctagtccgttatcaacttgaaaaagtggcaccgagtcggtgccagtgacaagtctgtctcaccgattttga

SEQ ID NO: 16165 - RNA, 124 nt, synthetic construct
  source 1..124: mol_type = other RNA
  modified_base 1: mod_base = OTHER; note = 2'-O-methyl modified nucleotide with phosphorothioate linkage
  modified_base 2: mod_base = OTHER; note = 2'-O-methyl modified nucleotide with phosphorothioate linkage
  modified_base 3: mod_base = OTHER; note = 2'-O-methyl modified nucleotide with phosphorothioate linkage
  modified_base 29: mod_base = OTHER; note = 2'-O-methyl modified nucleotide
  modified_base 30: mod_base = OTHER; note = 2'-O-methyl modified nucleotide
  modified_base 31: mod_base = OTHER; note = 2'-O-methyl modified nucleotide
  modified_base 32: mod_base = OTHER; note = 2'-O-methyl modified nucleotide
  modified_base 33: mod_base = OTHER; note = 2'-O-methyl modified nucleotide
  modified_base 34: mod_base = OTHER; note = 2'-O-methyl modified nucleotide
  modified_base 35: mod_base = OTHER; note = 2'-O-methyl modified nucleotide
  modified_base 36: mod_base = OTHER; note = 2'-O-methyl modified nucleotide
  modified_base 37: mod_base = OTHER; note = 2'-O-methyl modified nucleotide
  modified_base 38: mod_base = OTHER; note = 2'-O-methyl modified nucleotide
  modified_base 39: mod_base = OTHER; note = 2'-O-methyl modified nucleotide
  modified_base 40: mod_base = OTHER; note = 2'-O-methyl modified nucleotide
  modified_base 69: mod_base = OTHER; note = 2'-O-methyl modified nucleotide
  modified_base 70: mod_base = OTHER; note = 2'-O-methyl modified nucleotide
  modified_base 71: mod_base = OTHER; note = 2'-O-methyl modified nucleotide
  modified_base 72: mod_base = OTHER; note = 2'-O-methyl modified nucleotide
  modified_base 73: mod_base = OTHER; note = 2'-O-methyl modified nucleotide
  modified_base 74: mod_base = OTHER; note = 2'-O-methyl modified nucleotide
  modified_base 75: mod_base = OTHER; note = 2'-O-methyl modified nucleotide
  modified_base 76: mod_base = OTHER; note = 2'-O-methyl modified nucleotide
  modified_base 77: mod_base = OTHER; note = 2'-O-methyl modified nucleotide
  modified_base 78: mod_base = OTHER; note = 2'-O-methyl modified nucleotide
  modified_base 79: mod_base = OTHER; note = 2'-O-methyl modified nucleotide
  modified_base 80: mod_base = OTHER; note = 2'-O-methyl modified nucleotide
  modified_base 81: mod_base = OTHER; note = 2'-O-methyl modified nucleotide
  modified_base 82: mod_base = OTHER; note = 2'-O-methyl modified nucleotide
  modified_base 83: mod_base = OTHER; note = 2'-O-methyl modified nucleotide
  modified_base 84: mod_base = OTHER; note = 2'-O-methyl modified nucleotide
  modified_base 85: mod_base = OTHER; note = 2'-O-methyl modified nucleotide
  modified_base 86: mod_base = OTHER; note = 2'-O-methyl modified nucleotide
  modified_base 87: mod_base = OTHER; note = 2'-O-methyl modified nucleotide
  modified_base 88: mod_base = OTHER; note = 2'-O-methyl modified nucleotide
  modified_base 89: mod_base = OTHER; note = 2'-O-methyl modified nucleotide
  modified_base 90: mod_base = OTHER; note = 2'-O-methyl modified nucleotide
  modified_base 91: mod_base = OTHER; note = 2'-O-methyl modified nucleotide
  modified_base 92: mod_base = OTHER; note = 2'-O-methyl modified nucleotide
  modified_base 93: mod_base = OTHER; note = 2'-O-methyl modified nucleotide
  modified_base 94: mod_base = OTHER; note = 2'-O-methyl modified nucleotide
  modified_base 95: mod_base = OTHER; note = 2'-O-methyl modified nucleotide
  modified_base 96: mod_base = OTHER; note = 2'-O-methyl modified nucleotide
  modified_base 121: mod_base = OTHER; note = Nucleotide with phosphorothioate linkage
  modified_base 122: mod_base = OTHER; note = 2'-O-methyl modified nucleotide with phosphorothioate linkage
  modified_base 123: mod_base = OTHER; note = 2'-O-methyl modified nucleotide with phosphorothioate linkage
  modified_base 124: mod_base = OTHER; note = 2'-O-methyl modified nucleotide
gagaatcaaaatcggtgaatgttttagagctagaaatagcaagttaaaataaggctagtccgttatcaacttgaaaaagtggcaccgagtcggtgccagtgacaagtctgtctcaccgattttg

SEQ ID NO: 16166 - RNA, 123 nt, synthetic construct
  source 1..123: mol_type = other RNA
  modified_base 1: mod_base = OTHER; note = 2'-O-methyl modified nucleotide with phosphorothioate linkage
  modified_base 2: mod_base = OTHER; note = 2'-O-methyl modified nucleotide with phosphorothioate linkage
  modified_base 3: mod_base = OTHER; note = 2'-O-methyl modified nucleotide with phosphorothioate linkage
  modified_base 29: mod_base = OTHER; note = 2'-O-methyl modified nucleotide
  modified_base 30: mod_base = OTHER; note = 2'-O-methyl modified nucleotide
  modified_base 31: mod_base = OTHER; note = 2'-O-methyl modified nucleotide
  modified_base 32: mod_base = OTHER; note = 2'-O-methyl modified nucleotide
  modified_base 33: mod_base = OTHER; note = 2'-O-methyl modified nucleotide
  modified_base 34: mod_base = OTHER; note = 2'-O-methyl modified nucleotide
  modified_base 35: mod_base = OTHER; note = 2'-O-methyl modified nucleotide
  modified_base 36: mod_base = OTHER; note = 2'-O-methyl modified nucleotide
  modified_base 37: mod_base = OTHER; note = 2'-O-methyl modified nucleotide
  modified_base 38: mod_base = OTHER; note = 2'-O-methyl modified nucleotide
  modified_base 39: mod_base = OTHER; note = 2'-O-methyl modified nucleotide
  modified_base 40: mod_base = OTHER; note = 2'-O-methyl modified nucleotide
  modified_base 69: mod_base = OTHER; note = 2'-O-methyl modified nucleotide
  modified_base 70: mod_base = OTHER; note = 2'-O-methyl modified nucleotide
  modified_base 71: mod_base = OTHER; note = 2'-O-methyl modified nucleotide
  modified_base 72: mod_base = OTHER; note = 2'-O-methyl modified nucleotide
  modified_base 73: mod_base = OTHER; note = 2'-O-methyl modified nucleotide
  modified_base 74: mod_base = OTHER; note = 2'-O-methyl modified nucleotide
  modified_base 75: mod_base = OTHER; note = 2'-O-methyl modified nucleotide
  modified_base 76: mod_base = OTHER; note = 2'-O-methyl modified nucleotide
  modified_base 77: mod_base = OTHER; note = 2'-O-methyl modified nucleotide
  modified_base 78: mod_base = OTHER; note = 2'-O-methyl modified nucleotide
  modified_base 79: mod_base = OTHER; note = 2'-O-methyl modified nucleotide
  modified_base 80: mod_base = OTHER; note = 2'-O-methyl modified nucleotide
  modified_base 81: mod_base = OTHER; note = 2'-O-methyl modified nucleotide
  modified_base 82: mod_base = OTHER; note = 2'-O-methyl modified nucleotide
  modified_base 83: mod_base = OTHER; note = 2'-O-methyl modified nucleotide
  modified_base 84: mod_base = OTHER; note = 2'-O-methyl modified nucleotide
  modified_base 85: mod_base = OTHER; note = 2'-O-methyl modified nucleotide
  modified_base 86: mod_base = OTHER; note = 2'-O-methyl modified nucleotide
  modified_base 87: mod_base = OTHER; note = 2'-O-methyl modified nucleotide
  modified_base 88: mod_base = OTHER; note = 2'-O-methyl modified nucleotide
  modified_base 89: mod_base = OTHER; note = 2'-O-methyl modified nucleotide
  modified_base 90: mod_base = OTHER; note = 2'-O-methyl modified nucleotide
  modified_base 91: mod_base = OTHER; note = 2'-O-methyl modified nucleotide
  modified_base 92: mod_base = OTHER; note = 2'-O-methyl modified nucleotide
  modified_base 93: mod_base = OTHER; note = 2'-O-methyl modified nucleotide
  modified_base 94: mod_base = OTHER; note = 2'-O-methyl modified nucleotide
  modified_base 95: mod_base = OTHER; note = 2'-O-methyl modified nucleotide
  modified_base 96: mod_base = OTHER; note = 2'-O-methyl modified nucleotide
  modified_base 120: mod_base = OTHER; note = Nucleotide with phosphorothioate linkage
  modified_base 121: mod_base = OTHER; note = 2'-O-methyl modified nucleotide with phosphorothioate linkage
  modified_base 122: mod_base = OTHER; note = 2'-O-methyl modified nucleotide with phosphorothioate linkage
  modified_base 123: mod_base = OTHER; note = 2'-O-methyl modified nucleotide
gagaatcaaaatcggtgaatgttttagagctagaaatagcaagttaaaataaggctagtccgttatcaacttgaaaaagtggcaccgagtcggtgccagtgacaagtctgtctcaccgatttt

SEQ ID NO: 16167 - RNA, 122 nt, synthetic construct
  source 1..122: mol_type = other RNA
  modified_base 1: mod_base = OTHER; note = 2'-O-methyl modified nucleotide with phosphorothioate linkage
  modified_base 2: mod_base = OTHER; note = 2'-O-methyl modified nucleotide with phosphorothioate linkage
  modified_base 3: mod_base = OTHER; note = 2'-O-methyl modified nucleotide with phosphorothioate linkage
  modified_base 29: mod_base = OTHER; note = 2'-O-methyl modified nucleotide
  modified_base 30: mod_base = OTHER; note = 2'-O-methyl modified nucleotide
  modified_base 31: mod_base = OTHER; note = 2'-O-methyl modified nucleotide
  modified_base 32: mod_base = OTHER; note = 2'-O-methyl modified nucleotide
  modified_base 33: mod_base = OTHER; note = 2'-O-methyl modified nucleotide
  modified_base 34: mod_base = OTHER; note = 2'-O-methyl modified nucleotide
  modified_base 35: mod_base = OTHER; note = 2'-O-methyl modified nucleotide
  modified_base 36: mod_base = OTHER; note = 2'-O-methyl modified nucleotide
  modified_base 37: mod_base = OTHER; note = 2'-O-methyl modified nucleotide
  modified_base 38: mod_base = OTHER; note = 2'-O-methyl modified nucleotide
  modified_base 39: mod_base = OTHER; note = 2'-O-methyl modified nucleotide
  modified_base 40: mod_base = OTHER; note = 2'-O-methyl modified nucleotide
  modified_base 69: mod_base = OTHER; note = 2'-O-methyl modified nucleotide
  modified_base 70: mod_base = OTHER; note = 2'-O-methyl modified nucleotide
  modified_base 71: mod_base = OTHER; note = 2'-O-methyl modified nucleotide
  modified_base 72: mod_base = OTHER; note = 2'-O-methyl modified nucleotide
  modified_base 73: mod_base = OTHER; note = 2'-O-methyl modified nucleotide
  modified_base 74: mod_base = OTHER; note = 2'-O-methyl modified nucleotide
  modified_base 75: mod_base = OTHER; note = 2'-O-methyl modified nucleotide
  modified_base 76: mod_base = OTHER; note = 2'-O-methyl modified nucleotide
  modified_base 77: mod_base = OTHER; note = 2'-O-methyl modified nucleotide
  modified_base 78: mod_base = OTHER; note = 2'-O-methyl modified nucleotide
  modified_base 79: mod_base = OTHER; note = 2'-O-methyl modified nucleotide
  modified_base 80: mod_base = OTHER; note = 2'-O-methyl modified nucleotide
  modified_base 81: mod_base = OTHER; note = 2'-O-methyl modified nucleotide
  modified_base 82: mod_base = OTHER; note = 2'-O-methyl modified nucleotide
  modified_base 83: mod_base = OTHER; note = 2'-O-methyl modified nucleotide
  modified_base 84: mod_base = OTHER; note = 2'-O-methyl modified nucleotide
  modified_base 85: mod_base = OTHER; note = 2'-O-methyl modified nucleotide
  modified_base 86: mod_base = OTHER; note = 2'-O-methyl modified nucleotide
  modified_base 87: mod_base = OTHER; note = 2'-O-methyl modified nucleotide
  modified_base 88: mod_base = OTHER; note = 2'-O-methyl modified nucleotide
  modified_base 89: mod_base = OTHER; note = 2'-O-methyl modified nucleotide
  modified_base 90: mod_base = OTHER; note = 2'-O-methyl modified nucleotide
  modified_base 91: mod_base = OTHER; note = 2'-O-methyl modified nucleotide
  modified_base 92: mod_base = OTHER; note = 2'-O-methyl modified nucleotide
  modified_base 93: mod_base = OTHER; note = 2'-O-methyl modified nucleotide
  modified_base 94: mod_base = OTHER; note = 2'-O-methyl modified nucleotide
  modified_base 95: mod_base = OTHER; note = 2'-O-methyl modified nucleotide
  modified_base 96: mod_base = OTHER; note = 2'-O-methyl modified nucleotide
  modified_base 119: mod_base = OTHER; note = Nucleotide with phosphorothioate linkage
  modified_base 120: mod_base = OTHER; note = 2'-O-methyl modified nucleotide with phosphorothioate linkage
  modified_base 121: mod_base = OTHER; note = 2'-O-methyl modified nucleotide with phosphorothioate linkage
  modified_base 122: mod_base = OTHER; note = 2'-O-methyl modified nucleotide
gagaatcaaaatcggtgaatgttttagagctagaaatagcaagttaaaataaggctagtccgttatcaacttgaaaaagtggcaccgagtcggtgccagtgacaagtctgtctcaccgattt

SEQ ID NO: 16168 - RNA, 121 nt, synthetic construct
  source 1..121: mol_type = other RNA
  modified_base 1: mod_base = OTHER; note = 2'-O-methyl modified nucleotide with phosphorothioate linkage
  modified_base 2: mod_base = OTHER; note = 2'-O-methyl modified nucleotide with phosphorothioate linkage
  modified_base 3: mod_base = OTHER; note = 2'-O-methyl modified nucleotide with phosphorothioate linkage
  modified_base 29: mod_base = OTHER; note = 2'-O-methyl modified nucleotide
  modified_base 30: mod_base = OTHER; note = 2'-O-methyl modified nucleotide
  modified_base 31: mod_base = OTHER; note = 2'-O-methyl modified nucleotide
  modified_base 32: mod_base = OTHER; note = 2'-O-methyl modified nucleotide
  modified_base 33: mod_base = OTHER; note = 2'-O-methyl modified nucleotide
  modified_base 34: mod_base = OTHER; note = 2'-O-methyl modified nucleotide
  modified_base 35: mod_base = OTHER; note = 2'-O-methyl modified nucleotide
  modified_base 36: mod_base = OTHER; note = 2'-O-methyl modified nucleotide
  modified_base 37: mod_base = OTHER; note = 2'-O-methyl modified nucleotide
  modified_base 38: mod_base = OTHER; note = 2'-O-methyl modified nucleotide
  modified_base 39: mod_base = OTHER; note = 2'-O-methyl modified nucleotide
  modified_base 40: mod_base = OTHER; note = 2'-O-methyl modified nucleotide
  modified_base 69: mod_base = OTHER; note = 2'-O-methyl modified nucleotide
  modified_base 70: mod_base = OTHER; note = 2'-O-methyl modified nucleotide
  modified_base 71: mod_base = OTHER; note = 2'-O-methyl modified nucleotide
  modified_base 72: mod_base = OTHER; note = 2'-O-methyl modified nucleotide
  modified_base 73: mod_base = OTHER; note = 2'-O-methyl modified nucleotide
  modified_base 74: mod_base = OTHER; note = 2'-O-methyl modified nucleotide
  modified_base 75: mod_base = OTHER; note = 2'-O-methyl modified nucleotide
  modified_base 76: mod_base = OTHER; note = 2'-O-methyl modified nucleotide
  modified_base 77: mod_base = OTHER; note = 2'-O-methyl modified nucleotide
  modified_base 78: mod_base = OTHER; note = 2'-O-methyl modified nucleotide
  modified_base 79: mod_base = OTHER; note = 2'-O-methyl modified nucleotide
  modified_base 80: mod_base = OTHER; note = 2'-O-methyl modified nucleotide
  modified_base 81: mod_base = OTHER; note = 2'-O-methyl modified nucleotide
  modified_base 82: mod_base = OTHER; note = 2'-O-methyl modified nucleotide
  modified_base 83: mod_base = OTHER; note = 2'-O-methyl modified nucleotide
  modified_base 84: mod_base = OTHER; note = 2'-O-methyl modified nucleotide
  modified_base 85: mod_base = OTHER; note = 2'-O-methyl modified nucleotide
  modified_base 86: mod_base = OTHER; note = 2'-O-methyl modified nucleotide
  modified_base 87: mod_base = OTHER; note = 2'-O-methyl modified nucleotide
  modified_base 88: mod_base = OTHER; note = 2'-O-methyl modified nucleotide
  modified_base 89: mod_base = OTHER; note = 2'-O-methyl modified nucleotide
  modified_base 90: mod_base = OTHER; note = 2'-O-methyl modified nucleotide
  modified_base 91: mod_base = OTHER; note = 2'-O-methyl modified nucleotide
  modified_base 92: mod_base = OTHER; note = 2'-O-methyl modified nucleotide
  modified_base 93: mod_base = OTHER; note = 2'-O-methyl modified nucleotide
  modified_base 94: mod_base = OTHER; note = 2'-O-methyl modified nucleotide
  modified_base 95: mod_base = OTHER; note = 2'-O-methyl modified nucleotide
  modified_base 96: mod_base = OTHER; note = 2'-O-methyl modified nucleotide
  modified_base 118: mod_base = OTHER; note = Nucleotide with phosphorothioate linkage
  modified_base 119: mod_base = OTHER; note = 2'-O-methyl modified nucleotide with phosphorothioate linkage
  modified_base 120: mod_base = OTHER; note = 2'-O-methyl modified nucleotide with phosphorothioate linkage
  modified_base 121: mod_base = OTHER; note = 2'-O-methyl modified nucleotide
gagaatcaaaatcggtgaatgttttagagctagaaatagcaagttaaaataaggctagtccgttatcaacttgaaaaagtggcaccgagtcggtgccagtgacaagtctgtctcaccgatt

SEQ ID NO: 16169 - RNA, 122 nt, synthetic construct
  source 1..122: mol_type = other RNA
  modified_base 1: mod_base = OTHER; note = 2'-O-methyl modified nucleotide with phosphorothioate linkage
  modified_base 2: mod_base = OTHER; note = 2'-O-methyl modified nucleotide with phosphorothioate linkage
  modified_base 3: mod_base = OTHER; note = 2'-O-methyl modified nucleotide with phosphorothioate linkage
  modified_base 29: mod_base = OTHER; note = 2'-O-methyl modified nucleotide
  modified_base 30: mod_base = OTHER; note = 2'-O-methyl modified nucleotide
  modified_base 31: mod_base = OTHER; note = 2'-O-methyl modified nucleotide
  modified_base 32: mod_base = OTHER; note = 2'-O-methyl modified nucleotide
  modified_base 33: mod_base = OTHER; note = 2'-O-methyl modified nucleotide
  modified_base 34: mod_base = OTHER; note = 2'-O-methyl modified nucleotide
  modified_base 35: mod_base = OTHER; note = 2'-O-methyl modified nucleotide
  modified_base 36: mod_base = OTHER; note = 2'-O-methyl modified nucleotide
  modified_base 37: mod_base = OTHER; note = 2'-O-methyl modified nucleotide
  modified_base 38: mod_base = OTHER; note = 2'-O-methyl modified nucleotide
  modified_base 39: mod_base = OTHER; note = 2'-O-methyl modified nucleotide
  modified_base 40: mod_base = OTHER; note = 2'-O-methyl modified nucleotide
  modified_base 69: mod_base = OTHER; note = 2'-O-methyl modified nucleotide
  modified_base 70: mod_base = OTHER; note = 2'-O-methyl modified nucleotide
  modified_base 71: mod_base = OTHER; note = 2'-O-methyl modified nucleotide
  modified_base 72: mod_base = OTHER; note = 2'-O-methyl modified nucleotide
  modified_base 73: mod_base = OTHER; note = 2'-O-methyl modified nucleotide
  modified_base 74: mod_base = OTHER; note = 2'-O-methyl modified nucleotide
  modified_base 75: mod_base = OTHER; note = 2'-O-methyl modified nucleotide
  modified_base 76: mod_base = OTHER; note = 2'-O-methyl modified nucleotide
  modified_base 77: mod_base = OTHER; note = 2'-O-methyl modified nucleotide
  modified_base 78: mod_base = OTHER; note = 2'-O-methyl modified nucleotide
  modified_base 79: mod_base = OTHER; note = 2'-O-methyl modified nucleotide
  modified_base 80: mod_base = OTHER; note = 2'-O-methyl modified nucleotide
  modified_base 81: mod_base = OTHER; note = 2'-O-methyl modified nucleotide
  modified_base 82: mod_base = OTHER; note = 2'-O-methyl modified nucleotide
  modified_base 83: mod_base = OTHER; note = 2'-O-methyl modified nucleotide
  modified_base 84: mod_base = OTHER; note = 2'-O-methyl modified nucleotide
  modified_base 85: mod_base = OTHER; note = 2'-O-methyl modified nucleotide
  modified_base 86: mod_base = OTHER; note = 2'-O-methyl modified nucleotide
  modified_base 87: mod_base = OTHER; note = 2'-O-methyl modified nucleotide
  modified_base 88: mod_base = OTHER; note = 2'-O-methyl modified nucleotide
  modified_base 89: mod_base = OTHER; note = 2'-O-methyl modified nucleotide
  modified_base 90: mod_base = OTHER; note = 2'-O-methyl modified nucleotide
  modified_base 91: mod_base = OTHER; note = 2'-O-methyl modified nucleotide
  modified_base 92: mod_base = OTHER; note = 2'-O-methyl modified nucleotide
  modified_base 93: mod_base = OTHER; note = 2'-O-methyl modified nucleotide
  modified_base 94: mod_base = OTHER; note = 2'-O-methyl modified nucleotide
  modified_base 95: mod_base = OTHER; note = 2'-O-methyl modified nucleotide
  modified_base 96: mod_base = OTHER; note = 2'-O-methyl modified nucleotide
  modified_base 119: mod_base = OTHER; note = Nucleotide with phosphorothioate linkage
  modified_base 120: mod_base = OTHER; note = 2'-O-methyl modified nucleotide with phosphorothioate linkage
  modified_base 121: mod_base = OTHER; note = 2'-O-methyl modified nucleotide with phosphorothioate linkage
  modified_base 122: mod_base = OTHER; note = 2'-O-methyl modified nucleotide
gagaatcaaaatcggtgaatgttttagagctagaaatagcaagttaaaataaggctagtccgttatcaacttgaaaaagtggcaccgagtcggtgctgccttagtgattcaccgattttgat

SEQ ID NO: 16170 - RNA, 121 nt, synthetic construct
  source 1..121: mol_type = other RNA
  modified_base 1: mod_base = OTHER; note = 2'-O-methyl modified nucleotide with phosphorothioate linkage
  modified_base 2: mod_base = OTHER; note = 2'-O-methyl modified nucleotide with phosphorothioate linkage
  modified_base 3: mod_base = OTHER; note = 2'-O-methyl modified nucleotide with phosphorothioate linkage
  modified_base 29: mod_base = OTHER; note = 2'-O-methyl modified nucleotide
  modified_base 30: mod_base = OTHER; note = 2'-O-methyl modified nucleotide
  modified_base 31: mod_base = OTHER; note = 2'-O-methyl modified nucleotide
  modified_base 32: mod_base = OTHER; note = 2'-O-methyl modified nucleotide
  modified_base 33: mod_base = OTHER; note = 2'-O-methyl modified nucleotide
  modified_base 34: mod_base = OTHER; note = 2'-O-methyl modified nucleotide
  modified_base 35: mod_base = OTHER; note = 2'-O-methyl modified nucleotide
  modified_base 36: mod_base = OTHER; note = 2'-O-methyl modified nucleotide
  modified_base 37: mod_base = OTHER; note = 2'-O-methyl modified nucleotide
  modified_base 38: mod_base = OTHER; note = 2'-O-methyl modified nucleotide
  modified_base 39: mod_base = OTHER; note = 2'-O-methyl modified nucleotide
  modified_base 40: mod_base = OTHER; note = 2'-O-methyl modified nucleotide
  modified_base 69: mod_base = OTHER; note = 2'-O-methyl modified nucleotide
  modified_base 70: mod_base = OTHER; note = 2'-O-methyl modified nucleotide
  modified_base 71: mod_base = OTHER; note = 2'-O-methyl modified nucleotide
  modified_base 72: mod_base = OTHER; note = 2'-O-methyl modified nucleotide
  modified_base 73: mod_base = OTHER; note = 2'-O-methyl modified nucleotide
  modified_base 74: mod_base = OTHER; note = 2'-O-methyl modified nucleotide
  modified_base 75: mod_base = OTHER; note = 2'-O-methyl modified nucleotide
  modified_base 76: mod_base = OTHER; note = 2'-O-methyl modified nucleotide
  modified_base 77: mod_base = OTHER; note = 2'-O-methyl modified nucleotide
  modified_base 78: mod_base = OTHER; note = 2'-O-methyl modified nucleotide
  modified_base 79: mod_base = OTHER; note = 2'-O-methyl modified nucleotide
  modified_base 80: mod_base = OTHER; note = 2'-O-methyl modified nucleotide
  modified_base 81: mod_base = OTHER; note = 2'-O-methyl modified nucleotide
  modified_base 82: mod_base = OTHER; note = 2'-O-methyl modified nucleotide
  modified_base 83: mod_base = OTHER; note = 2'-O-methyl modified nucleotide
  modified_base 84: mod_base = OTHER; note = 2'-O-methyl modified nucleotide
  modified_base 85: mod_base = OTHER; note = 2'-O-methyl modified nucleotide
  modified_base 86: mod_base = OTHER; note = 2'-O-methyl modified nucleotide
  modified_base 87: mod_base = OTHER; note = 2'-O-methyl modified nucleotide
  modified_base 88: mod_base = OTHER; note = 2'-O-methyl modified nucleotide
  modified_base 89: mod_base = OTHER; note = 2'-O-methyl modified nucleotide
  modified_base 90: mod_base = OTHER; note = 2'-O-methyl modified nucleotide
  modified_base 91: mod_base = OTHER; note = 2'-O-methyl modified nucleotide
  modified_base 92: mod_base = OTHER; note = 2'-O-methyl modified nucleotide
  modified_base 93: mod_base = OTHER; note = 2'-O-methyl modified nucleotide
  modified_base 94: mod_base = OTHER; note = 2'-O-methyl modified nucleotide
  modified_base 95: mod_base = OTHER; note = 2'-O-methyl modified nucleotide
  modified_base 96: mod_base = OTHER; note = 2'-O-methyl modified nucleotide
  modified_base 118: mod_base = OTHER; note = Nucleotide with phosphorothioate linkage
  modified_base 119: mod_base = OTHER; note = 2'-O-methyl modified nucleotide with phosphorothioate linkage
  modified_base 120: mod_base = OTHER; note = 2'-O-methyl modified nucleotide with phosphorothioate linkage
  modified_base 121: mod_base = OTHER; note = 2'-O-methyl modified nucleotide
gagaatcaaaatcggtgaatgttttagagctagaaatagcaagttaaaataaggctagtccgttatcaacttgaaaaagtggcaccgagtcggtgctgccttagtgattcaccgattttga

SEQ ID NO: 16171 - RNA, 120 nt, synthetic construct
  source 1..120: mol_type = other RNA
  modified_base 1: mod_base = OTHER; note = 2'-O-methyl modified nucleotide with phosphorothioate linkage
  modified_base 2: mod_base = OTHER; note = 2'-O-methyl modified nucleotide with phosphorothioate linkage
  modified_base 3: mod_base = OTHER; note = 2'-O-methyl modified nucleotide with phosphorothioate linkage
  modified_base 29: mod_base = OTHER; note = 2'-O-methyl modified nucleotide
  modified_base 30: mod_base = OTHER; note = 2'-O-methyl modified nucleotide
  modified_base 31: mod_base = OTHER; note = 2'-O-methyl modified nucleotide
  modified_base 32: mod_base = OTHER; note = 2'-O-methyl modified nucleotide
  modified_base 33: mod_base = OTHER; note = 2'-O-methyl modified nucleotide
  modified_base 34: mod_base = OTHER; note = 2'-O-methyl modified nucleotide
  modified_base 35: mod_base = OTHER; note = 2'-O-methyl modified nucleotide
  modified_base 36: mod_base = OTHER; note = 2'-O-methyl modified nucleotide
  modified_base 37: mod_base = OTHER; note = 2'-O-methyl modified nucleotide
  modified_base 38: mod_base = OTHER; note = 2'-O-methyl modified nucleotide
  modified_base 39: mod_base = OTHER; note = 2'-O-methyl modified nucleotide
  modified_base 40: mod_base = OTHER; note = 2'-O-methyl modified nucleotide
  modified_base 69: mod_base = OTHER; note = 2'-O-methyl modified nucleotide
  modified_base 70: mod_base = OTHER; note = 2'-O-methyl modified nucleotide
  modified_base 71: mod_base = OTHER; note = 2'-O-methyl modified nucleotide
  modified_base 72: mod_base = OTHER; note = 2'-O-methyl modified nucleotide
  modified_base 73: mod_base = OTHER; note = 2'-O-methyl modified nucleotide
  modified_base 74: mod_base = OTHER; note = 2'-O-methyl modified nucleotide
  modified_base 75: mod_base = OTHER; note = 2'-O-methyl modified nucleotide
  modified_base 76: mod_base = OTHER; note = 2'-O-methyl modified nucleotide
  modified_base 77: mod_base = OTHER; note = 2'-O-methyl modified nucleotide
  modified_base 78: mod_base = OTHER; note = 2'-O-methyl modified nucleotide
  modified_base 79: mod_base = OTHER; note = 2'-O-methyl modified nucleotide
  modified_base 80: mod_base = OTHER; note = 2'-O-methyl modified nucleotide
  modified_base 81: mod_base = OTHER; note = 2'-O-methyl modified nucleotide
  modified_base 82: mod_base = OTHER; note = 2'-O-methyl modified nucleotide
  modified_base 83: mod_base = OTHER; note = 2'-O-methyl modified nucleotide
  modified_base 84: mod_base = OTHER; note = 2'-O-methyl modified nucleotide
  modified_base 85: mod_base = OTHER; note = 2'-O-methyl modified nucleotide
  modified_base 86: mod_base = OTHER; note = 2'-O-methyl modified nucleotide
  modified_base 87: mod_base = OTHER; note = 2'-O-methyl modified nucleotide
  modified_base 88: mod_base = OTHER; note = 2'-O-methyl modified nucleotide
  modified_base 89: mod_base = OTHER; note = 2'-O-methyl modified nucleotide
  modified_base 90: mod_base = OTHER; note = 2'-O-methyl modified nucleotide
  modified_base 91: mod_base = OTHER; note = 2'-O-methyl modified nucleotide
  modified_base 92: mod_base = OTHER; note = 2'-O-methyl modified nucleotide
  modified_base 93: mod_base = OTHER; note = 2'-O-methyl modified nucleotide
  modified_base 94: mod_base = OTHER; note = 2'-O-methyl modified nucleotide
  modified_base 95: mod_base = OTHER; note = 2'-O-methyl modified nucleotide
  modified_base 96: mod_base = OTHER; note = 2'-O-methyl modified nucleotide
  modified_base 117: mod_base = OTHER; note = Nucleotide with phosphorothioate linkage
  modified_base 118: mod_base = OTHER; note = 2'-O-methyl modified nucleotide with phosphorothioate linkage
  modified_base 119: mod_base = OTHER; note = 2'-O-methyl modified nucleotide with phosphorothioate linkage
  modified_base 120: mod_base = OTHER; note = 2'-O-methyl modified nucleotide
gagaatcaaaatcggtgaatgttttagagctagaaatagcaagttaaaataaggctagtccgttatcaacttgaaaaagtggcaccgagtcggtgctgccttagtgattcaccgattttg

SEQ ID NO: 16172 - RNA, 119 nt, synthetic construct
  source 1..119: mol_type = other RNA
  modified_base 1: mod_base = OTHER; note = 2'-O-methyl modified nucleotide with phosphorothioate linkage
  modified_base 2: mod_base = OTHER; note = 2'-O-methyl modified nucleotide with phosphorothioate linkage
  modified_base 3: mod_base = OTHER; note = 2'-O-methyl modified nucleotide with phosphorothioate linkage
  modified_base 29: mod_base = OTHER; note = 2'-O-methyl modified nucleotide
  modified_base 30: mod_base = OTHER; note = 2'-O-methyl modified nucleotide
  modified_base 31: mod_base = OTHER; note = 2'-O-methyl modified nucleotide
  modified_base 32: mod_base = OTHER; note = 2'-O-methyl modified nucleotide
  modified_base 33: mod_base = OTHER; note = 2'-O-methyl modified nucleotide
  modified_base 34: mod_base = OTHER; note = 2'-O-methyl modified nucleotide
  modified_base 35: mod_base = OTHER; note = 2'-O-methyl modified nucleotide
  modified_base 36: mod_base = OTHER; note = 2'-O-methyl modified nucleotide
  modified_base 37: mod_base = OTHER; note = 2'-O-methyl modified nucleotide
  modified_base 38: mod_base = OTHER; note = 2'-O-methyl modified nucleotide
  modified_base 39: mod_base = OTHER; note = 2'-O-methyl modified nucleotide
  modified_base 40: mod_base = OTHER; note = 2'-O-methyl modified nucleotide
  modified_base 69: mod_base = OTHER; note = 2'-O-methyl modified nucleotide
  modified_base 70: mod_base = OTHER; note = 2'-O-methyl modified nucleotide
  modified_base 71: mod_base = OTHER; note = 2'-O-methyl modified nucleotide
  modified_base 72: mod_base = OTHER; note = 2'-O-methyl modified nucleotide
  modified_base 73: mod_base = OTHER; note = 2'-O-methyl modified nucleotide
  modified_base 74: mod_base = OTHER; note = 2'-O-methyl modified nucleotide
  modified_base 75: mod_base = OTHER; note = 2'-O-methyl modified nucleotide
  modified_base 76: mod_base = OTHER; note = 2'-O-methyl modified nucleotide
  modified_base 77: mod_base = OTHER; note = 2'-O-methyl modified nucleotide
  modified_base 78: mod_base = OTHER; note = 2'-O-methyl modified nucleotide
  modified_base 79: mod_base = OTHER; note = 2'-O-methyl modified nucleotide
  modified_base 80: mod_base = OTHER; note = 2'-O-methyl modified nucleotide
  modified_base 81: mod_base = OTHER; note = 2'-O-methyl modified nucleotide
  modified_base 82: mod_base = OTHER; note = 2'-O-methyl modified nucleotide
  modified_base 83: mod_base = OTHER; note = 2'-O-methyl modified nucleotide
  modified_base 84: mod_base = OTHER; note = 2'-O-methyl modified nucleotide
  modified_base 85: mod_base = OTHER; note = 2'-O-methyl modified nucleotide
  modified_base 86: mod_base = OTHER; note = 2'-O-methyl modified nucleotide
  modified_base 87: mod_base = OTHER; note = 2'-O-methyl modified nucleotide
  modified_base 88: mod_base = OTHER; note = 2'-O-methyl modified nucleotide
  modified_base 89: mod_base = OTHER; note = 2'-O-methyl modified nucleotide
  modified_base 90: mod_base = OTHER; note = 2'-O-methyl modified nucleotide
  modified_base 91: mod_base = OTHER; note = 2'-O-methyl modified nucleotide
  modified_base 92: mod_base = OTHER; note = 2'-O-methyl modified nucleotide
  modified_base 93: mod_base = OTHER; note = 2'-O-methyl modified nucleotide
  modified_base 94: mod_base = OTHER; note = 2'-O-methyl modified nucleotide
  modified_base 95: mod_base = OTHER; note = 2'-O-methyl modified nucleotide
  modified_base 96: mod_base = OTHER; note = 2'-O-methyl modified nucleotide
  modified_base 116: mod_base = OTHER; note = Nucleotide with phosphorothioate linkage
  modified_base 117: mod_base = OTHER; note = 2'-O-methyl modified nucleotide with phosphorothioate linkage
  modified_base 118: mod_base = OTHER; note = 2'-O-methyl modified nucleotide with phosphorothioate linkage
  modified_base 119: mod_base = OTHER; note = 2'-O-methyl modified nucleotide
gagaatcaaaatcggtgaatgttttagagctagaaatagcaagttaaaataaggctagtccgttatcaacttgaaaaagtggcaccgagtcggtgctgccttagtgattcaccgatttt

SEQ ID NO: 16173 - RNA, 118 nt, synthetic construct
  source 1..118: mol_type = other RNA
  modified_base 1: mod_base = OTHER; note = 2'-O-methyl modified nucleotide with phosphorothioate linkage
  modified_base 2: mod_base = OTHER; note = 2'-O-methyl modified nucleotide with phosphorothioate linkage
  modified_base 3: mod_base = OTHER; note = 2'-O-methyl modified nucleotide with phosphorothioate linkage
  modified_base 29: mod_base = OTHER; note = 2'-O-methyl modified nucleotide
  modified_base 30: mod_base = OTHER; note = 2'-O-methyl modified nucleotide
  modified_base 31: mod_base = OTHER; note = 2'-O-methyl modified nucleotide
  modified_base 32: mod_base = OTHER; note = 2'-O-methyl modified nucleotide
  modified_base 33: mod_base = OTHER; note = 2'-O-methyl modified nucleotide
  modified_base 34: mod_base = OTHER; note = 2'-O-methyl modified nucleotide
  modified_base 35: mod_base = OTHER; note = 2'-O-methyl modified nucleotide
  modified_base 36: mod_base = OTHER; note = 2'-O-methyl modified nucleotide
  modified_base 37: mod_base = OTHER; note = 2'-O-methyl modified nucleotide
  modified_base 38: mod_base = OTHER; note = 2'-O-methyl modified nucleotide
  modified_base 39: mod_base = OTHER; note = 2'-O-methyl modified nucleotide
  modified_base 40: mod_base = OTHER; note = 2'-O-methyl modified nucleotide
  modified_base 69: mod_base = OTHER; note = 2'-O-methyl modified nucleotide
  modified_base 70: mod_base = OTHER; note = 2'-O-methyl modified nucleotide
  modified_base 71: mod_base = OTHER; note = 2'-O-methyl modified nucleotide
  modified_base 72: mod_base = OTHER; note = 2'-O-methyl modified nucleotide
  modified_base 73: mod_base = OTHER; note = 2'-O-methyl modified nucleotide
  modified_base 74: mod_base = OTHER; note = 2'-O-methyl modified nucleotide
  modified_base 75: mod_base = OTHER; note = 2'-O-methyl modified nucleotide
  modified_base 76: mod_base = OTHER; note = 2'-O-methyl modified nucleotide
  modified_base 77: mod_base = OTHER; note = 2'-O-methyl modified nucleotide
  modified_base 78: mod_base = OTHER; note = 2'-O-methyl modified nucleotide
  modified_base 79: mod_base = OTHER; note = 2'-O-methyl modified nucleotide
  modified_base 80: mod_base = OTHER; note = 2'-O-methyl modified nucleotide
  modified_base 81: mod_base = OTHER; note = 2'-O-methyl modified nucleotide
  modified_base 82: mod_base = OTHER; note = 2'-O-methyl modified nucleotide
  modified_base 83: mod_base = OTHER; note = 2'-O-methyl modified nucleotide
  modified_base 84: mod_base = OTHER; note = 2'-O-methyl modified nucleotide
  modified_base 85: mod_base = OTHER; note = 2'-O-methyl modified nucleotide
  modified_base 86: mod_base = OTHER; note = 2'-O-methyl modified nucleotide
  modified_base 87: mod_base = OTHER; note = 2'-O-methyl modified nucleotide
  modified_base 88: mod_base = OTHER; note = 2'-O-methyl modified nucleotide
  modified_base 89: mod_base = OTHER; note = 2'-O-methyl modified nucleotide
  modified_base 90: mod_base = OTHER; note = 2'-O-methyl modified nucleotide
  modified_base 91: mod_base = OTHER; note = 2'-O-methyl modified nucleotide
  modified_base 92: mod_base = OTHER; note = 2'-O-methyl modified nucleotide
  modified_base 93: mod_base = OTHER; note = 2'-O-methyl modified nucleotide
  modified_base 94: mod_base = OTHER; note = 2'-O-methyl modified nucleotide
  modified_base 95: mod_base = OTHER; note = 2'-O-methyl modified nucleotide
  modified_base 96: mod_base = OTHER; note = 2'-O-methyl modified nucleotide
  modified_base 115: mod_base = OTHER; note = Nucleotide with phosphorothioate linkage
  modified_base 116: mod_base = OTHER; note = 2'-O-methyl modified nucleotide with phosphorothioate linkage
  modified_base 117: mod_base = OTHER; note = 2'-O-methyl modified nucleotide with phosphorothioate linkage
  modified_base 118: mod_base = OTHER; note = 2'-O-methyl modified nucleotide
gagaatcaaaatcggtgaatgttttagagctagaaatagcaagttaaaataaggctagtccgttatcaacttgaaaaagtggcaccgagtcggtgctgccttagtgattcaccgattt

SEQ ID NO: 16174 - RNA, 117 nt, synthetic construct
  source 1..117: mol_type = other RNA
  modified_base 1: mod_base = OTHER; note = 2'-O-methyl modified nucleotide with phosphorothioate linkage
  modified_base 2: mod_base = OTHER; note = 2'-O-methyl modified nucleotide with phosphorothioate linkage
  modified_base 3: mod_base = OTHER; note = 2'-O-methyl modified nucleotide with phosphorothioate linkage
  modified_base 29: mod_base = OTHER; note = 2'-O-methyl modified nucleotide
  modified_base 30: mod_base = OTHER; note = 2'-O-methyl modified nucleotide
  modified_base 31: mod_base = OTHER; note = 2'-O-methyl modified nucleotide
  modified_base 32: mod_base = OTHER; note = 2'-O-methyl modified nucleotide
  modified_base 33: mod_base = OTHER; note = 2'-O-methyl modified nucleotide
  modified_base 34: mod_base = OTHER; note = 2'-O-methyl modified nucleotide
  modified_base 35: mod_base = OTHER; note = 2'-O-methyl modified nucleotide
  modified_base 36: mod_base = OTHER; note = 2'-O-methyl modified nucleotide
  modified_base 37: mod_base = OTHER; note = 2'-O-methyl modified nucleotide
  modified_base 38: mod_base = OTHER; note = 2'-O-methyl modified nucleotide
  modified_base 39: mod_base = OTHER; note = 2'-O-methyl modified nucleotide
  modified_base 40: mod_base = OTHER; note = 2'-O-methyl modified nucleotide
  modified_base 69: mod_base = OTHER; note = 2'-O-methyl modified nucleotide
  modified_base 70: mod_base = OTHER; note = 2'-O-methyl modified nucleotide
  modified_base 71: mod_base = OTHER; note = 2'-O-methyl modified nucleotide
  modified_base 72: mod_base = OTHER; note = 2'-O-methyl modified nucleotide
  modified_base 73: mod_base = OTHER; note = 2'-O-methyl modified nucleotide
  modified_base 74: mod_base = OTHER; note = 2'-O-methyl modified nucleotide
  modified_base 75: mod_base = OTHER; note = 2'-O-methyl modified nucleotide
  modified_base 76: mod_base = OTHER; note = 2'-O-methyl modified nucleotide
  modified_base 77: mod_base = OTHER; note = 2'-O-methyl modified nucleotide
  modified_base 78: mod_base = OTHER; note = 2'-O-methyl modified nucleotide
  modified_base 79: mod_base = OTHER; note = 2'-O-methyl modified nucleotide
  modified_base 80: mod_base = OTHER; note = 2'-O-methyl modified nucleotide
  modified_base 81: mod_base = OTHER; note = 2'-O-methyl modified nucleotide
  modified_base 82: mod_base = OTHER; note = 2'-O-methyl modified nucleotide
  modified_base 83: mod_base = OTHER; note = 2'-O-methyl modified nucleotide
  modified_base 84: mod_base = OTHER; note = 2'-O-methyl modified nucleotide
  modified_base 85: mod_base = OTHER; note = 2'-O-methyl modified nucleotide
  modified_base 86: mod_base = OTHER; note = 2'-O-methyl modified nucleotide
  modified_base 87: mod_base = OTHER; note = 2'-O-methyl modified nucleotide
  modified_base 88: mod_base = OTHER; note = 2'-O-methyl modified nucleotide
  modified_base 89: mod_base = OTHER; note = 2'-O-methyl modified nucleotide
  modified_base 90: mod_base = OTHER; note = 2'-O-methyl modified nucleotide
  modified_base 91: mod_base = OTHER; note = 2'-O-methyl modified nucleotide
  modified_base 92: mod_base = OTHER; note = 2'-O-methyl modified nucleotide
  modified_base 93: mod_base = OTHER; note = 2'-O-methyl modified nucleotide
  modified_base 94: mod_base = OTHER; note = 2'-O-methyl modified nucleotide
  modified_base 95: mod_base = OTHER; note = 2'-O-methyl modified nucleotide
  modified_base 96: mod_base = OTHER; note = 2'-O-methyl modified nucleotide
  modified_base 114: mod_base = OTHER; note = Nucleotide with phosphorothioate linkage
  modified_base 115: mod_base = OTHER; note = 2'-O-methyl modified nucleotide with phosphorothioate linkage
  modified_base 116: mod_base = OTHER; note = 2'-O-methyl modified nucleotide with phosphorothioate linkage
  modified_base 117: mod_base = OTHER; note = 2'-O-methyl modified nucleotide
gagaatcaaaatcggtgaatgttttagagctagaaatagcaagttaaaataaggctagtccgttatcaacttgaaaaagtggcaccgagtcggtgctgccttagtgattcaccgatt

SEQ ID NO: 16175 - RNA, 124 nt, synthetic construct
  source 1..124: mol_type = other RNA
  modified_base 1: mod_base = OTHER; note = 2'-O-methyl modified nucleotide with phosphorothioate linkage
  modified_base 2: mod_base = OTHER; note = 2'-O-methyl modified nucleotide with phosphorothioate linkage
  modified_base 3: mod_base = OTHER; note = 2'-O-methyl modified nucleotide with phosphorothioate linkage
  modified_base 29: mod_base = OTHER; note = 2'-O-methyl modified nucleotide
  modified_base 30: mod_base = OTHER; note = 2'-O-methyl modified nucleotide
  modified_base 31: mod_base = OTHER; note = 2'-O-methyl modified nucleotide
  modified_base 32: mod_base = OTHER; note = 2'-O-methyl modified nucleotide
  modified_base 33: mod_base = OTHER; note = 2'-O-methyl modified nucleotide
  modified_base 34: mod_base = OTHER; note = 2'-O-methyl modified nucleotide
  modified_base 35: mod_base = OTHER; note = 2'-O-methyl modified nucleotide
  modified_base 36: mod_base = OTHER; note = 2'-O-methyl modified nucleotide
  modified_base 37: mod_base = OTHER; note = 2'-O-methyl modified nucleotide
  modified_base 38: mod_base = OTHER; note = 2'-O-methyl modified nucleotide
  modified_base 39: mod_base = OTHER; note = 2'-O-methyl modified nucleotide
  modified_base 40: mod_base = OTHER; note = 2'-O-methyl modified nucleotide
  modified_base 69: mod_base = OTHER; note = 2'-O-methyl modified nucleotide
  modified_base 70: mod_base = OTHER; note = 2'-O-methyl modified nucleotide
  modified_base 71: mod_base = OTHER; note = 2'-O-methyl modified nucleotide
  modified_base 72: mod_base = OTHER; note = 2'-O-methyl modified nucleotide
  modified_base 73: mod_base = OTHER; note = 2'-O-methyl modified nucleotide
  modified_base 74: mod_base = OTHER; note = 2'-O-methyl modified nucleotide
  modified_base 75: mod_base = OTHER; note = 2'-O-methyl modified nucleotide
  modified_base 76: mod_base = OTHER; note = 2'-O-methyl modified nucleotide
  modified_base 77: mod_base = OTHER; note = 2'-O-methyl modified nucleotide
  modified_base 78: mod_base = OTHER; note = 2'-O-methyl modified nucleotide
  modified_base 79: mod_base = OTHER; note = 2'-O-methyl modified nucleotide
  modified_base 80: mod_base = OTHER; note = 2'-O-methyl modified nucleotide
  modified_base 81: mod_base = OTHER; note = 2'-O-methyl modified nucleotide
  modified_base 82: mod_base = OTHER; note = 2'-O-methyl modified nucleotide
  modified_base 83: mod_base = OTHER; note = 2'-O-methyl modified nucleotide
  modified_base 84: mod_base = OTHER; note = 2'-O-methyl modified nucleotide
  modified_base 85: mod_base = OTHER; note = 2'-O-methyl modified nucleotide
  modified_base 86: mod_base = OTHER; note = 2'-O-methyl modified nucleotide
  modified_base 87: mod_base = OTHER; note = 2'-O-methyl modified nucleotide
  modified_base 88: mod_base = OTHER; note = 2'-O-methyl modified nucleotide
  modified_base 89: mod_base = OTHER; note = 2'-O-methyl modified nucleotide
  modified_base 90: mod_base = OTHER; note = 2'-O-methyl modified nucleotide
  modified_base 91: mod_base = OTHER; note = 2'-O-methyl modified nucleotide
  modified_base 92: mod_base = OTHER; note = 2'-O-methyl modified nucleotide
  modified_base 93: mod_base = OTHER; note = 2'-O-methyl modified nucleotide
  modified_base 94: mod_base = OTHER; note = 2'-O-methyl modified nucleotide
  modified_base 95: mod_base = OTHER; note = 2'-O-methyl modified nucleotide
  modified_base 96: mod_base = OTHER; note = 2'-O-methyl modified nucleotide
  modified_base 121: mod_base = OTHER; note = Nucleotide with phosphorothioate linkage
  modified_base 122: mod_base = OTHER; note = 2'-O-methyl modified nucleotide with phosphorothioate linkage
  modified_base 123: mod_base = OTHER; note = 2'-O-methyl modified nucleotide with phosphorothioate linkage
  modified_base 124: mod_base = OTHER; note = 2'-O-methyl modified nucleotide
gagaatcaaaatcggtgaatgttttagagctagaaatagcaagttaaaataaggctagtccgttatcaacttgaaaaagtggcaccgagtcggtgctctgccttagtgattcaccgattttgat

SEQ ID NO: 16176 - RNA, 123 nt, synthetic construct
  source 1..123: mol_type = other RNA
  modified_base 1: mod_base = OTHER; note = 2'-O-methyl modified nucleotide with phosphorothioate linkage
  modified_base 2: mod_base = OTHER; note = 2'-O-methyl modified nucleotide with phosphorothioate linkage
  modified_base 3: mod_base = OTHER; note = 2'-O-methyl modified nucleotide with phosphorothioate linkage
  modified_base 29: mod_base = OTHER; note = 2'-O-methyl modified nucleotide
  modified_base 30: mod_base = OTHER; note = 2'-O-methyl modified nucleotide
  modified_base 31: mod_base = OTHER; note = 2'-O-methyl modified nucleotide
  modified_base 32: mod_base = OTHER; note = 2'-O-methyl modified nucleotide
  modified_base 33: mod_base = OTHER; note = 2'-O-methyl modified nucleotide
  modified_base 34: mod_base = OTHER; note = 2'-O-methyl modified nucleotide
  modified_base 35: mod_base = OTHER; note = 2'-O-methyl modified nucleotide
  modified_base 36: mod_base = OTHER; note = 2'-O-methyl modified nucleotide
  modified_base 37: mod_base = OTHER; note = 2'-O-methyl modified nucleotide
  modified_base 38: mod_base = OTHER; note = 2'-O-methyl modified nucleotide
  modified_base 39: mod_base = OTHER; note = 2'-O-methyl modified nucleotide
  modified_base 40: mod_base = OTHER; note = 2'-O-methyl modified nucleotide
  modified_base 69: mod_base = OTHER; note = 2'-O-methyl modified nucleotide
  modified_base 70: mod_base = OTHER; note = 2'-O-methyl modified nucleotide
  modified_base 71: mod_base = OTHER; note = 2'-O-methyl modified nucleotide
  modified_base 72: mod_base = OTHER; note = 2'-O-methyl modified nucleotide
  modified_base 73: mod_base = OTHER; note = 2'-O-methyl modified nucleotide
  modified_base 74: mod_base = OTHER; note = 2'-O-methyl modified nucleotide
  modified_base 75: mod_base = OTHER; note = 2'-O-methyl modified nucleotide
  modified_base 76: mod_base = OTHER; note = 2'-O-methyl modified nucleotide
  modified_base 77: mod_base = OTHER; note = 2'-O-methyl modified nucleotide
  modified_base 78: mod_base = OTHER; note = 2'-O-methyl modified nucleotide
  modified_base 79: mod_base = OTHER; note = 2'-O-methyl modified nucleotide
  modified_base 80: mod_base = OTHER; note = 2'-O-methyl modified nucleotide
  modified_base 81: mod_base = OTHER; note = 2'-O-methyl modified nucleotide
  modified_base 82: mod_base = OTHER; note = 2'-O-methyl modified nucleotide
  modified_base 83: mod_base = OTHER; note = 2'-O-methyl modified nucleotide
  modified_base 84: mod_base = OTHER; note = 2'-O-methyl modified nucleotide
  modified_base 85: mod_base = OTHER; note = 2'-O-methyl modified nucleotide
  modified_base 86: mod_base = OTHER; note = 2'-O-methyl modified nucleotide
  modified_base 87: mod_base = OTHER; note = 2'-O-methyl modified nucleotide
  modified_base 88: mod_base = OTHER; note = 2'-O-methyl modified nucleotide
  modified_base 89: mod_base = OTHER; note = 2'-O-methyl modified nucleotide
  modified_base 90: mod_base = OTHER; note = 2'-O-methyl modified nucleotide
  modified_base 91: mod_base = OTHER; note = 2'-O-methyl modified nucleotide
  modified_base 92: mod_base = OTHER; note = 2'-O-methyl modified nucleotide
  modified_base 93: mod_base = OTHER; note = 2'-O-methyl modified nucleotide
  modified_base 94: mod_base = OTHER; note = 2'-O-methyl modified nucleotide
  modified_base 95: mod_base = OTHER; note = 2'-O-methyl modified nucleotide
  modified_base 96: mod_base = OTHER; note = 2'-O-methyl modified nucleotide
  modified_base 120: mod_base = OTHER; note = Nucleotide with phosphorothioate linkage
  modified_base 121: mod_base = OTHER; note = 2'-O-methyl modified nucleotide with phosphorothioate linkage
  modified_base 122: mod_base = OTHER; note = 2'-O-methyl modified nucleotide with phosphorothioate linkage
  modified_base 123: mod_base = OTHER; note = 2'-O-methyl modified nucleotide
gagaatcaaaatcggtgaatgttttagagctagaaatagcaagttaaaataaggctagtccgttatcaacttgaaaaagtggcaccgagtcggtgctctgccttagtgattcaccgattttga

SEQ ID NO: 16177 - RNA, 122 nt, synthetic construct
  source 1..122: mol_type = other RNA
  modified_base 1: mod_base = OTHER; note = 2'-O-methyl modified nucleotide with phosphorothioate linkage
  modified_base 2: mod_base = OTHER; note = 2'-O-methyl modified nucleotide with phosphorothioate linkage
  modified_base 3: mod_base = OTHER; note = 2'-O-methyl modified nucleotide with phosphorothioate linkage
  modified_base 29: mod_base = OTHER; note = 2'-O-methyl modified nucleotide
  modified_base 30: mod_base = OTHER; note = 2'-O-methyl modified nucleotide
  modified_base 31: mod_base = OTHER; note = 2'-O-methyl modified nucleotide
  modified_base 32: mod_base = OTHER; note = 2'-O-methyl modified nucleotide
  modified_base 33: mod_base = OTHER; note = 2'-O-methyl modified nucleotide
  modified_base 34: mod_base = OTHER; note = 2'-O-methyl modified nucleotide
  modified_base 35: mod_base = OTHER; note = 2'-O-methyl modified nucleotide
  modified_base 36: mod_base = OTHER; note = 2'-O-methyl modified nucleotide
  modified_base 37: mod_base = OTHER; note = 2'-O-methyl modified nucleotide
  modified_base 38: mod_base = OTHER; note = 2'-O-methyl modified nucleotide
  modified_base 39: mod_base = OTHER; note = 2'-O-methyl modified nucleotide
  modified_base 40: mod_base = OTHER; note = 2'-O-methyl modified nucleotide
  modified_base 69: mod_base = OTHER; note = 2'-O-methyl modified nucleotide
  modified_base 70: mod_base = OTHER; note = 2'-O-methyl modified nucleotide
  modified_base 71: mod_base = OTHER; note = 2'-O-methyl modified nucleotide
  modified_base 72: mod_base = OTHER; note = 2'-O-methyl modified nucleotide
  modified_base 73: mod_base = OTHER; note = 2'-O-methyl modified nucleotide
  modified_base 74: mod_base = OTHER; note = 2'-O-methyl modified nucleotide
  modified_base 75: mod_base = OTHER; note = 2'-O-methyl modified nucleotide
  modified_base 76: mod_base = OTHER; note = 2'-O-methyl modified nucleotide
  modified_base 77: mod_base = OTHER; note = 2'-O-methyl modified nucleotide
  modified_base 78: mod_base = OTHER; note = 2'-O-methyl modified nucleotide
  modified_base 79: mod_base = OTHER; note = 2'-O-methyl modified nucleotide
  modified_base 80: mod_base = OTHER; note = 2'-O-methyl modified nucleotide
  modified_base 81: mod_base = OTHER; note = 2'-O-methyl modified nucleotide
  modified_base 82: mod_base = OTHER; note = 2'-O-methyl modified nucleotide
  modified_base 83: mod_base = OTHER; note = 2'-O-methyl modified nucleotide
  modified_base 84: mod_base = OTHER; note = 2'-O-methyl modified nucleotide
  modified_base 85: mod_base = OTHER; note = 2'-O-methyl modified nucleotide
  modified_base 86: mod_base = OTHER; note = 2'-O-methyl modified nucleotide
  modified_base 87: mod_base = OTHER; note = 2'-O-methyl modified nucleotide
  modified_base 88: mod_base = OTHER; note = 2'-O-methyl modified nucleotide
  modified_base 89: mod_base = OTHER; note = 2'-O-methyl modified nucleotide
  modified_base 90: mod_base = OTHER; note = 2'-O-methyl modified nucleotide
  modified_base 91: mod_base = OTHER; note = 2'-O-methyl modified nucleotide
  modified_base 92: mod_base = OTHER; note = 2'-O-methyl modified nucleotide
  modified_base 93: mod_base = OTHER; note = 2'-O-methyl modified nucleotide
  modified_base 94: mod_base = OTHER; note = 2'-O-methyl modified nucleotide
  modified_base 95: mod_base = OTHER; note = 2'-O-methyl modified nucleotide
  modified_base 96: mod_base = OTHER; note = 2'-O-methyl modified nucleotide
  modified_base 119: mod_base = OTHER; note = Nucleotide with phosphorothioate linkage
  modified_base 120: mod_base = OTHER; note = 2'-O-methyl modified nucleotide with phosphorothioate linkage
  modified_base 121: mod_base = OTHER; note = 2'-O-methyl modified nucleotide with phosphorothioate linkage
  modified_base 122: mod_base = OTHER; note = 2'-O-methyl modified nucleotide
gagaatcaaaatcggtgaatgttttagagctagaaatagcaagttaaaataaggctagtccgttatcaacttgaaaaagtggcaccgagtcggtgctctgccttagtgattcaccgattttg

SEQ ID NO: 16178 - RNA, 121 nt, synthetic construct
  source 1..121: mol_type = other RNA
  modified_base 1: mod_base = OTHER; note = 2'-O-methyl modified nucleotide with phosphorothioate linkage
  modified_base 2: mod_base = OTHER; note = 2'-O-methyl modified nucleotide with phosphorothioate linkage
  modified_base 3: mod_base = OTHER; note = 2'-O-methyl modified nucleotide with phosphorothioate linkage
  modified_base 29: mod_base = OTHER; note = 2'-O-methyl modified nucleotide
  modified_base 30: mod_base = OTHER; note = 2'-O-methyl modified nucleotide
  modified_base 31: mod_base = OTHER; note = 2'-O-methyl modified nucleotide
  modified_base 32: mod_base = OTHER; note = 2'-O-methyl modified nucleotide
  modified_base 33: mod_base = OTHER; note = 2'-O-methyl modified nucleotide
  modified_base 34: mod_base = OTHER; note = 2'-O-methyl modified nucleotide
  modified_base 35: mod_base = OTHER; note = 2'-O-methyl modified nucleotide
  modified_base 36: mod_base = OTHER; note = 2'-O-methyl modified nucleotide
  modified_base 37: mod_base = OTHER; note = 2'-O-methyl modified nucleotide
  modified_base 38: mod_base = OTHER; note = 2'-O-methyl modified nucleotide
  modified_base 39: mod_base = OTHER; note = 2'-O-methyl modified nucleotide
  modified_base 40: mod_base = OTHER; note = 2'-O-methyl modified nucleotide
  modified_base 69: mod_base = OTHER; note = 2'-O-methyl modified nucleotide
  modified_base 70: mod_base = OTHER; note = 2'-O-methyl modified nucleotide
  modified_base 71: mod_base = OTHER; note = 2'-O-methyl modified nucleotide
  modified_base 72: mod_base = OTHER; note = 2'-O-methyl modified nucleotide
  modified_base 73: mod_base = OTHER; note = 2'-O-methyl modified nucleotide
  modified_base 74: mod_base = OTHER; note = 2'-O-methyl modified nucleotide
  modified_base 75: mod_base = OTHER; note = 2'-O-methyl modified nucleotide
  modified_base 76: mod_base = OTHER; note = 2'-O-methyl modified nucleotide
  modified_base 77: mod_base = OTHER; note = 2'-O-methyl modified nucleotide
  modified_base 78: mod_base = OTHER; note = 2'-O-methyl modified nucleotide
  modified_base 79: mod_base = OTHER; note = 2'-O-methyl modified nucleotide
  modified_base 80: mod_base = OTHER; note = 2'-O-methyl modified nucleotide
  modified_base 81: mod_base = OTHER; note = 2'-O-methyl modified nucleotide
  modified_base 82: mod_base = OTHER; note = 2'-O-methyl modified nucleotide
  modified_base 83: mod_base = OTHER; note = 2'-O-methyl modified nucleotide
  modified_base 84: mod_base = OTHER; note = 2'-O-methyl modified nucleotide
  modified_base 85: mod_base = OTHER; note = 2'-O-methyl modified nucleotide
  modified_base 86: mod_base = OTHER; note = 2'-O-methyl modified nucleotide
  modified_base 87: mod_base = OTHER; note = 2'-O-methyl modified nucleotide
  modified_base 88: mod_base = OTHER; note = 2'-O-methyl modified nucleotide
  modified_base 89: mod_base = OTHER; note = 2'-O-methyl modified nucleotide
  modified_base 90: mod_base = OTHER; note = 2'-O-methyl modified nucleotide
  modified_base 91: mod_base = OTHER; note = 2'-O-methyl modified nucleotide
  modified_base 92: mod_base = OTHER; note = 2'-O-methyl modified nucleotide
  modified_base 93: mod_base = OTHER; note = 2'-O-methyl modified nucleotide
  modified_base 94: mod_base = OTHER; note = 2'-O-methyl modified nucleotide
  modified_base 95: mod_base = OTHER; note = 2'-O-methyl modified nucleotide
  modified_base 96: mod_base = OTHER; note = 2'-O-methyl modified nucleotide
  modified_base 118: mod_base = OTHER; note = Nucleotide with phosphorothioate linkage
  modified_base 119: mod_base = OTHER; note = 2'-O-methyl modified nucleotide with phosphorothioate linkage
  modified_base 120: mod_base = OTHER; note = 2'-O-methyl modified nucleotide with phosphorothioate linkage
  modified_base 121: mod_base = OTHER; note = 2'-O-methyl modified nucleotide
gagaatcaaaatcggtgaatgttttagagctagaaatagcaagttaaaataaggctagtccgttatcaacttgaaaaagtggcaccgagtcggtgctctgccttagtgattcaccgatttt

SEQ ID NO: 16179 - RNA, 120 nt, synthetic construct
  source 1..120: mol_type = other RNA
  modified_base 1: mod_base = OTHER; note = 2'-O-methyl modified nucleotide with phosphorothioate linkage
  modified_base 2: mod_base = OTHER; note = 2'-O-methyl modified nucleotide with phosphorothioate linkage
  modified_base 3: mod_base = OTHER; note = 2'-O-methyl modified nucleotide with phosphorothioate linkage
  modified_base 29: mod_base = OTHER; note = 2'-O-methyl modified nucleotide
  modified_base 30: mod_base = OTHER; note = 2'-O-methyl modified nucleotide
  modified_base 31: mod_base = OTHER; note = 2'-O-methyl modified nucleotide
  modified_base 32: mod_base = OTHER; note = 2'-O-methyl modified nucleotide
  modified_base 33: mod_base = OTHER; note = 2'-O-methyl modified nucleotide
  modified_base 34: mod_base = OTHER; note = 2'-O-methyl modified nucleotide
  modified_base 35: mod_base = OTHER; note = 2'-O-methyl modified nucleotide
  modified_base 36: mod_base = OTHER; note = 2'-O-methyl modified nucleotide
  modified_base 37: mod_base = OTHER; note = 2'-O-methyl modified nucleotide
  modified_base 38: mod_base = OTHER; note = 2'-O-methyl modified nucleotide
  modified_base 39: mod_base = OTHER; note = 2'-O-methyl modified nucleotide
  modified_base 40: mod_base = OTHER; note = 2'-O-methyl modified nucleotide
  modified_base 69: mod_base = OTHER; note = 2'-O-methyl modified nucleotide
  modified_base 70: mod_base = OTHER; note = 2'-O-methyl modified nucleotide
  modified_base 71: mod_base = OTHER; note = 2'-O-methyl modified nucleotide
  modified_base 72: mod_base = OTHER; note = 2'-O-methyl modified nucleotide
  modified_base 73: mod_base = OTHER; note = 2'-O-methyl modified nucleotide
  modified_base 74: mod_base = OTHER; note = 2'-O-methyl modified nucleotide
  modified_base 75: mod_base = OTHER; note = 2'-O-methyl modified nucleotide
  modified_base 76: mod_base = OTHER; note = 2'-O-methyl modified nucleotide
  modified_base 77: mod_base = OTHER; note = 2'-O-methyl modified nucleotide
  modified_base 78: mod_base = OTHER; note = 2'-O-methyl modified nucleotide
  modified_base 79: mod_base = OTHER; note = 2'-O-methyl modified nucleotide
  modified_base 80: mod_base = OTHER; note = 2'-O-methyl modified nucleotide
  modified_base 81: mod_base = OTHER; note = 2'-O-methyl modified nucleotide
  modified_base 82: mod_base = OTHER; note = 2'-O-methyl modified nucleotide
  modified_base 83: mod_base = OTHER; note = 2'-O-methyl modified nucleotide
  modified_base 84: mod_base = OTHER; note = 2'-O-methyl modified nucleotide
  modified_base 85: mod_base = OTHER; note = 2'-O-methyl modified nucleotide
  modified_base 86: mod_base = OTHER; note = 2'-O-methyl modified nucleotide
  modified_base 87: mod_base = OTHER; note = 2'-O-methyl modified nucleotide
  modified_base 88: mod_base = OTHER; note = 2'-O-methyl modified nucleotide
  modified_base 89: mod_base = OTHER; note = 2'-O-methyl modified nucleotide
  modified_base 90: mod_base = OTHER; note = 2'-O-methyl modified nucleotide
  modified_base 91: mod_base = OTHER; note = 2'-O-methyl modified nucleotide
  modified_base 92: mod_base = OTHER; note = 2'-O-methyl modified nucleotide
  modified_base 93: mod_base = OTHER; note = 2'-O-methyl modified nucleotide
  modified_base 94: mod_base = OTHER; note = 2'-O-methyl modified nucleotide
  modified_base 95: mod_base = OTHER; note = 2'-O-methyl modified nucleotide
  modified_base 96: mod_base = OTHER; note = 2'-O-methyl modified nucleotide
  modified_base 117: mod_base = OTHER; note = Nucleotide with phosphorothioate linkage
  modified_base 118: mod_base = OTHER; note = 2'-O-methyl modified nucleotide with phosphorothioate linkage
  modified_base 119: mod_base = OTHER; note = 2'-O-methyl modified nucleotide with phosphorothioate linkage
  modified_base 120: mod_base = OTHER; note = 2'-O-methyl modified nucleotide
gagaatcaaaatcggtgaatgttttagagctagaaatagcaagttaaaataaggctagtccgttatcaacttgaaaaagtggcaccgagtcggtgctctgccttagtgattcaccgattt

SEQ ID NO: 16180 - RNA, 119 nt, synthetic construct
  source 1..119: mol_type = other RNA
  modified_base 1: mod_base = OTHER; note = 2'-O-methyl modified nucleotide with phosphorothioate linkage
  modified_base 2: mod_base = OTHER; note = 2'-O-methyl modified nucleotide with phosphorothioate linkage
  modified_base 3: mod_base = OTHER; note = 2'-O-methyl modified nucleotide with phosphorothioate linkage
  modified_base 29: mod_base = OTHER; note = 2'-O-methyl modified nucleotide
  modified_base 30: mod_base = OTHER; note = 2'-O-methyl modified nucleotide
  modified_base 31: mod_base = OTHER; note = 2'-O-methyl modified nucleotide
  modified_base 32: mod_base = OTHER; note = 2'-O-methyl modified nucleotide
  modified_base 33: mod_base = OTHER; note = 2'-O-methyl modified nucleotide
  modified_base 34: mod_base = OTHER; note = 2'-O-methyl modified nucleotide
  modified_base 35: mod_base = OTHER; note = 2'-O-methyl modified nucleotide
  modified_base 36: mod_base = OTHER; note = 2'-O-methyl modified nucleotide
  modified_base 37: mod_base = OTHER; note = 2'-O-methyl modified nucleotide
  modified_base 38: mod_base = OTHER; note = 2'-O-methyl modified nucleotide
  modified_base 39: mod_base = OTHER; note = 2'-O-methyl modified nucleotide
  modified_base 40: mod_base = OTHER; note = 2'-O-methyl modified nucleotide
  modified_base 69: mod_base = OTHER; note = 2'-O-methyl modified nucleotide
  modified_base 70: mod_base = OTHER; note = 2'-O-methyl modified nucleotide
  modified_base 71: mod_base = OTHER; note = 2'-O-methyl modified nucleotide
  modified_base 72: mod_base = OTHER; note = 2'-O-methyl modified nucleotide
  modified_base 73: mod_base = OTHER; note = 2'-O-methyl modified nucleotide
  modified_base 74: mod_base = OTHER; note = 2'-O-methyl modified nucleotide
  modified_base 75: mod_base = OTHER; note = 2'-O-methyl modified nucleotide
  modified_base 76: mod_base = OTHER; note = 2'-O-methyl modified nucleotide
  modified_base 77: mod_base = OTHER; note = 2'-O-methyl modified nucleotide
  modified_base 78: mod_base = OTHER; note = 2'-O-methyl modified nucleotide
  modified_base 79: mod_base = OTHER; note = 2'-O-methyl modified nucleotide
  modified_base 80: mod_base = OTHER; note = 2'-O-methyl modified nucleotide
  modified_base 81: mod_base = OTHER; note = 2'-O-methyl modified nucleotide
  modified_base 82: mod_base = OTHER; note = 2'-O-methyl modified nucleotide
  modified_base 83: mod_base = OTHER; note = 2'-O-methyl modified nucleotide
  modified_base 84: mod_base = OTHER; note = 2'-O-methyl modified nucleotide
  modified_base 85: mod_base = OTHER; note = 2'-O-methyl modified nucleotide
  modified_base 86: mod_base = OTHER; note = 2'-O-methyl modified nucleotide
  modified_base 87: mod_base = OTHER; note = 2'-O-methyl modified nucleotide
  modified_base 88: mod_base = OTHER; note = 2'-O-methyl modified nucleotide
  modified_base 89: mod_base = OTHER; note = 2'-O-methyl modified nucleotide
  modified_base 90: mod_base = OTHER; note = 2'-O-methyl modified nucleotide
  modified_base 91: mod_base = OTHER; note = 2'-O-methyl modified nucleotide
  modified_base 92: mod_base = OTHER; note = 2'-O-methyl modified nucleotide
  modified_base 93: mod_base = OTHER; note = 2'-O-methyl modified nucleotide
  modified_base 94: mod_base = OTHER; note = 2'-O-methyl modified nucleotide
  modified_base 95: mod_base = OTHER; note = 2'-O-methyl modified nucleotide
  modified_base 96: mod_base = OTHER; note = 2'-O-methyl modified nucleotide
  modified_base 116: mod_base = OTHER; note = Nucleotide with phosphorothioate linkage
  modified_base 117: mod_base = OTHER; note = 2'-O-methyl modified nucleotide with phosphorothioate linkage
  modified_base 118: mod_base = OTHER; note = 2'-O-methyl modified nucleotide with phosphorothioate linkage
  modified_base 119: mod_base = OTHER; note = 2'-O-methyl modified nucleotide
gagaatcaaaatcggtgaatgttttagagctagaaatagcaagttaaaataaggctagtccgttatcaacttgaaaaagtggcaccgagtcggtgctctgccttagtgattcaccgatt

SEQ ID NO: 16181 - RNA, 126 nt, synthetic construct
  source 1..126: mol_type = other RNA
  modified_base 1: mod_base = OTHER; note = 2'-O-methyl modified nucleotide with phosphorothioate linkage
  modified_base 2: mod_base = OTHER; note = 2'-O-methyl modified nucleotide with phosphorothioate linkage
  modified_base 3: mod_base = OTHER; note = 2'-O-methyl modified nucleotide with phosphorothioate linkage
  modified_base 29: mod_base = OTHER; note = 2'-O-methyl modified nucleotide
  modified_base 30: mod_base = OTHER; note = 2'-O-methyl modified nucleotide
  modified_base 31: mod_base = OTHER; note = 2'-O-methyl modified nucleotide
  modified_base 32: mod_base = OTHER; note = 2'-O-methyl modified nucleotide
  modified_base 33: mod_base = OTHER; note = 2'-O-methyl modified nucleotide
  modified_base 34: mod_base = OTHER; note = 2'-O-methyl modified nucleotide
  modified_base 35: mod_base = OTHER; note = 2'-O-methyl modified nucleotide
  modified_base 36: mod_base = OTHER; note = 2'-O-methyl modified nucleotide
  modified_base 37: mod_base = OTHER; note = 2'-O-methyl modified nucleotide
  modified_base 38: mod_base = OTHER; note = 2'-O-methyl modified nucleotide
  modified_base 39: mod_base = OTHER; note = 2'-O-methyl modified nucleotide
  modified_base 40: mod_base = OTHER; note = 2'-O-methyl modified nucleotide
  modified_base 69: mod_base = OTHER; note = 2'-O-methyl modified nucleotide
  modified_base 70: mod_base = OTHER; note = 2'-O-methyl modified nucleotide
  modified_base 71: mod_base = OTHER; note = 2'-O-methyl modified nucleotide
  modified_base 72: mod_base = OTHER; note = 2'-O-methyl modified nucleotide
  modified_base 73: mod_base = OTHER; note = 2'-O-methyl modified nucleotide
  modified_base 74: mod_base = OTHER; note = 2'-O-methyl modified nucleotide
  modified_base 75: mod_base = OTHER; note = 2'-O-methyl modified nucleotide
  modified_base 76: mod_base = OTHER; note = 2'-O-methyl modified nucleotide
  modified_base 77: mod_base = OTHER; note = 2'-O-methyl modified nucleotide
  modified_base 78: mod_base = OTHER; note = 2'-O-methyl modified nucleotide
  modified_base 79: mod_base = OTHER; note = 2'-O-methyl modified nucleotide
  modified_base 80: mod_base = OTHER; note = 2'-O-methyl modified nucleotide
  modified_base 81: mod_base = OTHER; note = 2'-O-methyl modified nucleotide
  modified_base 82: mod_base = OTHER; note = 2'-O-methyl modified nucleotide
  modified_base 83: mod_base = OTHER; note = 2'-O-methyl modified nucleotide
  modified_base 84: mod_base = OTHER; note = 2'-O-methyl modified nucleotide
  modified_base 85: mod_base = OTHER; note = 2'-O-methyl modified nucleotide
  modified_base 86: mod_base = OTHER; note = 2'-O-methyl modified nucleotide
  modified_base 87: mod_base = OTHER; note = 2'-O-methyl modified nucleotide
  modified_base 88: mod_base = OTHER; note = 2'-O-methyl modified nucleotide
  modified_base 89: mod_base = OTHER; note = 2'-O-methyl modified nucleotide
  modified_base 90: mod_base = OTHER; note = 2'-O-methyl modified nucleotide
  modified_base 91: mod_base = OTHER; note = 2'-O-methyl modified nucleotide
  modified_base 92: mod_base = OTHER; note = 2'-O-methyl modified nucleotide
  modified_base 93: mod_base = OTHER; note = 2'-O-methyl modified nucleotide
  modified_base 94: mod_base = OTHER; note = 2'-O-methyl modified nucleotide
  modified_base 95: mod_base = OTHER; note = 2'-O-methyl modified nucleotide
  modified_base 96: mod_base = OTHER; note = 2'-O-methyl modified nucleotide
  modified_base 123: mod_base = OTHER; note = Nucleotide with phosphorothioate linkage
  modified_base 124: mod_base = OTHER; note = 2'-O-methyl modified nucleotide with phosphorothioate linkage
  modified_base 125: mod_base = OTHER; note = 2'-O-methyl modified nucleotide with phosphorothioate linkage
  modified_base 126: mod_base = OTHER; note = 2'-O-methyl modified nucleotide
gagaatcaaaatcggtgaatgttttagagctagaaatagcaagttaaaataaggctagtccgttatcaacttgaaaaagtggcaccgagtcggtgctgtctgccttagtgattcaccgattttgat

SEQ ID NO: 16182 - RNA, 125 nt, synthetic construct
  source 1..125: mol_type = other RNA
  modified_base 1: mod_base = OTHER; note = 2'-O-methyl modified nucleotide with phosphorothioate linkage
  modified_base 2: mod_base = OTHER; note = 2'-O-methyl modified nucleotide with phosphorothioate linkage
  modified_base 3: mod_base = OTHER; note = 2'-O-methyl modified nucleotide with phosphorothioate linkage
  modified_base 29: mod_base = OTHER; note = 2'-O-methyl modified nucleotide
  modified_base 30: mod_base = OTHER; note = 2'-O-methyl modified nucleotide
  modified_base 31: mod_base = OTHER; note = 2'-O-methyl modified nucleotide
  modified_base 32: mod_base = OTHER; note = 2'-O-methyl modified nucleotide
  modified_base 33: mod_base = OTHER; note = 2'-O-methyl modified nucleotide
  modified_base 34: mod_base = OTHER; note = 2'-O-methyl modified nucleotide
  modified_base 35: mod_base = OTHER; note = 2'-O-methyl modified nucleotide
  modified_base 36: mod_base = OTHER; note = 2'-O-methyl modified nucleotide
  modified_base 37: mod_base = OTHER; note = 2'-O-methyl modified nucleotide
  modified_base 38: mod_base = OTHER; note = 2'-O-methyl modified nucleotide
  modified_base 39: mod_base = OTHER; note = 2'-O-methyl modified nucleotide
  modified_base 40: mod_base = OTHER; note = 2'-O-methyl modified nucleotide
  modified_base 69: mod_base = OTHER; note = 2'-O-methyl modified nucleotide
  modified_base 70: mod_base = OTHER; note = 2'-O-methyl modified nucleotide
  modified_base 71: mod_base = OTHER; note = 2'-O-methyl modified nucleotide
  modified_base 72: mod_base = OTHER; note = 2'-O-methyl modified nucleotide
  modified_base 73: mod_base = OTHER; note = 2'-O-methyl modified nucleotide
  modified_base 74: mod_base = OTHER; note = 2'-O-methyl modified nucleotide
  modified_base 75: mod_base = OTHER; note = 2'-O-methyl modified nucleotide
  modified_base 76: mod_base = OTHER; note = 2'-O-methyl modified nucleotide
  modified_base 77: mod_base = OTHER; note = 2'-O-methyl modified nucleotide
  modified_base 78: mod_base = OTHER; note = 2'-O-methyl modified nucleotide
  modified_base 79: mod_base = OTHER; note = 2'-O-methyl modified nucleotide
  modified_base 80: mod_base = OTHER; note = 2'-O-methyl modified nucleotide
  modified_base 81: mod_base = OTHER; note = 2'-O-methyl modified nucleotide
  modified_base 82: mod_base = OTHER; note = 2'-O-methyl modified nucleotide
  modified_base 83: mod_base = OTHER; note = 2'-O-methyl modified nucleotide
  modified_base 84: mod_base = OTHER; note = 2'-O-methyl modified nucleotide
  modified_base 85: mod_base = OTHER; note = 2'-O-methyl modified nucleotide
  modified_base 86: mod_base = OTHER; note = 2'-O-methyl modified nucleotide
  modified_base 87: mod_base = OTHER; note = 2'-O-methyl modified nucleotide
  modified_base 88: mod_base = OTHER; note = 2'-O-methyl modified nucleotide
  modified_base 89: mod_base = OTHER; note = 2'-O-methyl modified nucleotide
  modified_base 90: mod_base = OTHER; note = 2'-O-methyl modified nucleotide
  modified_base 91: mod_base = OTHER; note = 2'-O-methyl modified nucleotide
  modified_base 92: mod_base = OTHER; note = 2'-O-methyl modified nucleotide
  modified_base 93: mod_base = OTHER; note = 2'-O-methyl modified nucleotide
  modified_base 94: mod_base = OTHER; note = 2'-O-methyl modified nucleotide
  modified_base 95: mod_base = OTHER; note = 2'-O-methyl modified nucleotide
  modified_base 96: mod_base = OTHER; note = 2'-O-methyl modified nucleotide
  modified_base 122: mod_base = OTHER; note = Nucleotide with phosphorothioate linkage
  modified_base 123: mod_base = OTHER; note = 2'-O-methyl modified nucleotide with phosphorothioate linkage
  modified_base 124: mod_base = OTHER; note = 2'-O-methyl modified nucleotide with phosphorothioate linkage
  modified_base 125: mod_base = OTHER; note = 2'-O-methyl modified nucleotide
gagaatcaaaatcggtgaatgttttagagctagaaatagcaagttaaaataaggctagtccgttatcaacttgaaaaagtggcaccgagtcggtgctgtctgccttagtgattcaccgattttga

SEQ ID NO: 16183 - RNA, 124 nt, synthetic construct
  source 1..124: mol_type = other RNA
  modified_base 1: mod_base = OTHER; note = 2'-O-methyl modified nucleotide with phosphorothioate linkage
  modified_base 2: mod_base = OTHER; note = 2'-O-methyl modified nucleotide with phosphorothioate linkage
  modified_base 3: mod_base = OTHER; note = 2'-O-methyl modified nucleotide with phosphorothioate linkage
  modified_base 29: mod_base = OTHER; note = 2'-O-methyl modified nucleotide
  modified_base 30: mod_base = OTHER; note = 2'-O-methyl modified nucleotide
  modified_base 31: mod_base = OTHER; note = 2'-O-methyl modified nucleotide
  modified_base 32: mod_base = OTHER; note = 2'-O-methyl modified nucleotide
  modified_base 33: mod_base = OTHER; note = 2'-O-methyl modified nucleotide
  modified_base 34: mod_base = OTHER; note = 2'-O-methyl modified nucleotide
  modified_base 35: mod_base = OTHER; note = 2'-O-methyl modified nucleotide
  modified_base 36: mod_base = OTHER; note = 2'-O-methyl modified nucleotide
  modified_base 37: mod_base = OTHER; note = 2'-O-methyl modified nucleotide
  modified_base 38: mod_base = OTHER; note = 2'-O-methyl modified nucleotide
  modified_base 39: mod_base = OTHER; note = 2'-O-methyl modified nucleotide
  modified_base 40: mod_base = OTHER; note = 2'-O-methyl modified nucleotide
  modified_base 69: mod_base = OTHER; note = 2'-O-methyl modified nucleotide
  modified_base 70: mod_base = OTHER; note = 2'-O-methyl modified nucleotide
  modified_base 71: mod_base = OTHER; note = 2'-O-methyl modified nucleotide
  modified_base 72: mod_base = OTHER; note = 2'-O-methyl modified nucleotide
  modified_base 73: mod_base = OTHER; note = 2'-O-methyl modified nucleotide
  modified_base 74: mod_base = OTHER; note = 2'-O-methyl modified nucleotide
  modified_base 75: mod_base = OTHER; note = 2'-O-methyl modified nucleotide
  modified_base 76: mod_base = OTHER; note = 2'-O-methyl modified nucleotide
  modified_base 77: mod_base = OTHER; note = 2'-O-methyl modified nucleotide
  modified_base 78: mod_base = OTHER; note = 2'-O-methyl modified nucleotide
  modified_base 79: mod_base = OTHER; note = 2'-O-methyl modified nucleotide
  modified_base 80: mod_base = OTHER; note = 2'-O-methyl modified nucleotide
  modified_base 81: mod_base = OTHER; note = 2'-O-methyl modified nucleotide
  modified_base 82: mod_base = OTHER; note = 2'-O-methyl modified nucleotide
  modified_base 83: mod_base = OTHER; note = 2'-O-methyl modified nucleotide
  modified_base 84: mod_base = OTHER; note = 2'-O-methyl modified nucleotide
  modified_base 85: mod_base = OTHER; note = 2'-O-methyl modified nucleotide
  modified_base 86: mod_base = OTHER; note = 2'-O-methyl modified nucleotide
  modified_base 87: mod_base = OTHER; note = 2'-O-methyl modified nucleotide
  modified_base 88: mod_base = OTHER; note = 2'-O-methyl modified nucleotide
  modified_base 89: mod_base = OTHER; note = 2'-O-methyl modified nucleotide
  modified_base 90: mod_base = OTHER; note = 2'-O-methyl modified nucleotide
  modified_base 91: mod_base = OTHER; note = 2'-O-methyl modified nucleotide
  modified_base 92: mod_base = OTHER; note = 2'-O-methyl modified nucleotide
  modified_base 93: mod_base = OTHER; note = 2'-O-methyl modified nucleotide
  modified_base 94: mod_base = OTHER; note = 2'-O-methyl modified nucleotide
  modified_base 95: mod_base = OTHER; note = 2'-O-methyl modified nucleotide
  modified_base 96: mod_base = OTHER; note = 2'-O-methyl modified nucleotide
  modified_base 121: mod_base = OTHER; note = Nucleotide with phosphorothioate linkage
  modified_base 122: mod_base = OTHER; note = 2'-O-methyl modified nucleotide with phosphorothioate linkage
  modified_base 123: mod_base = OTHER; note = 2'-O-methyl modified nucleotide with phosphorothioate linkage
  modified_base 124: mod_base = OTHER; note = 2'-O-methyl modified nucleotide
gagaatcaaaatcggtgaatgttttagagctagaaatagcaagttaaaataaggctagtccgttatcaacttgaaaaagtggcaccgagtcggtgctgtctgccttagtgattcaccgattttg

SEQ ID NO: 16184 - RNA, 123 nt, synthetic construct
  source 1..123: mol_type = other RNA
  modified_base 1: mod_base = OTHER; note = 2'-O-methyl modified nucleotide with phosphorothioate linkage
  modified_base 2: mod_base = OTHER; note = 2'-O-methyl modified nucleotide with phosphorothioate linkage
  modified_base 3: mod_base = OTHER; note = 2'-O-methyl modified nucleotide with phosphorothioate linkage
  modified_base 29: mod_base = OTHER; note = 2'-O-methyl modified nucleotide
  modified_base 30: mod_base = OTHER; note = 2'-O-methyl modified nucleotide
  modified_base 31: mod_base = OTHER; note = 2'-O-methyl modified nucleotide
  modified_base 32: mod_base = OTHER; note = 2'-O-methyl modified nucleotide
  modified_base 33: mod_base = OTHER; note = 2'-O-methyl modified nucleotide
  modified_base 34: mod_base = OTHER; note = 2'-O-methyl modified nucleotide
  modified_base 35: mod_base = OTHER; note = 2'-O-methyl modified nucleotide
  modified_base 36: mod_base = OTHER; note = 2'-O-methyl modified nucleotide
  modified_base 37: mod_base = OTHER; note = 2'-O-methyl modified nucleotide
  modified_base 38: mod_base = OTHER; note = 2'-O-methyl modified nucleotide
  modified_base 39: mod_base = OTHER; note = 2'-O-methyl modified nucleotide
  modified_base 40: mod_base = OTHER; note = 2'-O-methyl modified nucleotide
  modified_base 69: mod_base = OTHER; note = 2'-O-methyl modified nucleotide
  modified_base 70: mod_base = OTHER; note = 2'-O-methyl modified nucleotide
  modified_base 71: mod_base = OTHER; note = 2'-O-methyl modified nucleotide
  modified_base 72: mod_base = OTHER; note = 2'-O-methyl modified nucleotide
  modified_base 73: mod_base = OTHER; note = 2'-O-methyl modified nucleotide
  modified_base 74: mod_base = OTHER; note = 2'-O-methyl modified nucleotide
  modified_base 75: mod_base = OTHER; note = 2'-O-methyl modified nucleotide
  modified_base 76: mod_base = OTHER; note = 2'-O-methyl modified nucleotide
  modified_base 77: mod_base = OTHER; note = 2'-O-methyl modified nucleotide
  modified_base 78: mod_base = OTHER; note = 2'-O-methyl modified nucleotide
  modified_base 79: mod_base = OTHER; note = 2'-O-methyl modified nucleotide
  modified_base 80: mod_base = OTHER; note = 2'-O-methyl modified nucleotide
  modified_base 81: mod_base = OTHER; note = 2'-O-methyl modified nucleotide
  modified_base 82: mod_base = OTHER; note = 2'-O-methyl modified nucleotide
  modified_base 83: mod_base = OTHER; note = 2'-O-methyl modified nucleotide
  modified_base 84: mod_base = OTHER; note = 2'-O-methyl modified nucleotide
  modified_base 85: mod_base = OTHER; note = 2'-O-methyl modified nucleotide
  modified_base 86: mod_base = OTHER; note = 2'-O-methyl modified nucleotide
  modified_base 87: mod_base = OTHER; note = 2'-O-methyl modified nucleotide
  modified_base 88: mod_base = OTHER; note = 2'-O-methyl modified nucleotide
  modified_base 89: mod_base = OTHER; note = 2'-O-methyl modified nucleotide
  modified_base 90: mod_base = OTHER; note = 2'-O-methyl modified nucleotide
  modified_base 91: mod_base = OTHER; note = 2'-O-methyl modified nucleotide
  modified_base 92: mod_base = OTHER; note = 2'-O-methyl modified nucleotide
  modified_base 93: mod_base = OTHER; note = 2'-O-methyl modified nucleotide
  modified_base 94: mod_base = OTHER; note = 2'-O-methyl modified nucleotide
  modified_base 95: mod_base = OTHER; note = 2'-O-methyl modified nucleotide
  modified_base 96: mod_base = OTHER; note = 2'-O-methyl modified nucleotide
  modified_base 120: mod_base = OTHER; note = Nucleotide with phosphorothioate linkage
  modified_base 121: mod_base = OTHER; note = 2'-O-methyl modified nucleotide with phosphorothioate linkage
  modified_base 122: mod_base = OTHER; note = 2'-O-methyl modified nucleotide with phosphorothioate linkage
  modified_base 123: mod_base = OTHER; note = 2'-O-methyl modified nucleotide
gagaatcaaaatcggtgaatgttttagagctagaaatagcaagttaaaataaggctagtccgttatcaacttgaaaaagtggcaccgagtcggtgctgtctgccttagtgattcaccgatttt

SEQ ID NO: 16185 - RNA, 122 nt, synthetic construct
  source 1..122: mol_type = other RNA
  modified_base 1: mod_base = OTHER; note = 2'-O-methyl modified nucleotide with phosphorothioate linkage
  modified_base 2: mod_base = OTHER; note = 2'-O-methyl modified nucleotide with phosphorothioate linkage
  modified_base 3: mod_base = OTHER; note = 2'-O-methyl modified nucleotide with phosphorothioate linkage
  modified_base 29: mod_base = OTHER; note = 2'-O-methyl modified nucleotide
  modified_base 30: mod_base = OTHER; note = 2'-O-methyl modified nucleotide
  modified_base 31: mod_base = OTHER; note = 2'-O-methyl modified nucleotide
  modified_base 32: mod_base = OTHER; note = 2'-O-methyl modified nucleotide
  modified_base 33: mod_base = OTHER; note = 2'-O-methyl modified nucleotide
  modified_base 34: mod_base = OTHER; note = 2'-O-methyl modified nucleotide
  modified_base 35: mod_base = OTHER; note = 2'-O-methyl modified nucleotide
  modified_base 36: mod_base = OTHER; note = 2'-O-methyl modified nucleotide
  modified_base 37: mod_base = OTHER; note = 2'-O-methyl modified nucleotide
  modified_base 38: mod_base = OTHER; note = 2'-O-methyl modified nucleotide
  modified_base 39: mod_base = OTHER; note = 2'-O-methyl modified nucleotide
  modified_base 40: mod_base = OTHER; note = 2'-O-methyl modified nucleotide
  modified_base 69: mod_base = OTHER; note = 2'-O-methyl modified nucleotide
  modified_base 70: mod_base = OTHER; note = 2'-O-methyl modified nucleotide
  modified_base 71: mod_base = OTHER; note = 2'-O-methyl modified nucleotide
  modified_base 72: mod_base = OTHER; note = 2'-O-methyl modified nucleotide
  modified_base 73: mod_base = OTHER; note = 2'-O-methyl modified nucleotide
  modified_base 74: mod_base = OTHER; note = 2'-O-methyl modified nucleotide
  modified_base 75: mod_base = OTHER; note = 2'-O-methyl modified nucleotide
  modified_base 76: mod_base = OTHER; note = 2'-O-methyl modified nucleotide
  modified_base 77: mod_base = OTHER; note = 2'-O-methyl modified nucleotide
  modified_base 78: mod_base = OTHER; note = 2'-O-methyl modified nucleotide
  modified_base 79: mod_base = OTHER; note = 2'-O-methyl modified nucleotide
  modified_base 80: mod_base = OTHER; note = 2'-O-methyl modified nucleotide
  modified_base 81: mod_base = OTHER; note = 2'-O-methyl modified nucleotide
  modified_base 82: mod_base = OTHER; note = 2'-O-methyl modified nucleotide
  modified_base 83: mod_base = OTHER; note = 2'-O-methyl modified nucleotide
  modified_base 84: mod_base = OTHER; note = 2'-O-methyl modified nucleotide
  modified_base 85: mod_base = OTHER; note = 2'-O-methyl modified nucleotide
  modified_base 86: mod_base = OTHER; note = 2'-O-methyl modified nucleotide
  modified_base 87: mod_base = OTHER; note = 2'-O-methyl modified nucleotide
  modified_base 88: mod_base = OTHER; note = 2'-O-methyl modified nucleotide
  modified_base 89: mod_base = OTHER; note = 2'-O-methyl modified nucleotide
  modified_base 90: mod_base = OTHER; note = 2'-O-methyl modified nucleotide
  modified_base 91: mod_base = OTHER; note = 2'-O-methyl modified nucleotide
  modified_base 92: mod_base = OTHER; note = 2'-O-methyl modified nucleotide
  modified_base 93: mod_base = OTHER; note = 2'-O-methyl modified nucleotide
  modified_base 94: mod_base = OTHER; note = 2'-O-methyl modified nucleotide
  modified_base 95: mod_base = OTHER; note = 2'-O-methyl modified nucleotide
  modified_base 96: mod_base = OTHER; note = 2'-O-methyl modified nucleotide
  modified_base 119: mod_base = OTHER; note = Nucleotide with phosphorothioate linkage
  modified_base 120: mod_base = OTHER; note = 2'-O-methyl modified nucleotide with phosphorothioate linkage
  modified_base 121: mod_base = OTHER; note = 2'-O-methyl modified nucleotide with phosphorothioate linkage
  modified_base 122: mod_base = OTHER; note = 2'-O-methyl modified nucleotide
gagaatcaaaatcggtgaatgttttagagctagaaatagcaagttaaaataaggctagtccgttatcaacttgaaaaagtggcaccgagtcggtgctgtctgccttagtgattcaccgattt

SEQ ID NO: 16186 - RNA, 121 nt, synthetic construct
  source 1..121: mol_type = other RNA
  modified_base 1: mod_base = OTHER; note = 2'-O-methyl modified nucleotide with phosphorothioate linkage
  modified_base 2: mod_base = OTHER; note = 2'-O-methyl modified nucleotide with phosphorothioate linkage
  modified_base 3: mod_base = OTHER; note = 2'-O-methyl modified nucleotide with phosphorothioate linkage
  modified_base 29: mod_base = OTHER; note = 2'-O-methyl modified nucleotide
  modified_base 30: mod_base = OTHER; note = 2'-O-methyl modified nucleotide
  modified_base 31: mod_base = OTHER; note = 2'-O-methyl modified nucleotide
  modified_base 32: mod_base = OTHER; note = 2'-O-methyl modified nucleotide
  modified_base 33: mod_base = OTHER; note = 2'-O-methyl modified nucleotide
  modified_base 34: mod_base = OTHER; note = 2'-O-methyl modified nucleotide
  modified_base 35: mod_base = OTHER; note = 2'-O-methyl modified nucleotide
  modified_base 36: mod_base = OTHER; note = 2'-O-methyl modified nucleotide
  modified_base 37: mod_base = OTHER; note = 2'-O-methyl modified nucleotide
  modified_base 38: mod_base = OTHER; note = 2'-O-methyl modified nucleotide
  modified_base 39: mod_base = OTHER; note = 2'-O-methyl modified nucleotide
  modified_base 40: mod_base = OTHER; note = 2'-O-methyl modified nucleotide
  modified_base 69: mod_base = OTHER; note = 2'-O-methyl modified nucleotide
  modified_base 70: mod_base = OTHER; note = 2'-O-methyl modified nucleotide
  modified_base 71: mod_base = OTHER; note = 2'-O-methyl modified nucleotide
  modified_base 72: mod_base = OTHER; note = 2'-O-methyl modified nucleotide
  modified_base 73: mod_base = OTHER; note = 2'-O-methyl modified nucleotide
  modified_base 74: mod_base = OTHER; note = 2'-O-methyl modified nucleotide
  modified_base 75: mod_base = OTHER; note = 2'-O-methyl modified nucleotide
  modified_base 76: mod_base = OTHER; note = 2'-O-methyl modified nucleotide
  modified_base 77: mod_base = OTHER; note = 2'-O-methyl modified nucleotide
  modified_base 78: mod_base = OTHER; note = 2'-O-methyl modified nucleotide
  modified_base 79: mod_base = OTHER; note = 2'-O-methyl modified nucleotide
  modified_base 80: mod_base = OTHER; note = 2'-O-methyl modified nucleotide
  modified_base 81: mod_base = OTHER; note = 2'-O-methyl modified nucleotide
  modified_base 82: mod_base = OTHER; note = 2'-O-methyl modified nucleotide
  modified_base 83: mod_base = OTHER; note = 2'-O-methyl modified nucleotide
  modified_base 84: mod_base = OTHER; note = 2'-O-methyl modified nucleotide
  modified_base 85: mod_base = OTHER; note = 2'-O-methyl modified nucleotide
  modified_base 86: mod_base = OTHER; note = 2'-O-methyl modified nucleotide
  modified_base 87: mod_base = OTHER; note = 2'-O-methyl modified nucleotide
  modified_base 88: mod_base = OTHER; note = 2'-O-methyl modified nucleotide
  modified_base 89: mod_base = OTHER; note = 2'-O-methyl modified nucleotide
  modified_base 90: mod_base = OTHER; note = 2'-O-methyl modified nucleotide
  modified_base 91: mod_base = OTHER; note = 2'-O-methyl modified nucleotide
  modified_base 92: mod_base = OTHER; note = 2'-O-methyl modified nucleotide
  modified_base 93: mod_base = OTHER; note = 2'-O-methyl modified nucleotide
  modified_base 94: mod_base = OTHER; note = 2'-O-methyl modified nucleotide
  modified_base 95: mod_base = OTHER; note = 2'-O-methyl modified nucleotide
  modified_base 96: mod_base = OTHER; note = 2'-O-methyl modified nucleotide
  modified_base 118: mod_base = OTHER; note = Nucleotide with phosphorothioate linkage
  modified_base 119: mod_base = OTHER; note = 2'-O-methyl modified nucleotide with phosphorothioate linkage
  modified_base 120: mod_base = OTHER; note = 2'-O-methyl modified nucleotide with phosphorothioate linkage
  modified_base 121: mod_base = OTHER; note = 2'-O-methyl modified nucleotide
gagaatcaaaatcggtgaatgttttagagctagaaatagcaagttaaaataaggctagtccgttatcaacttgaaaaagtggcaccgagtcggtgctgtctgccttagtgattcaccgatt

SEQ ID NO: 16187 - RNA, 128 nt, synthetic construct
  source 1..128: mol_type = other RNA
  modified_base 1: mod_base = OTHER; note = 2'-O-methyl modified nucleotide with phosphorothioate linkage
  modified_base 2: mod_base = OTHER; note = 2'-O-methyl modified nucleotide with phosphorothioate linkage
  modified_base 3: mod_base = OTHER; note = 2'-O-methyl modified nucleotide with phosphorothioate linkage
  modified_base 29: mod_base = OTHER; note = 2'-O-methyl modified nucleotide
  modified_base 30: mod_base = OTHER; note = 2'-O-methyl modified nucleotide
  modified_base 31: mod_base = OTHER; note = 2'-O-methyl modified nucleotide
  modified_base 32: mod_base = OTHER; note = 2'-O-methyl modified nucleotide
  modified_base 33: mod_base = OTHER; note = 2'-O-methyl modified nucleotide
  modified_base 34: mod_base = OTHER; note = 2'-O-methyl modified nucleotide
  modified_base 35: mod_base = OTHER; note = 2'-O-methyl modified nucleotide
  modified_base 36: mod_base = OTHER; note = 2'-O-methyl modified nucleotide
  modified_base 37: mod_base = OTHER; note = 2'-O-methyl modified nucleotide
  modified_base 38: mod_base = OTHER; note = 2'-O-methyl modified nucleotide
  modified_base 39: mod_base = OTHER; note = 2'-O-methyl modified nucleotide
  modified_base 40: mod_base = OTHER; note = 2'-O-methyl modified nucleotide
  modified_base 69: mod_base = OTHER; note = 2'-O-methyl modified nucleotide
  modified_base 70: mod_base = OTHER; note = 2'-O-methyl modified nucleotide
  modified_base 71: mod_base = OTHER; note = 2'-O-methyl modified nucleotide
  modified_base 72: mod_base = OTHER; note = 2'-O-methyl modified nucleotide
  modified_base 73: mod_base = OTHER; note = 2'-O-methyl modified nucleotide
  modified_base 74: mod_base = OTHER; note = 2'-O-methyl modified nucleotide
  modified_base 75: mod_base = OTHER; note = 2'-O-methyl modified nucleotide
  modified_base 76: mod_base = OTHER; note = 2'-O-methyl modified nucleotide
  modified_base 77: mod_base = OTHER; note = 2'-O-methyl modified nucleotide
  modified_base 78: mod_base = OTHER; note = 2'-O-methyl modified nucleotide
  modified_base 79: mod_base = OTHER; note = 2'-O-methyl modified nucleotide
  modified_base 80: mod_base = OTHER; note = 2'-O-methyl modified nucleotide
  modified_base 81: mod_base = OTHER; note = 2'-O-methyl modified nucleotide
  modified_base 82: mod_base = OTHER; note = 2'-O-methyl modified nucleotide
  modified_base 83: mod_base = OTHER; note = 2'-O-methyl modified nucleotide
  modified_base 84: mod_base = OTHER; note = 2'-O-methyl modified nucleotide
  modified_base 85: mod_base = OTHER; note = 2'-O-methyl modified nucleotide
  modified_base 86: mod_base = OTHER; note = 2'-O-methyl modified nucleotide
  modified_base 87: mod_base = OTHER; note = 2'-O-methyl modified nucleotide
  modified_base 88: mod_base = OTHER; note = 2'-O-methyl modified nucleotide
  modified_base 89: mod_base = OTHER; note = 2'-O-methyl modified nucleotide
  modified_base 90: mod_base = OTHER; note = 2'-O-methyl modified nucleotide
  modified_base 91: mod_base = OTHER; note = 2'-O-methyl modified nucleotide
  modified_base 92: mod_base = OTHER; note = 2'-O-methyl modified nucleotide
  modified_base 93: mod_base = OTHER; note = 2'-O-methyl modified nucleotide
  modified_base 94: mod_base = OTHER; note = 2'-O-methyl modified nucleotide
  modified_base 95: mod_base = OTHER; note = 2'-O-methyl modified nucleotide
  modified_base 96: mod_base = OTHER; note = 2'-O-methyl modified nucleotide
  modified_base 125: mod_base = OTHER; note = Nucleotide with phosphorothioate linkage
  modified_base 126: mod_base = OTHER; note = 2'-O-methyl modified nucleotide with phosphorothioate linkage
  modified_base 127: mod_base = OTHER; note = 2'-O-methyl modified nucleotide with phosphorothioate linkage
  modified_base 128: mod_base = OTHER; note = 2'-O-methyl modified nucleotide
gagaatcaaaatcggtgaatgttttagagctagaaatagcaagttaaaataaggctagtccgttatcaacttgaaaaagtggcaccgagtcggtgctctgtctgccttagtgattcaccgattttgat

SEQ ID NO: 16188 - RNA, 127 nt, synthetic construct
  source 1..127: mol_type = other RNA
  modified_base 1: mod_base = OTHER; note = 2'-O-methyl modified nucleotide with phosphorothioate linkage
  modified_base 2: mod_base = OTHER; note = 2'-O-methyl modified nucleotide with phosphorothioate linkage
  modified_base 3: mod_base = OTHER; note = 2'-O-methyl modified nucleotide with phosphorothioate linkage
  modified_base 29: mod_base = OTHER; note = 2'-O-methyl modified nucleotide
  modified_base 30: mod_base = OTHER; note = 2'-O-methyl modified nucleotide
  modified_base 31: mod_base = OTHER; note = 2'-O-methyl modified nucleotide
  modified_base 32: mod_base = OTHER; note = 2'-O-methyl modified nucleotide
  modified_base 33: mod_base = OTHER; note = 2'-O-methyl modified nucleotide
  modified_base 34: mod_base = OTHER; note = 2'-O-methyl modified nucleotide
  modified_base 35: mod_base = OTHER; note = 2'-O-methyl modified nucleotide
  modified_base 36: mod_base = OTHER; note = 2'-O-methyl modified nucleotide
  modified_base 37: mod_base = OTHER; note = 2'-O-methyl modified nucleotide
  modified_base 38: mod_base = OTHER; note = 2'-O-methyl modified nucleotide
  modified_base 39: mod_base = OTHER; note = 2'-O-methyl modified nucleotide
  modified_base 40: mod_base = OTHER; note = 2'-O-methyl modified nucleotide
  modified_base 69: mod_base = OTHER; note = 2'-O-methyl modified nucleotide
  modified_base 70: mod_base = OTHER; note = 2'-O-methyl modified nucleotide
  modified_base 71: mod_base = OTHER; note = 2'-O-methyl modified nucleotide
  modified_base 72: mod_base = OTHER; note = 2'-O-methyl modified nucleotide
  modified_base 73: mod_base = OTHER; note = 2'-O-methyl modified nucleotide
  modified_base 74: mod_base = OTHER; note = 2'-O-methyl modified nucleotide
  modified_base 75: mod_base = OTHER; note = 2'-O-methyl modified nucleotide
  modified_base 76: mod_base = OTHER; note = 2'-O-methyl modified nucleotide
  modified_base 77: mod_base = OTHER; note = 2'-O-methyl modified nucleotide
  modified_base 78: mod_base = OTHER; note = 2'-O-methyl modified nucleotide
  modified_base 79: mod_base = OTHER; note = 2'-O-methyl modified nucleotide
  modified_base 80: mod_base = OTHER; note = 2'-O-methyl modified nucleotide
  modified_base 81: mod_base = OTHER; note = 2'-O-methyl modified nucleotide
  modified_base 82: mod_base = OTHER; note = 2'-O-methyl modified nucleotide
  modified_base 83: mod_base = OTHER; note = 2'-O-methyl modified nucleotide
  modified_base 84: mod_base = OTHER; note = 2'-O-methyl modified nucleotide
  modified_base 85: mod_base = OTHER; note = 2'-O-methyl modified nucleotide
  modified_base 86: mod_base = OTHER; note = 2'-O-methyl modified nucleotide
  modified_base 87: mod_base = OTHER; note = 2'-O-methyl modified nucleotide
  modified_base 88: mod_base = OTHER; note = 2'-O-methyl modified nucleotide
  modified_base 89: mod_base = OTHER; note = 2'-O-methyl modified nucleotide
  modified_base 90: mod_base = OTHER; note = 2'-O-methyl modified nucleotide
  modified_base 91: mod_base = OTHER; note = 2'-O-methyl modified nucleotide
  modified_base 92: mod_base = OTHER; note = 2'-O-methyl modified nucleotide
  modified_base 93: mod_base = OTHER; note = 2'-O-methyl modified nucleotide
  modified_base 94: mod_base = OTHER; note = 2'-O-methyl modified nucleotide
  modified_base 95: mod_base = OTHER; note = 2'-O-methyl modified nucleotide
  modified_base 96: mod_base = OTHER; note = 2'-O-methyl modified nucleotide
  modified_base 124: mod_base = OTHER; note = Nucleotide with phosphorothioate linkage
  modified_base 125: mod_base = OTHER; note = 2'-O-methyl modified nucleotide with phosphorothioate linkage
  modified_base 126: mod_base = OTHER; note = 2'-O-methyl modified nucleotide with phosphorothioate linkage
  modified_base 127: mod_base = OTHER; note = 2'-O-methyl modified nucleotide
gagaatcaaaatcggtgaatgttttagagctagaaatagcaagttaaaataaggctagtccgttatcaacttgaaaaagtggcaccgagtcggtgctctgtctgccttagtgattcaccgattttga

SEQ ID NO: 16189 - RNA, 126 nt, synthetic construct
  source 1..126: mol_type = other RNA
  modified_base 1: mod_base = OTHER; note = 2'-O-methyl modified nucleotide with phosphorothioate linkage
  modified_base 2: mod_base = OTHER; note = 2'-O-methyl modified nucleotide with phosphorothioate linkage
  modified_base 3: mod_base = OTHER; note = 2'-O-methyl modified nucleotide with phosphorothioate linkage
  modified_base 29: mod_base = OTHER; note = 2'-O-methyl modified nucleotide
  modified_base 30: mod_base = OTHER; note = 2'-O-methyl modified nucleotide
  modified_base 31: mod_base = OTHER; note = 2'-O-methyl modified nucleotide
  modified_base 32: mod_base = OTHER; note = 2'-O-methyl modified nucleotide
  modified_base 33: mod_base = OTHER; note = 2'-O-methyl modified nucleotide
  modified_base 34: mod_base = OTHER; note = 2'-O-methyl modified nucleotide
  modified_base 35: mod_base = OTHER; note = 2'-O-methyl modified nucleotide
  modified_base 36: mod_base = OTHER; note = 2'-O-methyl modified nucleotide
  modified_base 37: mod_base = OTHER; note = 2'-O-methyl modified nucleotide
  modified_base 38: mod_base = OTHER; note = 2'-O-methyl modified nucleotide
  modified_base 39: mod_base = OTHER; note = 2'-O-methyl modified nucleotide
  modified_base 40: mod_base = OTHER; note = 2'-O-methyl modified nucleotide
  modified_base 69: mod_base = OTHER; note = 2'-O-methyl modified nucleotide
  modified_base 70: mod_base = OTHER; note = 2'-O-methyl modified nucleotide
  modified_base 71: mod_base = OTHER; note = 2'-O-methyl modified nucleotide
  modified_base 72: mod_base = OTHER; note = 2'-O-methyl modified nucleotide
  modified_base 73: mod_base = OTHER; note = 2'-O-methyl modified nucleotide
  modified_base 74: mod_base = OTHER; note = 2'-O-methyl modified nucleotide
  modified_base 75: mod_base = OTHER; note = 2'-O-methyl modified nucleotide
  modified_base 76: mod_base = OTHER; note = 2'-O-methyl modified nucleotide
  modified_base 77: mod_base = OTHER; note = 2'-O-methyl modified nucleotide
  modified_base 78: mod_base = OTHER; note = 2'-O-methyl modified nucleotide
  modified_base 79: mod_base = OTHER; note = 2'-O-methyl modified nucleotide
  modified_base 80: mod_base = OTHER; note = 2'-O-methyl modified nucleotide
  modified_base 81: mod_base = OTHER; note = 2'-O-methyl modified nucleotide
  modified_base 82: mod_base = OTHER; note = 2'-O-methyl modified nucleotide
  modified_base 83: mod_base = OTHER; note = 2'-O-methyl modified nucleotide
  modified_base 84: mod_base = OTHER; note = 2'-O-methyl modified nucleotide
  modified_base 85: mod_base = OTHER; note = 2'-O-methyl modified nucleotide
  modified_base 86: mod_base = OTHER; note = 2'-O-methyl modified nucleotide
  modified_base 87: mod_base = OTHER; note = 2'-O-methyl modified nucleotide
  modified_base 88: mod_base = OTHER; note = 2'-O-methyl modified nucleotide
  modified_base 89: mod_base = OTHER; note = 2'-O-methyl modified nucleotide
  modified_base 90: mod_base = OTHER; note = 2'-O-methyl modified nucleotide
  modified_base 91: mod_base = OTHER; note = 2'-O-methyl modified nucleotide
  modified_base 92: mod_base = OTHER; note = 2'-O-methyl modified nucleotide
  modified_base 93: mod_base = OTHER; note = 2'-O-methyl modified nucleotide
  modified_base 94: mod_base = OTHER; note = 2'-O-methyl modified nucleotide
  modified_base 95: mod_base = OTHER; note = 2'-O-methyl modified nucleotide
  modified_base 96: mod_base = OTHER; note = 2'-O-methyl modified nucleotide
  modified_base 123: mod_base = OTHER; note = Nucleotide with phosphorothioate linkage
  modified_base 124: mod_base = OTHER; note = 2'-O-methyl modified nucleotide with phosphorothioate linkage
  modified_base 125: mod_base = OTHER; note = 2'-O-methyl modified nucleotide with phosphorothioate linkage
  modified_base 126: mod_base = OTHER; note = 2'-O-methyl modified nucleotide
gagaatcaaaatcggtgaatgttttagagctagaaatagcaagttaaaataaggctagtccgttatcaacttgaaaaagtggcaccgagtcggtgctctgtctgccttagtgattcaccgattttg

SEQ ID NO: 16190 - RNA, 125 nt, synthetic construct
  source 1..125: mol_type = other RNA
  modified_base 1: mod_base = OTHER; note = 2'-O-methyl modified nucleotide with phosphorothioate linkage
  modified_base 2: mod_base = OTHER; note = 2'-O-methyl modified nucleotide with phosphorothioate linkage
  modified_base 3: mod_base = OTHER; note = 2'-O-methyl modified nucleotide with phosphorothioate linkage
  modified_base 29: mod_base = OTHER; note = 2'-O-methyl modified nucleotide
  modified_base 30: mod_base = OTHER; note = 2'-O-methyl modified nucleotide
  modified_base 31: mod_base = OTHER; note = 2'-O-methyl modified nucleotide
  modified_base 32: mod_base = OTHER; note = 2'-O-methyl modified nucleotide
  modified_base 33: mod_base = OTHER; note = 2'-O-methyl modified nucleotide
  modified_base 34: mod_base = OTHER; note = 2'-O-methyl modified nucleotide
  modified_base 35: mod_base = OTHER; note = 2'-O-methyl modified nucleotide
  modified_base 36: mod_base = OTHER; note = 2'-O-methyl modified nucleotide
  modified_base 37: mod_base = OTHER; note = 2'-O-methyl modified nucleotide
  modified_base 38: mod_base = OTHER; note = 2'-O-methyl modified nucleotide
  modified_base 39: mod_base = OTHER; note = 2'-O-methyl modified nucleotide
  modified_base 40: mod_base = OTHER; note = 2'-O-methyl modified nucleotide
  modified_base 69: mod_base = OTHER; note = 2'-O-methyl modified nucleotide
  modified_base 70: mod_base = OTHER; note = 2'-O-methyl modified nucleotide
  modified_base 71: mod_base = OTHER; note = 2'-O-methyl modified nucleotide
  modified_base 72: mod_base = OTHER; note = 2'-O-methyl modified nucleotide
  modified_base 73: mod_base = OTHER; note = 2'-O-methyl modified nucleotide
  modified_base 74: mod_base = OTHER; note = 2'-O-methyl modified nucleotide
  modified_base 75: mod_base = OTHER; note = 2'-O-methyl modified nucleotide
  modified_base 76: mod_base = OTHER; note = 2'-O-methyl modified nucleotide
  modified_base 77: mod_base = OTHER; note = 2'-O-methyl modified nucleotide
  modified_base 78: mod_base = OTHER; note = 2'-O-methyl modified nucleotide
  modified_base 79: mod_base = OTHER; note = 2'-O-methyl modified nucleotide
  modified_base 80: mod_base = OTHER; note = 2'-O-methyl modified nucleotide
  modified_base 81: mod_base = OTHER; note = 2'-O-methyl modified nucleotide
  modified_base 82: mod_base = OTHER; note = 2'-O-methyl modified nucleotide
  modified_base 83: mod_base = OTHER; note = 2'-O-methyl modified nucleotide
  modified_base 84: mod_base = OTHER; note = 2'-O-methyl modified nucleotide
  modified_base 85: mod_base = OTHER; note = 2'-O-methyl modified nucleotide
  modified_base 86: mod_base = OTHER; note = 2'-O-methyl modified nucleotide
  modified_base 87: mod_base = OTHER; note = 2'-O-methyl modified nucleotide
  modified_base 88: mod_base = OTHER; note = 2'-O-methyl modified nucleotide
  modified_base 89: mod_base = OTHER; note = 2'-O-methyl modified nucleotide
  modified_base 90: mod_base = OTHER; note = 2'-O-methyl modified nucleotide
  modified_base 91: mod_base = OTHER; note = 2'-O-methyl modified nucleotide
  modified_base 92: mod_base = OTHER; note = 2'-O-methyl modified nucleotide
  modified_base 93: mod_base = OTHER; note = 2'-O-methyl modified nucleotide
  modified_base 94: mod_base = OTHER; note = 2'-O-methyl modified nucleotide
  modified_base 95: mod_base = OTHER; note = 2'-O-methyl modified nucleotide
  modified_base 96: mod_base = OTHER; note = 2'-O-methyl modified nucleotide
  modified_base 122: mod_base = OTHER; note = Nucleotide with phosphorothioate linkage
  modified_base 123: mod_base = OTHER; note = 2'-O-methyl modified nucleotide with phosphorothioate linkage
  modified_base 124: mod_base = OTHER; note = 2'-O-methyl modified nucleotide with phosphorothioate linkage
  modified_base 125: mod_base = OTHER; note = 2'-O-methyl modified nucleotide
gagaatcaaaatcggtgaatgttttagagctagaaatagcaagttaaaataaggctagtccgttatcaacttgaaaaagtggcaccgagtcggtgctctgtctgccttagtgattcaccgatttt

SEQ ID NO: 16191 - RNA, 124 nt, synthetic construct
  source 1..124: mol_type = other RNA
  modified_base 1: mod_base = OTHER; note = 2'-O-methyl modified nucleotide with phosphorothioate linkage
  modified_base 2: mod_base = OTHER; note = 2'-O-methyl modified nucleotide with phosphorothioate linkage
  modified_base 3: mod_base = OTHER; note = 2'-O-methyl modified nucleotide with phosphorothioate linkage
  modified_base 29: mod_base = OTHER; note = 2'-O-methyl modified nucleotide
  modified_base 30: mod_base = OTHER; note = 2'-O-methyl modified nucleotide
  modified_base 31: mod_base = OTHER; note = 2'-O-methyl modified nucleotide
  modified_base 32: mod_base = OTHER; note = 2'-O-methyl modified nucleotide
  modified_base 33: mod_base = OTHER; note = 2'-O-methyl modified nucleotide
  modified_base 34: mod_base = OTHER; note = 2'-O-methyl modified nucleotide
  modified_base 35: mod_base = OTHER; note = 2'-O-methyl modified nucleotide
  modified_base 36: mod_base = OTHER; note = 2'-O-methyl modified nucleotide
  modified_base 37: mod_base = OTHER; note = 2'-O-methyl modified nucleotide
  modified_base 38: mod_base = OTHER; note = 2'-O-methyl modified nucleotide
  modified_base 39: mod_base = OTHER; note = 2'-O-methyl modified nucleotide
  modified_base 40: mod_base = OTHER; note = 2'-O-methyl modified nucleotide
  modified_base 69: mod_base = OTHER; note = 2'-O-methyl modified nucleotide
  modified_base 70: mod_base = OTHER; note = 2'-O-methyl modified nucleotide
  modified_base 71: mod_base = OTHER; note = 2'-O-methyl modified nucleotide
  modified_base 72: mod_base = OTHER; note = 2'-O-methyl modified nucleotide
  modified_base 73: mod_base = OTHER; note = 2'-O-methyl modified nucleotide
  modified_base 74: mod_base = OTHER; note = 2'-O-methyl modified nucleotide
  modified_base 75: mod_base = OTHER; note = 2'-O-methyl modified nucleotide
  modified_base 76: mod_base = OTHER; note = 2'-O-methyl modified nucleotide
  modified_base 77: mod_base = OTHER; note = 2'-O-methyl modified nucleotide
  modified_base 78: mod_base = OTHER; note = 2'-O-methyl modified nucleotide
  modified_base 79: mod_base = OTHER; note = 2'-O-methyl modified nucleotide
  modified_base 80: mod_base = OTHER; note = 2'-O-methyl modified nucleotide
  modified_base 81: mod_base = OTHER; note = 2'-O-methyl modified nucleotide
  modified_base 82: mod_base = OTHER; note = 2'-O-methyl modified nucleotide
  modified_base 83: mod_base = OTHER; note = 2'-O-methyl modified nucleotide
  modified_base 84: mod_base = OTHER; note = 2'-O-methyl modified nucleotide
  modified_base 85: mod_base = OTHER; note = 2'-O-methyl modified nucleotide
  modified_base 86: mod_base = OTHER; note = 2'-O-methyl modified nucleotide
  modified_base 87: mod_base = OTHER; note = 2'-O-methyl modified nucleotide
  modified_base 88: mod_base = OTHER; note = 2'-O-methyl modified nucleotide
  modified_base 89: mod_base = OTHER; note = 2'-O-methyl modified nucleotide
  modified_base 90: mod_base = OTHER; note = 2'-O-methyl modified nucleotide
  modified_base 91: mod_base = OTHER; note = 2'-O-methyl modified nucleotide
  modified_base 92: mod_base = OTHER; note = 2'-O-methyl modified nucleotide
  modified_base 93: mod_base = OTHER; note = 2'-O-methyl modified nucleotide
  modified_base 94: mod_base = OTHER; note = 2'-O-methyl modified nucleotide
  modified_base 95: mod_base = OTHER; note = 2'-O-methyl modified nucleotide
  modified_base 96: mod_base = OTHER; note = 2'-O-methyl modified nucleotide
  modified_base 121: mod_base = OTHER; note = Nucleotide with phosphorothioate linkage
  modified_base 122: mod_base = OTHER; note = 2'-O-methyl modified nucleotide with phosphorothioate linkage
  modified_base 123: mod_base = OTHER; note = 2'-O-methyl modified nucleotide with phosphorothioate linkage
  modified_base 124: mod_base = OTHER; note = 2'-O-methyl modified nucleotide
gagaatcaaaatcggtgaatgttttagagctagaaatagcaagttaaaataaggctagtccgttatcaacttgaaaaagtggcaccgagtcggtgctctgtctgccttagtgattcaccgattt

SEQ ID NO: 16192 - RNA, 123 nt, synthetic construct
  source 1..123: mol_type = other RNA
  modified_base 1: mod_base = OTHER; note = 2'-O-methyl modified nucleotide with phosphorothioate linkage
  modified_base 2: mod_base = OTHER; note = 2'-O-methyl modified nucleotide with phosphorothioate linkage
  modified_base 3: mod_base = OTHER; note = 2'-O-methyl modified nucleotide with phosphorothioate linkage
  modified_base 29: mod_base = OTHER; note = 2'-O-methyl modified nucleotide
  modified_base 30: mod_base = OTHER; note = 2'-O-methyl modified nucleotide
  modified_base 31: mod_base = OTHER; note = 2'-O-methyl modified nucleotide
  modified_base 32: mod_base = OTHER; note = 2'-O-methyl modified nucleotide
  modified_base 33: mod_base = OTHER; note = 2'-O-methyl modified nucleotide
  modified_base 34: mod_base = OTHER; note = 2'-O-methyl modified nucleotide
  modified_base 35: mod_base = OTHER; note = 2'-O-methyl modified nucleotide
  modified_base 36: mod_base = OTHER; note = 2'-O-methyl modified nucleotide
  modified_base 37: mod_base = OTHER; note = 2'-O-methyl modified nucleotide
  modified_base 38: mod_base = OTHER; note = 2'-O-methyl modified nucleotide
  modified_base 39: mod_base = OTHER; note = 2'-O-methyl modified nucleotide
  modified_base 40: mod_base = OTHER; note = 2'-O-methyl modified nucleotide
  modified_base 69: mod_base = OTHER; note = 2'-O-methyl modified nucleotide
  modified_base 70: mod_base = OTHER; note = 2'-O-methyl modified nucleotide
  modified_base 71: mod_base = OTHER; note = 2'-O-methyl modified nucleotide
  modified_base 72: mod_base = OTHER; note = 2'-O-methyl modified nucleotide
  modified_base 73: mod_base = OTHER; note = 2'-O-methyl modified nucleotide
  modified_base 74: mod_base = OTHER; note = 2'-O-methyl modified nucleotide
  modified_base 75: mod_base = OTHER; note = 2'-O-methyl modified nucleotide
  modified_base 76: mod_base = OTHER; note = 2'-O-methyl modified nucleotide
  modified_base 77: mod_base = OTHER; note = 2'-O-methyl modified nucleotide
  modified_base 78: mod_base = OTHER; note = 2'-O-methyl modified nucleotide
  modified_base 79: mod_base = OTHER; note = 2'-O-methyl modified nucleotide
  modified_base 80: mod_base = OTHER; note = 2'-O-methyl modified nucleotide
  modified_base 81: mod_base = OTHER; note = 2'-O-methyl modified nucleotide
  modified_base 82: mod_base = OTHER; note = 2'-O-methyl modified nucleotide
  modified_base 83: mod_base = OTHER; note = 2'-O-methyl modified nucleotide
  modified_base 84: mod_base = OTHER; note = 2'-O-methyl modified nucleotide
  modified_base 85: mod_base = OTHER; note = 2'-O-methyl modified nucleotide
  modified_base 86: mod_base = OTHER; note = 2'-O-methyl modified nucleotide
  modified_base 87: mod_base = OTHER; note = 2'-O-methyl modified nucleotide
  modified_base 88: mod_base = OTHER; note = 2'-O-methyl modified nucleotide
  modified_base 89: mod_base = OTHER; note = 2'-O-methyl modified nucleotide
  modified_base 90: mod_base = OTHER; note = 2'-O-methyl modified nucleotide
  modified_base 91: mod_base = OTHER; note = 2'-O-methyl modified nucleotide
  modified_base 92: mod_base = OTHER; note = 2'-O-methyl modified nucleotide
  modified_base 93: mod_base = OTHER; note = 2'-O-methyl modified nucleotide
  modified_base 94: mod_base = OTHER; note = 2'-O-methyl modified nucleotide
  modified_base 95: mod_base = OTHER; note = 2'-O-methyl modified nucleotide
  modified_base 96: mod_base = OTHER; note = 2'-O-methyl modified nucleotide
  modified_base 120: mod_base = OTHER; note = Nucleotide with phosphorothioate linkage
  modified_base 121: mod_base = OTHER; note = 2'-O-methyl modified nucleotide with phosphorothioate linkage
  modified_base 122: mod_base = OTHER; note = 2'-O-methyl modified nucleotide with phosphorothioate linkage
  modified_base 123: mod_base = OTHER; note = 2'-O-methyl modified nucleotide
gagaatcaaaatcggtgaatgttttagagctagaaatagcaagttaaaataaggctagtccgttatcaacttgaaaaagtggcaccgagtcggtgctctgtctgccttagtgattcaccgatt

(The sequence listing continues in the following parts.)